United States Patent Application Publication US 2018/0126003 A1 - sequence listing, part 167

SEQ ID NO: 293555 - DNA, 6737 bp, Artificial Sequence
  derived and/or modified sequence
gggatttcccgggtaacagagaagcggccgcggcggtagaggcggcggagacggtttctccatcttcccccctccccttcccccctcggagtttccctccctccctccctccctccttcccagtctgggcaccggagcctgtgaccgcttcgttagtggagaggtagctggcagtccgcttcggcgggcctgtgccccgcgccgttctcggggcctccctgctgagctcgcggctcacgctgagagggacacgcagtgacgagcggccgaagcagctttgcggttttgtagtgcatccctgagcatgagcacagaatgaagcggcgtttggatgaccaggagtcaccggtgtatgcagcccagcagcgtcggatccctggcagcacagaggcttttcctcaccagcaccgggtgcttgcccctgcccctcctgtgtatgaagcagtgtctgagaccatgcagtcagctacgggaattcagtactctgtaacacccagctaccaggtttcagccatgccacagagctccggcagtcatgggcccgctatagcagcagttcatagcagccatcatcacccaacagcggtgcagccccacggaggccaggtggtccagagtcatgctcatccagccccaccagttgcaccagtgcagggacagcagcaatttcagaggctgaaggtggaggatgcgctatcttatcttgaccaggtgaagctgcagtttggtagtcagcctcaggtctacaatgatttccttgacatcatgaaggaatttaaatctcagagcatcgacaccccaggagtgattagtcgtgtgtcccagctattcaaaggccaccccgatctgataatgggattcaacaccttcttgccccctggctacaaaattgaggtgcaaaccaatgacatggtgaatgtgacaactcctggccaggttcatcagattcccacccatggcatccagccacagcctcaaccaccaccccaacatccttcccagccttcagcccagtcagccccagctcctgcccagccagctcctcagcccccacctgccaaagtcagcaagccctcccaactgcaagcacatactccggccagtcagcagactcccccacttccaccgtatgcatccccacgttctccgccggtccagcctcacacaccagtgacaatctcgttgggaacggccccatccttgcagaacaatcaacctgtggagtttaatcatgccatcaactatgttaataagatcaagaacagatttcagggccaaccagacatctacaaagcattcctggagattttgcacacatatcagaaagagcagagaaatgccaaggaagctggaggaaactacactccagcattgacagagcaggaggtgtatgcccaggttgctcgtctctttaaaaaccaggaagatttgttgtcagagtttggacaattcctaccagatgccaacagctccgtgcttttaagcaaaacaactgctgagaaggttgattctgtgagaaatgatcatggaggcactgtcaagaagccccaactgaacaacaagccgcagaggcccagccagaatggctgccagatccgcagacatcctacaggaaccacccctccagttaagaagaaacccaaactgctcaatctgaaggattcttctatggcagatgccagcaaacatggtggtggaacagaatcgttattttttgataaggtccgaaaggctcttcggagtgcagaagcctacgaaaatttcctacgctgtcttgttatttttaaccaggaggtgatctctcgtgctgagcttgtgcaactagtctctcctttcctggggaaattccctgagttgtttaattggtttaaaaactttctgggctataaggagtctgtacatctggaaacttatccaaaggagcgagccacagagggcattgctatggagatagattatgcttcttgtaaacgattgggctccagctatcgagccttaccaaagagttaccagcagcccaagtgtacaggacggactcctctctgtaaagaggttttaaatgatacctgggtttccttcccttcgtggtctgaggactctacctttgtgagttccaagaagactcaatatgaagaacatatttatcgttgtgaagatgaacgctttgagcttgatgtagttttagagaccaatctggcaacaatccgggttctggaagcaatacagaagaagctttcccgcttgtctgctgaagaacaagccaaatttcgcttggacaacacccttgggggcacatcagaagtcatccatagaaaagcactccagaggatatatgctgataaagcagctgacatcattgatggtctgagaaagaatccctccattgctgttccaattgtccttaaaaggttgaagatgaaagaggaagaatggcgagaagctcagagaggctttaacaaagtatggcgagaacaaaatgagaaatactacttgaagtctctggaccaccaggggatcaactttaaacagaatgacaccaaggtcctgaggtctaagagcttactcaatgagattgagagtatctatgatgagaggcaagagcaggctacggaggagaatgctggtgtacctgttggcccacacctctcacttgcgtatgaagacaaacaaatactggaagatgctgctgctctgattatccaccatgtgaagaggcagacaggcattcagaaggaggacaaatataagataaaacaaatcatgcatcattttattccagatttgctctttgcccaaagaggtgatctctcagatgtggaggaagaggaagaagaagagatggatgtagatgaagccacaggggcagttaagaagcacaatggtgttgggggcagtccccctaagtccaagttactgtttagtaacacagcagctcaaaaattaagaggaatggatgaagtatacaacctcttctatgtcaacaacaactggtatatttttatgcgactgcaccagattctctgcctgaggctgctacggatttgttcccaagccgaacggcaaattgaagaagaaaaccgagagagagaatgggaacgggaagtgctgggcataaagcgagacaagagtgacagccctgccattcagctacgtctcaaagaacctatggatgttgatgtagaagattattacccagctttcctggacatggtgcggagcctgctggatggcaacatagactcatcacagtatgaagattcactgagagagatgttcaccattcatgcctacattgcctttaccatggacaaactgatccagagcattgtcagacagctgcagcatatcgtgagtgatgagatctgtgtgcaggtgactgacctttacctggcagaaaataataatggggccaccggaggccagctgaacacacagaactcaaggagcctcctggagtcaacgtatcagcggaaagctgagcagctaatgtcagatgagaattgctttaagcttatgtttattcagagccaaggccaggtccagctgactattgagcttctggacacagaagaggagaattcggatgaccctgtggaagcagagcgctggtcagactacgtggagcgatacatgaattcagatactacctcgcctgagcttcgtgaacatctagcacagaaaccagtatttctccccaggaatctacggcggatccggaagtgtcaacgtggtcgagagcagcaggaaaaggaagggaaggaaggaaacagcaagaagaccatggagaatgtggatagtctggataagctggagtgtagattcaagctgaattcctacaagatggtgtatgtgatcaaatcagaggactatatgtatcggaggaccgccctgctccgggctcatcagtcccatgagcgtgtaagcaagcgtctacatcagagattccaggcctgggtagataaatggaccaaggagcatgtgccccgtgaaatggcagcagagaccagcaagtggctcatgggtgaggggctggagggcctggtgccctgtaccaccacctgtgatacagagaccctgcattttgtgagcattaacaagtatcgtgtcaaatacggcacagtattcaaagccccttaactgcaaagccagagcagataacttggggtgtgtgtggggatgtgtgtgtgggcctatgcactcacacactgaagaaacaaggaagatgcctttcaagcctcactgggcctctctgggacatggccacctgacctgtgtgtggctggtgcagcctggcaccaagtgggctacctgttaggaacatgaataccttacaaagctgaagctggaacttttcccaaagggttttgggtatagcctgccctggaggggaaggaagtccatgcaagcaaagacatgcagtttgcttgcacacaccagcagagctaagactggagtctcctgtggcctaactttcaatgagggaaccggatgctgttcacactttgactggatggagatgcatttacaaaacagactggagaaggacttaatactcagatggattggaactatcatggtcactgctcctctcccctccccacaaaaggaaaaaaaagctggatttgattttttttttctggtcactcgagcacatctaagatcacccattaggttttatctgggacctgcagtttggctttgggattgatcatcttgtggattttattcctgacgattcccttgctgcctacccttttctctcctctggttctcaacctcaacgagttcaaatcagttgtcctttttagctcccgtggaactgttttgtatctgcctctttactagtctaccttagtgccatccaccagctttactctctgacacacacacgcacacacacacacaattttaacttgtttttttgtacataatgtacatactgtcaattttttattaaaagaaatatgctttgatgtgctagcataactgctctagcttcttgtgtaccatagtactgtggcttcagatttagtacctatgaacagatgtacaagacatttattacactttttaccaaagggagttaccattgtagtacttttgtgtaaaacttgtcttcccctttgcccccaacttttttttttttttttttgtaaataaataaagcttggttcttacttaaggaataaactctcaacccacgtcccttgtcctcaccagaaaatactgtgaagcagggattttgacttcagttccttatccagggtagaaacaggattttgcttaaaatacttgttacttgtcccaaatcaaaatattccaaaatcttagaatacttaagtcttttagtacgtgtttttttcccttgttcaaataatctgaaaatattttatatttgggtaagttgtcaagctatgtagtttgtatttctatatattttttcttattcacattggtgatggatgggggtgagcaacttaaataccaaaccagtgtttgaaaaaaaagtgtgcataaggcatgtggtataccttataaatggagttgggagggagagaatttgaaatgggatacctatttttttaattacataaatttaaactagcagacatttaaacatgaatgattaggatttttctatgtggttaacctggactttctgaacaaagaccaactgagcccctcccagtactctggtggatttttcttcagcaaccattacgcaagtcttagttgtaaccagcaatgttctgtgtgttttatgtttgctttttagttaaaaatcaccaccaccaccaaaaagaaaaacaaaattttttggctcctggattttcaaaacacatggtagacctctctgattttaggcttttattgtttaaagacagtgtctcgctttatgacccacactggagtgcagtgccacgatcatagctcactgcaggcttgacctcccaggctcaagcagtcctcccacctcggcctcctgagtagctgcatgccaccacgcccagctaattttttaactttttgtagagacagggtcttgctatgctgcccaggttggtctcaaactcctggcctcaagctgtcctcccacctcggcctcgcaaagtgctgagattacaggtgtgagccaccctggcctgattttaggctttttttgtactggggagaagagactgtgagccaaagtgtagggtgccaaaaagagctttgtgggatgagattttagggcaaagctggggcagtgtctgacttggcggtggtcatgtgtactgatttaggggaaagatcttgaggttttctcaaataattcacctatccccgtgttccctcaagaaaggtcatgttgacctggaaccataggggaaattggtggggtgtgatcagggtcagccccagctgttgctgcccctgcagtgttttgtccagagcacttgcctgcaggtcaggataggatttcaaggccagttcaggagaaagtcccaacccaccagtgcaaccaacaaaagagtaagttttacctacagcctgggttttcacaagtagcatttttattcctcctgctgtctgacatctgagctccaagctctaaacccaacctgtattatatgcagcagcaggttatctttgttttaaatcacatttgttattctgtacttagtcacctttccgtgtgatctgcatttgaaatgttgtaaacttggtcagtatttccattaaaatatcagggctaa

SEQ ID NO: 293556 - DNA, 6679 bp, Artificial Sequence
  derived and/or modified sequence
ccagtctgggcaccggagcctgtgaccgcttcgttagtggagaggtagctggcagtccgcttcggcgggcctgtgccccgcgccgttctcggggcctccctgctgagctcgcggctcacgctgagagggacacgcagtgacgagcggccgaagcagctttgcggtgagagcacgctgggccgggggccgggcgggagcctggtggcgggtaacgccggactcgagggttttgtagtgcatccctgagcatgagcacagaatgaagcggcgtttggatgaccaggagtcaccggtgtatgcagcccagcagcgtcggatccctggcagcacagaggcttttcctcaccagcaccgggtgcttgcccctgcccctcctgtgtatgaagcagtgtctgagaccatgcagtcagctacgggaattcagtactctgtaacacccagctaccaggtttcagccatgccacagagctccggcagtcatgggcccgctatagcagcagttcatagcagccatcatcacccaacagcggtgcagccccacggaggccaggtggtccagagtcatgctcatccagccccaccagttgcaccagtgcagggacagcagcaatttcagaggctgaaggtggaggatgcgctatcttatcttgaccaggtgaagctgcagtttggtagtcagcctcaggtctacaatgatttccttgacatcatgaaggaatttaaatctcagagcatcgacaccccaggagtgattagtcgtgtgtcccagctattcaaaggccaccccgatctgataatgggattcaacaccttcttgccccctggctacaaaattgaggtgcaaaccaatgacatggtgaatgtgacaactcctggccaggttcatcagattcccacccatggcatccagccacagcctcaaccaccaccccaacatccttcccagccttcagcccagtcagccccagctcctgcccagccagctcctcagcccccacctgccaaagtcagcaagccctcccaactgcaagcacatactccggccagtcagcagactcccccacttccaccgtatgcatccccacgttctccgccggtccagcctcacacaccagtgacaatctcgttgggaacggccccatccttgcagaacaatcaacctgtggagtttaatcatgccatcaactatgttaataagatcaagaacagatttcagggccaaccagacatctacaaagcattcctggagattttgcacacatatcagaaagagcagagaaatgccaaggaagctggaggaaactacactccagcattgacagagcaggaggtgtatgcccaggttgctcgtctctttaaaaaccaggaagatttgttgtcagagtttggacaattcctaccagatgccaacagctccgtgcttttaagcaaaacaactgctgagaaggttgattctgtgagaaatgatcatggaggcactgtcaagaagccccaactgaacaacaagccgcagaggcccagccagaatggctgccagatccgcagacatcctacaggaaccacccctccagttaagaagaaacccaaactgctcaatctgaaggattcttctatggcagatgccagcaaacatggtggtggaacagaatcgttattttttgataaggtccgaaaggctcttcggagtgcagaagcctacgaaaatttcctacgctgtcttgttatttttaaccaggaggtgatctctcgtgctgagcttgtgcaactagtctctcctttcctggggaaattccctgagttgtttaattggtttaaaaactttctgggctataaggagtctgtacatctggaaacttatccaaaggagcgagccacagagggcattgctatggagatagattatgcttcttgtaaacgattgggctccagctatcgagccttaccaaagagttaccagcagcccaagtgtacaggacggactcctctctgtaaagaggttttaaatgatacctgggtttccttcccttcgtggtctgaggactctacctttgtgagttccaagaagactcaatatgaagaacatatttatcgttgtgaagatgaacgctttgagcttgatgtagttttagagaccaatctggcaacaatccgggttctggaagcaatacagaagaagctttcccgcttgtctgctgaagaacaagccaaatttcgcttggacaacacccttgggggcacatcagaagtcatccatagaaaagcactccagaggatatatgctgataaagcagctgacatcattgatggtctgagaaagaatccctccattgctgttccaattgtccttaaaaggttgaagatgaaagaggaagaatggcgagaagctcagagaggctttaacaaagtatggcgagaacaaaatgagaaatactacttgaagtctctggaccaccaggggatcaactttaaacagaatgacaccaaggtcctgaggtctaagagcttactcaatgagattgagagtatctatgatgagaggcaagagcaggctacggaggagaatgctggtgtacctgttggcccacacctctcacttgcgtatgaagacaaacaaatactggaagatgctgctgctctgattatccaccatgtgaagaggcagacaggcattcagaaggaggacaaatataagataaaacaaatcatgcatcattttattccagatttgctctttgcccaaagaggtgatctctcagatgtggaggaagaggaagaagaagagatggatgtagatgaagccacaggggcagttaagaagcacaatggtgttgggggcagtccccctaagtccaagttactgtttagtaacacagcagctcaaaaattaagaggaatggatgaagtatacaacctcttctatgtcaacaacaactggtatatttttatgcgactgcaccagattctctgcctgaggctgctacggatttgttcccaagccgaacggcaaattgaagaagaaaaccgagagagagaatgggaacgggaagtgctgggcataaagcgagacaagagtgacagccctgccattcagctacgtctcaaagaacctatggatgttgatgtagaagattattacccagctttcctggacatggtgcggagcctgctggatggcaacatagactcatcacagtatgaagattcactgagagagatgttcaccattcatgcctacattgcctttaccatggacaaactgatccagagcattgtcagacagctgcagcatatcgtgagtgatgagatctgtgtgcaggtgactgacctttacctggcagaaaataataatggggccaccggaggccagctgaacacacagaactcaaggagcctcctggagtcaacgtatcagcggaaagctgagcagctaatgtcagatgagaattgctttaagcttatgtttattcagagccaaggccaggtccagctgactattgagcttctggacacagaagaggagaattcggatgaccctgtggaagcagagcgctggtcagactacgtggagcgatacatgaattcagatactacctcgcctgagcttcgtgaacatctagcacagaaaccagtatttctccccaggaatctacggcggatccggaagtgtcaacgtggtcgagagcagcaggaaaaggaagggaaggaaggaaacagcaagaagaccatggagaatgtggatagtctggataagctggagtgtagattcaagctgaattcctacaagatggtgtatgtgatcaaatcagaggactatatgtatcggaggaccgccctgctccgggctcatcagtcccatgagcgtgtaagcaagcgtctacatcagagattccaggcctgggtagataaatggaccaaggagcatgtgccccgtgaaatggcagcagagaccagcaagtggctcatgggtgaggggctggagggcctggtgccctgtaccaccacctgtgatacagagaccctgcattttgtgagcattaacaagtatcgtgtcaaatacggcacagtattcaaagccccttaactgcaaagccagagcagataacttggggtgtgtgtggggatgtgtgtgtgggcctatgcactcacacactgaagaaacaaggaagatgcctttcaagcctcactgggcctctctgggacatggccacctgacctgtgtgtggctggtgcagcctggcaccaagtgggctacctgttaggaacatgaataccttacaaagctgaagctggaacttttcccaaagggttttgggtatagcctgccctggaggggaaggaagtccatgcaagcaaagacatgcagtttgcttgcacacaccagcagagctaagactggagtctcctgtggcctaactttcaatgagggaaccggatgctgttcacactttgactggatggagatgcatttacaaaacagactggagaaggacttaatactcagatggattggaactatcatggtcactgctcctctcccctccccacaaaaggaaaaaaaagctggatttgattttttttttctggtcactcgagcacatctaagatcacccattaggttttatctgggacctgcagtttggctttgggattgatcatcttgtggattttattcctgacgattcccttgctgcctacccttttctctcctctggttctcaacctcaacgagttcaaatcagttgtcctttttagctcccgtggaactgttttgtatctgcctctttactagtctaccttagtgccatccaccagctttactctctgacacacacacgcacacacacacacaattttaacttgtttttttgtacataatgtacatactgtcaattttttattaaaagaaatatgctttgatgtgctagcataactgctctagcttcttgtgtaccatagtactgtggcttcagatttagtacctatgaacagatgtacaagacatttattacactttttaccaaagggagttaccattgtagtacttttgtgtaaaacttgtcttcccctttgcccccaacttttttttttttttttttgtaaataaataaagcttggttcttacttaaggaataaactctcaacccacgtcccttgtcctcaccagaaaatactgtgaagcagggattttgacttcagttccttatccagggtagaaacaggattttgcttaaaatacttgttacttgtcccaaatcaaaatattccaaaatcttagaatacttaagtcttttagtacgtgtttttttcccttgttcaaataatctgaaaatattttatatttgggtaagttgtcaagctatgtagtttgtatttctatatattttttcttattcacattggtgatggatgggggtgagcaacttaaataccaaaccagtgtttgaaaaaaaagtgtgcataaggcatgtggtataccttataaatggagttgggagggagagaatttgaaatgggatacctatttttttaattacataaatttaaactagcagacatttaaacatgaatgattaggatttttctatgtggttaacctggactttctgaacaaagaccaactgagcccctcccagtactctggtggatttttcttcagcaaccattacgcaagtcttagttgtaaccagcaatgttctgtgtgttttatgtttgctttttagttaaaaatcaccaccaccaccaaaaagaaaaacaaaattttttggctcctggattttcaaaacacatggtagacctctctgattttaggcttttattgtttaaagacagtgtctcgctttatgacccacactggagtgcagtgccacgatcatagctcactgcaggcttgacctcccaggctcaagcagtcctcccacctcggcctcctgagtagctgcatgccaccacgcccagctaattttttaactttttgtagagacagggtcttgctatgctgcccaggttggtctcaaactcctggcctcaagctgtcctcccacctcggcctcgcaaagtgctgagattacaggtgtgagccaccctggcctgattttaggctttttttgtactggggagaagagactgtgagccaaagtgtagggtgccaaaaagagctttgtgggatgagattttagggcaaagctggggcagtgtctgacttggcggtggtcatgtgtactgatttaggggaaagatcttgaggttttctcaaataattcacctatccccgtgttccctcaagaaaggtcatgttgacctggaaccataggggaaattggtggggtgtgatcagggtcagccccagctgttgctgcccctgcagtgttttgtccagagcacttgcctgcaggtcaggataggatttcaaggccagttcaggagaaagtcccaacccaccagtgcaaccaacaaaagagtaagttttacctacagcctgggttttcacaagtagcatttttattcctcctgctgtctgacatctgagctccaagctctaaacccaacctgtattatatgcagcagcaggttatctttgttttaaatcacatttgttattctgtacttagtcacctttccgtgtgatctgcatttgaaatgttgtaaacttggtcagtatttccattaaaatatcagggct

SEQ ID NO: 293557 - DNA, 3822 bp, Artificial Sequence
  derived and/or modified sequence
atgaagagaagactggacgaccaggagagccccgtgtacgccgcccagcagagaagaatccccggcagcaccgaggccttcccccaccagcacagagtgctggcccccgccccccccgtgtacgaggccgtgagcgagaccatgcagagcgccaccggcatccagtacagcgtgacccccagctaccaggtgagcgccatgccccagagcagcggcagccacggccccgccatcgccgccgtgcacagcagccaccaccaccccaccgccgtgcagccccacggcggccaggtggtgcagagccacgcccaccccgccccccccgtggcccccgtgcagggccagcagcagttccagagactgaaggtggaggacgccctgagctacctggaccaggtgaagctgcagttcggcagccagccccaggtgtacaacgacttcctggacatcatgaaggagttcaagagccagagcatcgacacccccggcgtgatcagcagagtgagccagctgttcaagggccaccccgacctgatcatgggcttcaacaccttcctgccccccggctacaagatcgaggtgcagaccaacgacatggtgaacgtgaccacccccggccaggtgcaccagatccccacccacggcatccagccccagccccagccccccccccagcaccccagccagcccagcgcccagagcgcccccgcccccgcccagcccgccccccagcccccccccgccaaggtgagcaagcccagccagctgcaggcccacacccccgccagccagcagaccccccccctgcccccctacgccagccccagaagcccccccgtgcagccccacacccccgtgaccatcagcctgggcaccgcccccagcctgcagaacaaccagcccgtggagttcaaccacgccatcaactacgtgaacaagatcaagaacagattccagggccagcccgacatctacaaggccttcctggagatcctgcacacctaccagaaggagcagagaaacgccaaggaggccggcggcaactacacccccgccctgaccgagcaggaggtgtacgcccaggtggccagactgttcaagaaccaggaggacctgctgagcgagttcggccagttcctgcccgacgccaacagcagcgtgctgctgagcaagaccaccgccgagaaggtggacagcgtgagaaacgaccacggcggcaccgtgaagaagccccagctgaacaacaagccccagagacccagccagaacggctgccagatcagaagacaccccaccggcaccaccccccccgtgaagaagaagcccaagctgctgaacctgaaggacagcagcatggccgacgccagcaagcacggcggcggcaccgagagcctgttcttcgacaaggtgagaaaggccctgagaagcgccgaggcctacgagaacttcctgagatgcctggtgatcttcaaccaggaggtgatcagcagagccgagctggtgcagctggtgagccccttcctgggcaagttccccgagctgttcaactggttcaagaacttcctgggctacaaggagagcgtgcacctggagacctaccccaaggagagagccaccgagggcatcgccatggagatcgactacgccagctgcaagagactgggcagcagctacagagccctgcccaagagctaccagcagcccaagtgcaccggcagaacccccctgtgcaaggaggtgctgaacgacacctgggtgagcttccccagctggagcgaggacagcaccttcgtgagcagcaagaagacccagtacgaggagcacatctacagatgcgaggacgagagattcgagctggacgtggtgctggagaccaacctggccaccatcagagtgctggaggccatccagaagaagctgagcagactgagcgccgaggagcaggccaagttcagactggacaacaccctgggcggcaccagcgaggtgatccacagaaaggccctgcagagaatctacgccgacaaggccgccgacatcatcgacggcctgagaaagaaccccagcatcgccgtgcccatcgtgctgaagagactgaagatgaaggaggaggagtggagagaggcccagagaggcttcaacaaggtgtggagagagcagaacgagaagtactacctgaagagcctggaccaccagggcatcaacttcaagcagaacgacaccaaggtgctgagaagcaagagcctgctgaacgagatcgagagcatctacgacgagagacaggagcaggccaccgaggagaacgccggcgtgcccgtgggcccccacctgagcctggcctacgaggacaagcagatcctggaggacgccgccgccctgatcatccaccacgtgaagagacagaccggcatccagaaggaggacaagtacaagatcaagcagatcatgcaccacttcatccccgacctgctgttcgcccagagaggcgacctgagcgacgtggaggaggaggaggaggaggagatggacgtggacgaggccaccggcgccgtgaagaagcacaacggcgtgggcggcagcccccccaagagcaagctgctgttcagcaacaccgccgcccagaagctgagaggcatggacgaggtgtacaacctgttctacgtgaacaacaactggtacatcttcatgagactgcaccagatcctgtgcctgagactgctgagaatctgcagccaggccgagagacagatcgaggaggagaacagagagagagagtgggagagagaggtgctgggcatcaagagagacaagagcgacagccccgccatccagctgagactgaaggagcccatggacgtggacgtggaggactactaccccgccttcctggacatggtgagaagcctgctggacggcaacatcgacagcagccagtacgaggacagcctgagagagatgttcaccatccacgcctacatcgccttcaccatggacaagctgatccagagcatcgtgagacagctgcagcacatcgtgagcgacgagatctgcgtgcaggtgaccgacctgtacctggccgagaacaacaacggcgccaccggcggccagctgaacacccagaacagcagaagcctgctggagagcacctaccagagaaaggccgagcagctgatgagcgacgagaactgcttcaagctgatgttcatccagagccagggccaggtgcagctgaccatcgagctgctggacaccgaggaggagaacagcgacgaccccgtggaggccgagagatggagcgactacgtggagagatacatgaacagcgacaccaccagccccgagctgagagagcacctggcccagaagcccgtgttcctgcccagaaacctgagaagaatcagaaagtgccagagaggcagagagcagcaggagaaggagggcaaggagggcaacagcaagaagaccatggagaacgtggacagcctggacaagctggagtgcagattcaagctgaacagctacaagatggtgtacgtgatcaagagcgaggactacatgtacagaagaaccgccctgctgagagcccaccagagccacgagagagtgagcaagagactgcaccagagattccaggcctgggtggacaagtggaccaaggagcacgtgcccagagagatggccgccgagaccagcaagtggctgatgggcgagggcctggagggcctggtgccctgcaccaccacctgcgacaccgagaccctgcacttcgtgagcatcaacaagtacagagtgaagtacggcaccgtgttcaaggccccctag

SEQ ID NO: 293558 - protein, 477 aa, Artificial Sequence
  derived and/or modified sequence
MAQRYDELPHYGGMDGVGVPASMYGDPHAPRPIPPVHHLNHGPPLHATQHYGAHAPHPNVMPASMGSAVNDALKRDKDAIYGHPLFPLLALVFEKCELATCTPREPGVAGGDVCSSDSFNEDIAVFAKQVRAEKPLFSSNPELDNLMIQAIQVLRFHLLELEKVHELCDNFCHRYISCLKGKMPIDLVIDERDGSSKSDHEELSGSSTNLADHNPSSWRDHDDATSTHSAGTPGPSSGGHASQSGDNSSEQGDGLDNSVASPGTGDDDDPDKDKKRQKKRGIFPKVATNIMRAWLFQHLTHPYPSEEQKKQLAQDTGLTILQVNNWFINARRRIVQPMIDQSNRAGFLLDPSVSQGAAYSPEGQPMGSFVLDGQQHMGIRPAGLQSMPGDYVSQGGPMGMSMAQPSYTPPQMTPHPTQLRHGPPMHSYLPSHPHHPAMMMHGGPPTHPGMTMSAQSPTMLNSVDPNVGGQVMDIHAQ

SEQ ID NO: 293559 - DNA, 1434 bp, Artificial Sequence
  derived and/or modified sequence
atggcgcagcggtacgatgaactgccccactatggtggcatggatggcgtcggagtgcctgctagtatgtacggcgatccgcatgccccacggcctataccccccgtgcaccatctaaaccacggacctccgctacatgccactcagcattatggcgcccatgctcctcatccaaatgtgatgcccgcctccatgggaagcgctgtgaatgacgccctcaaacgggataaagatgctatctacgggcatcctttattccccttgcttgcgctagtcttcgaaaaatgcgagctggcaacctgcaccccccgggagccaggtgttgctggaggcgatgtgtgttcctcagactcttttaatgaagacatagccgttttcgccaagcaggttcgggccgagaaaccactgtttagttctaaccccgaactggataatctgatgatccaagccatccaggttctgcgctttcacctcctcgaacttgagaaggtgcacgagctttgcgacaatttctgccacaggtatatttcttgcctcaaaggcaaaatgccaatcgatctggtcatcgatgaacgagatggttcatctaagtcagatcatgaggaactgtccggttccagtacgaatctggctgaccacaacccttcaagctggcgcgatcacgatgatgcaacttccactcactccgccgggaccccaggtcccagctctggaggccacgcatcacagagcggggacaattcttccgagcagggtgatgggctcgataatagcgtcgcttctcccggcacaggggacgatgacgacccagataaggacaaaaaacgccaaaaaaaaagagggatctttcctaaggtcgccactaacattatgagagcctggctctttcagcacctgacacatccgtatccatcagaagagcagaaaaaacagctcgctcaggatacgggtcttaccatcctgcaggtaaataattggttcataaatgcaagaaggcgcatcgtacagcctatgatcgaccagagcaatcgcgccggcttccttttggacccctccgtgtcccagggtgcagcttactcgcccgaggggcagccgatgggaagcttcgttctggacggtcagcaacacatgggtattagacccgcggggcttcagagtatgcctggggactatgtgagccaaggaggccctatgggcatgagcatggcccagcccagttacacgcctccacagatgacgcctcaccctacacagctcagacacggcccacccatgcactcttatttgccatcacatccgcaccatcctgctatgatgatgcatggcgggccccccacccatcccggcatgaccatgtccgcacagtctcctaccatgctcaactccgtggaccctaacgtgggcggccaggtcatggacattcacgcccagtag

SEQ ID NO: 293560 - DNA, 1434 bp, Artificial Sequence
  derived and/or modified sequence
atggcccaaagatatgatgaactgccacattacgggggtatggatggggtaggcgtgcccgcgtccatgtacggggacccgcacgctccgcggccaatccccccagttcatcacttgaaccacggcccccctttgcatgcaactcaacattacggcgctcacgcaccgcaccctaacgttatgcccgcgtcaatggggagcgctgtgaatgacgctctaaagagggataaggatgccatatacgggcaccctctgttcccactgttggcccttgtattcgagaagtgcgaactggctacctgcacccccagggaaccaggcgtggctggcggagatgtatgttctagcgactctttcaatgaagacatcgccgtgtttgcgaaacaagtgagggccgagaagcctctgttctcctctaatcctgaattggataatctcatgatacaagctatacaggtcttgcgcttccacctgctggagctcgagaaagtgcatgaactatgcgacaatttctgccatagatatatctcttgcttgaaggggaagatgcccatagacctggtcattgacgagagagacgggagcagtaaatccgatcatgaagagctgtccggctccagcaccaacttggctgaccacaaccctagctcttggcgcgatcacgacgatgctactagtacccatagcgcgggtacccctggtcccagcagcggcgggcacgctagccagagcggggacaattcaagcgaacagggggatggtctggacaatagcgtggcttctccagggacaggagatgacgacgaccctgataaagataagaagcgccagaagaaaagaggtatctttcccaaggtggcaactaatattatgcgggcctggcttttccagcacctcacacacccttacccctccgaagaacaaaaaaagcagctcgcccaggacaccggcttgactatcctgcaggtcaacaattggtttattaatgctaggaggagaatcgtgcagccaatgattgaccaaagcaatagggctggatttttgcttgacccctctgtgtcccaaggtgctgcttactcacccgagggccaacccatggggtctttcgtgctggacggccagcagcatatgggcatccgacccgcagggctgcagtccatgcccggagactacgtctcccagggagggccaatgggaatgtccatggcgcagccaagctatacccctccacagatgaccccacatcccactcagctgcgtcacggacccccgatgcactcctacttgccaagtcacccccatcatcctgccatgatgatgcacgggggccctccaactcatcctggaatgactatgtcggctcaatcccctactatgctcaattcggtggatcctaatgtaggtggccaggtaatggatattcacgcccagtag

SEQ ID NO: 293561 - DNA, 1434 bp, Artificial Sequence
  derived and/or modified sequence
atggcccagagatatgatgagctgccccactatggaggcatggatggagtgggcgtgcctgcctccatgtacggggacccccacgccccccggcccatcccccctgtgcaccacctgaaccacggcccccccctgcacgccacccagcactatggagcccacgccccccaccccaacgtgatgcctgcctccatgggcagcgctgtgaatgatgccctgaagagggacaaggatgccatctacggccaccccctcttccccctgctggccctggtgtttgagaagtgtgagctggccacctgcaccccccgggagcccggggtggccggaggagatgtgtgcagcagtgacagcttcaatgaagatattgctgtgtttgccaagcaggtgcgggcagagaagcccctcttcagcagcaaccctgagctggacaacctgatgatccaggccatccaggtgctgcgcttccacctgctggagctggagaaggtgcatgagctgtgtgacaacttctgccaccgctacatcagctgcctgaagggcaagatgcccatcgacctggtgattgatgaaagagatggcagcagcaagagtgaccacgaggagctgagcggcagcagcaccaacctggccgaccacaaccccagctcctggagggaccatgatgatgccaccagcacccacagcgctggcaccccaggccccagcagcggcggccacgccagccagagcggggacaacagcagcgagcagggagatggcctggacaacagcgtggccagccctggcactggagatgatgatgatcctgacaaggacaagaagaggcagaagaagaggggcatcttccccaaggtggccaccaacatcatgagggcctggctgttccagcacctgacccacccctaccccagcgaggagcagaagaagcagctggcccaggacaccggcctgaccatcctgcaggtgaacaactggttcatcaatgcccggcggcgcatcgtgcagcccatgattgaccagagcaacagagctggcttcctgctggaccccagcgtgtcccagggcgccgcctacagccctgagggccagcccatgggcagctttgtgctggatggccagcagcacatgggcatccggcctgctggcctgcagagcatgcctggggactatgtgtcccagggcggccccatgggcatgtccatggcccagcccagctacaccccaccccagatgaccccccaccccacccagctgcggcacggcccccccatgcacagctacctgcccagccacccccaccacccagccatgatgatgcatggaggcccccccacccaccctggcatgaccatgtctgcccagagccccaccatgctgaacagcgtggaccccaacgtgggcggccaggtgatggacatccacgcccagtag

SEQ ID NO: 293562 - DNA, 2917 bp, Artificial Sequence
  derived and/or modified sequence
ggctcggcgcggcgcgctcctcctcgctcccgctccccactcccgggatgtgtctccgccgtacgacgggctatggccaccacgacttccgggttccgtcatttcgttctcccgccgccgacccgcgccgccaaactgaggctcttcaataagccaggcagcagccaacctgccaacacctactgacactcactcatctcccagagagagaaagagagcgagagagagcgagcgcgagagagcgagcgcgagtgagagcgagcgagcgagcgagaaagagagagagggagagacaaaatacctaccaggaaagggggggaggaagtccaatttttgcaaactattcatttttttttcttgatttttctcactgctttctttgaacaatactttaaagagagaggatcgtattatagataccgcgggggcaaagctaaaaaaggggggaggggggaggaaaaaattcaagaagcagaaacccctcgcggagttttactggaagaaaaaaacgggtctgaaagattcctcctcttcatcatcatcaaccatcattcattcactaccttgacattccgggctttgattgacagctggagtggcaaaaagccatgaaacacgacagttcggttacatgtgggctgctgacgggccgctcgtaaccttcagttcgggggcttgacaatttttttcttctttttcttctttttcttttctttctttttttttccaactgaggggaagagaagagaaagagggggaaaggaggaccgaagaggaggaggaggggaggggggaggaggaggaggtggaggaggaggaggaagatcaggaggaggaggaagaagaggaaaaaagagaaaaagaagaaatatcacagaaaaaaaaattcttcgttgtctagactgggctttttttcccccctaaaaaatagcatattggagaattgggagaagtctctttggtttggaaaaaaaaaaaaggaatcttcagcctagatcactttcttatccggactgggatattaaatatacgacacatccaggagtttattggagcgcagactgatggcgcaaaggtacgatgagctgccccattacggcgggatggacggagtaggggttcccgcttccatgtacggagaccctcacgcgccgcggccgatccccccggttcaccacctgaaccacgggccgccgctccacgccacacagcactacggcgcgcacgccccgcaccccaatgtcatgccggccagtatgggatccgctgtcaacgacgccttgaagcgggacaaggacgcgatctatgggcacccgttgtttcctctgttagctctggtctttgagaagtgcgagctggcgacctgcactccccgggaacctggagtggctggcggagacgtctgctcctccgactccttcaacgaggacatcgcggtcttcgccaagcaggttcgcgccgaaaagccacttttttcctcaaatccagagctggacaatttgatgatacaagcaatacaagtactaaggtttcatcttttggagttagaaaaggtccacgaactgtgcgataacttctgccaccgatacattagctgtttgaaggggaaaatgcccatcgacctcgtcattgatgaaagagacggcagctccaagtcagatcatgaagaactttcaggctcctccacaaatctcgctgaccataacccttcttcttggcgagaccacgatgatgcaacctcaacccactcagcaggcaccccagggccctccagtgggggccatgcttcccagagcggagacaacagcagtgagcaaggggatggtttagacaacagtgtagcttcacctggtacaggtgacgatgatgatccggataaggacaaaaaacgccagaagaaaagaggcattttccccaaagtagcaacaaatatcatgagagcatggctcttccagcatctcacacatccgtacccttccgaagagcagaagaaacagttagcgcaagacacaggacttacaattctccaagtaaacaactggtttattaatgccagaagaagaatagtacagcccatgattgaccagtcaaatcgagcaggttttcttcttgatccttcagtgagccaaggagcagcatatagtccagagggtcagcccatggggagctttgtgttggatggtcagcaacacatggggatccggcctgcaggacctatgagtggaatgggcatgaatatgggcatggatgggcaatggcactacatgtaaccttcatcatgtaaagcaatcgcaaagcaagggggaagtttgcagagcatgccaggggactacgtttctcagggtggtcctatgggaatgagtatggcacagccaagttacactcctccccagatgaccccacaccctactcaattaagacatggacccccaatgcattcatatttgccaagccatccccaccacccagccatgatgatgcacggaggaccccctacccaccctggaatgactatgtcagcacagagccccacaatgttaaattctgtagatcccaatgttggcggacaggttatggacattcatgcccaatagtataagggaactcaagggaaaaggaaacacacgcaaaaactattttaagactttctgaactttgaccagatgttgacacttaatatgaaattccagacagctgtgattattttttacttttgtcatttttcatcaagcaacagaggaccaatgcaacaagaacacaaatgtgaaatcatgggctgactgagacaattctgtccatgtaaagatcctctggaaaaagactccgagagttataactactgtagtataaatataggaactaagttaaacttgtacatttctgttgatcacgccgttatgttgcctcaaatagtttt

SEQ ID NO: 293563 - DNA, 854 bp, Artificial Sequence
  derived and/or modified sequence
tgactgcctcctcacttcctccctcccgattccgccgcggcccccaaagactctcggggtggccccttgtccgcaccgcttggagggagtgtgctctgagttaagctggtctcttctggtcctggaaaaaaatgagtattgacaaggttgctggatctgcgcagaaaagaaagtgccacttaataaaaaatttagcccggcagtggtaccgtctgcagagcttgctgcccttggacgttagcaggaagccttcggggtgctgtaatcggcgggcagaggagagggaggccgcggaattaaaaggaacaaaagctagagcgccatgccaaacgtccccggcaagacccagttaggcaggagccgggagtgatgggaaaatgaactagaatacgatgagctgccccattacggcgggatggacggagtaggggttcccgcttccatgtacggagaccctcacgcgccgcggccgatccccccggttcaccacctgaaccacgggccgccgctccacgccacacagcactacggcgcgcacgccccgcaccccaatgtcatgccggccagtatgggatccgctgtcaacgacgccttgaagcgggacaaggacgcgatctatggctctggtctttgagaagtgcgagctggcgacctgcactccccgggaacctggagtggctggcggagacgtctgctcctccgactccttcaacgaggacatcgcggtcttcgccaagcaggttcgcgccgaaaagccacttttttcctcaaatccagagctggacaatttgatgatacaagcaatacaagtactaaggtttcatcttttggagttagaaaaggtaagcaggaaa

SEQ ID NO: 293564 - DNA, 2538 bp, Artificial Sequence
  derived and/or modified sequence
cttttctgttcgccctcttctccctgctctttttccctttccacccccctcctctgttctccctcacctcctgcgccccctcccccttcccgggttctgacagtacgatgagctgccccattacggcgggatggacggagtaggggttcccgcttccatgtacggagaccctcacgcgccgcggccgatccccccggttcaccacctgaaccacgggccgccgctccacgccacacagcactacggcgcgcacgccccgcaccccaatgtcatgccggccagtatgggatccgctgtcaacgacgccttgaagcgggacaaggacgcgatctatgggcacccgttgtttcctctgttagctctggtctttgagaagtgcgagctggcgacctgcactccccgggaacctggagtggctggcggagacgtctgctcctccgactccttcaacgaggacatcgcggtcttcgccaagcaggttcgcgccgaaaagccacttttttcctcaaatccagagctggacaatttgatgatacaagcaatacaagtactaaggtttcatcttttggagttagaaaaggtccacgaactgtgcgataacttctgccaccgatacattagctgtttgaaggggaaaatgcccatcgacctcgtcattgatgaaagagacggcagctccaagtcagatcatgaagaactttcaggctcctccacaaatctcgctgaccataacccttcttcttggcgagaccacgatgatgcaacctcaacccactcagcaggcaccccagggccctccagtgggggccatgcttcccagagcggagacaacagcagtgagcaaggggatggtttagacaacagtgtagcttcacctggtacaggtgacgatgatgatccggataaggacaaaaaacgccagaagaaaagaggcattttccccaaagtagcaacaaatatcatgagagcatggctcttccagcatctcacacatccgtacccttccgaagagcagaagaaacagttagcgcaagacacaggacttacaattctccaagtaaacaactggtttattaatgccagaagaagaatagtacagcccatgattgaccagtcaaatcgagcaggttttcttcttgatccttcagtgagccaaggagcagcatatagtccagagggtcagcccatggggagctttgtgttggatggtcagcaacacatggggatccggcctgcaggacctatgagtggaatgggcatgaatatgggcatggatgggcaatggcactacatgtaaccttcatcatgtaaagcaatcgcaaagcaagggggaagtttgcagagcatgccaggggactacgtttctcagggtggtcctatgggaatgagtatggcacagccaagttacactcctccccagatgaccccacaccctactcaattaagacatggacccccaatgcattcatatttgccaagccatccccaccacccagccatgatgatgcacggaggaccccctacccaccctggaatgactatgtcagcacagagccccacaatgttaaattctgtagatcccaatgttggcggacaggttatggacattcatgcccaatagtataagggaactcaagggaaaaggaaacacacgcaaaaactattttaagactttctgaactttgaccagatgttgacacttaatatgaaattccagacagctgtgattattttttacttttgtcatttttcatcaagcaacagaggaccaatgcaacaagaacacaaatgtgaaatcatgggctgactgagacaattctgtccatgtaaagatcctctggaaaaagactccgagagttataactactgtagtataaatataggaactaagttaaacttgtacatttctgttgatcacgccgttatgttgcctcaaatagttttagaagagaaaaaaaaatatatccttgttttccacactatgtgtgttgttcccaaaagaatgactgttttggttcatcagtgaattcaccatccaggagagactgtggtatatattttaaacctgttgggccaatgagaaaagaaccacactggagatcatgatgaacttttggctgaacctcatcactcgaactccagcttcaagaatgtgttttcatgcccggcctttgttcctccataaatgtgtcctttagtttcaaacagatctttatagttcgtgcttcataagccaattcttattattatttttgggggactcttcttcaaagagcttgccaatgaagatttaaagacagagcaggagcttcttccaggagttctgagccttggttgtggacaaaacaatcttaagttgggcagctttcctcaacacaaaaaaaagttattaatggtcattgaaccataactaggactttatcagaaactcaaagcttgggggataaaaaggagcaagagaatactgtaacaaacttcgtacagagttcggtctattaattgtttcatgttagatattctatgtgtttacctcaattg

SEQ ID NO: 293565 - DNA, 4818 bp, Artificial Sequence
  derived and/or modified sequence
cgggccgctcgtaaccttcagttcgggggcttgacaatttttttcttctttttcttctttttcttttctttctttttttttccaactgaggggaagagaagagaaagagggggaaaggaggaccgaagaggaggaggaggggaggggggaggaggaggaggtggaggaggaggaggaagatcaggaggaggaggaagaagaggaaaaaagagaaaaagaagaaatatcacagaaaaaaaaattcttcgttgtctagactgggctttttttcccccctaaaaaatagcatattggagaattgggagaagtctctttggtttggaaaaaaaaaaaaggaatcttcagcctagatcactttcttatccggactgggatattaaatatacgacacatccaggagtttattggagcgcagactgatggcgcaaaggtacgatgagctgccccattacggcgggatggacggagtaggggttcccgcttccatgtacggagaccctcacgcgccgcggccgatccccccggttcaccacctgaaccacgggccgccgctccacgccacacagcactacggcgcgcacgccccgcaccccaatgtcatgccggccagtatgggatccgctgtcaacgacgccttgaagcgggacaaggacgcgatctatgggcacccgttgtttcctctgttagctctggtctttgagaagtgcgagctggcgacctgcactccccgggaacctggagtggctggcggagacgtctgctcctccgactccttcaacgaggacatcgcggtcttcgccaagcaggttcgcgccgaaaagccacttttttcctcaaatccagagctggacaatttgatgatacaagcaatacaagtactaaggtttcatcttttggagttagaaaaggtccacgaactgtgcgataacttctgccaccgatacattagctgtttgaaggggaaaatgcccatcgacctcgtcattgatgaaagagacggcagctccaagtcagatcatgaagaactttcaggctcctccacaaatctcgctgaccataacccttcttcttggcgagaccacgatgatgcaacctcaacccactcagcaggcaccccagggccctccagtgggggccatgcttcccagagcggagacaacagcagtgagcaaggggatggtttagacaacagtgtagcttcacctggtacaggtgacgatgatgatccggataaggacaaaaaacgccagaagaaaagaggcattttccccaaagtagcaacaaatatcatgagagcatggctcttccagcatctcacacatccgtacccttccgaagagcagaagaaacagttagcgcaagacacaggacttacaattctccaagtaaacaactggtttattaatgccagaagaagaatagtacagcccatgattgaccagtcaaatcgagcaggttttcttcttgatccttcagtgagccaaggagcagcatatagtccagagggtcagcccatggggagctttgtgttggatggtcagcaacacatggggatccggcctgcaggtttgcagagcatgccaggggactacgtttctcagggtggtcctatgggaatgagtatggcacagccaagttacactcctccccagatgaccccacaccctactcaattaagacatggacccccaatgcattcatatttgccaagccatccccaccacccagccatgatgatgcacggaggaccccctacccaccctggaatgactatgtcagcacagagccccacaatgttaaattctgtagatcccaatgttggcggacaggttatggacattcatgcccaatagtataagggaactcaagggaaaaggaaacacacgcaaaaactattttaagactttctgaactttgaccagatgttgacacttaatatgaaattccagacagctgtgattattttttacttttgtcatttttcatcaagcaacagaggaccaatgcaacaagaacacaaatgtgaaatcatgggctgactgagacaattctgtccatgtaaagatcctctggaaaaagactccgagagttataactactgtagtataaatataggaactaagttaaacttgtacatttctgttgatcacgccgttatgttgcctcaaatagttttagaagagaaaaaaaaatatatccttgttttccacactatgtgtgttgttcccaaaagaatgactgttttggttcatcagtgaattcaccatccaggagagactgtggtatatattttaaacctgttgggccaatgagaaaagaaccacactggagatcatgatgaacttttggctgaacctcatcactcgaactccagcttcaagaatgtgttttcatgcccggcctttgttcctccataaatgtgtcctttagtttcaaacagatctttatagttcgtgcttcataagccaattcttattattatttttgggggactcttcttcaaagagcttgccaatgaagatttaaagacagagcaggagcttcttccaggagttctgagccttggttgtggacaaaacaatcttaagttgggcagctttcctcaacacaaaaaaaagttattaatggtcattgaaccataactaggactttatcagaaactcaaagcttgggggataaaaaggagcaagagaatactgtaacaaacttcgtacagagttcggtctattaattgtttcatgttagatattctatgtgtttacctcaattgaaaaaaaaaagaatgtttttgctagtatcagatctgctgtggaattggtattgtatgtccatgaattcttcttttctcagcacgtgttcctcactagaagaaaatgctgttacctttaagctttgtcaaatttacattaaaatacttgtatgaggactgtgacgttatgttaaaaaaaaaaaggtgttaagtcacaaaaagcggtaataaatatttcatttttgattttttgttaggcttttgcgtttttaatggttttaggacaagactgcacaatgccaactctatacagtgttaaaagtaggtttttccccccagcagttgagtatattttaaactcatcaataatttttaaggtaatcatctatagcctttcaatgtctatttgacctataagttccaccagcagaaaacttctaaaggtacgaaactatgtgtacatgatgagccaggttgaaagatccccttgaacatgctcaacctcctttttagatgcatgacgttaaaaaatatatactttcagataaagcttttcatgggcatcctctgccagaataaaggacttttcagggttaattttacaacataagaaataatgtctgtgctcaaaggtaatttatctgcctgtgtttttcctctgcctgtcttactacaatattgttggatatgtaaatgaaaatttacatatgggtgttcatagataagtaaacaacttctatggagtttgaaattctgactttaaaagattacttaatcattaatattttataaattatattgtggtatatttttatttcagacacatccatgtgcagggatgctagtgtgatgatttgataactaaacttaaacttttttctgaaaacaaaacaaaacaaaatggacggtataatgccattttcaaaattttatgcaacattcctggaaatctataccattagcttattgatactgcacaaacaatgtctgctaaagtgtgcaaaaagggtgaggcatgtcccctcaattttcaaataaatatactatcctggaattttttaactcttaaattttgaatctttgtttagaaagaataatgtcatatactttggctagatatgtgatgtcaaccggctaaggaaattattcatcatctctgcaaacttaaacttggaagaaatccatagttattatttggggctcttccatctttccatttcagacagcatttatggaggttctatataaatgaacgaggaaatacacttctattgttttgtgttatatttagtcaggtagaatttttacaaatacatttcagtttaagtgttgtgttgctgtttaaacatagaaataatgcttctgacacaaactaacttaatagagaaattcagtgccacttgggaaagagagatagcttccctctcatttttgctattctattttacatgaagtctttttgtaaattttaaatatttgcctatttttactttaaatacttttatgtaaactatgaaaattccccattataaatcaactctcacatcaggtgggaaaaagaacctttttttctttccactcagtaaattctgaagggtttccttggcaattggctcgtgtttaggatgtgttttatgcaattatcaagttatctcattgaagtttagagaccagagctctcaactcttggttttaatgaataaagtcatctcatgcttagtttattcgtcaaacccacgtcctatcatgttaactttaaccttcttaaatatttggagatgaatgataattgtaatatttgtttgcattaccttgctctcccccacccccaaccccatgataacacagagaagtgatagatttgtccaatttttataatgctttttttacaccaccccggaaggcacttgctcctatctcgggtttactatttagtgtaaagagttccgatttgggtatatttaagaaagactcagctgtcaaaagcaaagaaactgggaatggtgttttgacaaccatatagtgttaaaggaaatactgtagtctgaataaaattgcttatgttctcc

SEQ ID NO: 293566 - DNA, 1434 bp, Artificial Sequence
  derived and/or modified sequence
atggcccagcggtacgacgagctgccccactacggcggcatggacggcgtcggagtgcccgccagcatgtatggtgatcctcacgcaccaaggcctatccccccagttcaccatctgaaccacggtcccccccttcacgcaacccaacactatggcgcacatgcgcctcacccgaacgtgatgcctgccagtatgggatcggccgtgaacgacgccctgaagagggataaggacgccatctatggtcatcctttattcccacttctcgccctggtgttcgagaagtgtgaactggctacctgcacaccccgagaaccaggcgtcgcaggcggcgatgtttgttcatctgattcgtttaatgaagacattgcagtgttcgccaaacaggtgcgagccgaaaagcctttgttttcgtcaaatcctgagttggataacttgatgatccaggctattcaagtgttaagatttcacctgttagaactggaaaaggtgcacgagctgtgcgacaatttttgtcaccggtatatttcttgtctgaaagggaagatgccaatcgacctggttattgacgaacgggacggctcctccaagtcagaccatgaggagctgtctggatcatccacgaatctcgccgaccataaccctagctcatggcgtgatcacgatgatgctacatccacccacagcgctgggactccaggccctagcagcgggggccacgcaagccagagcggtgacaatagctcggaacagggggacggactggacaactctgtcgccagcccaggcaccggcgatgatgatgaccccgacaaagataagaagcgccagaaaaagcggggtatctttccaaaggtggccaccaatattatgagagcgtggctgtttcagcacctgacacatccgtacccttccgaggagcagaaaaagcaattggcccaagatacaggcctcacaatactccaagtaaacaactggtttatcaatgctagacggcgcatcgtgcagccaatgattgatcagtccaacagagctggttttcttctggacccgtccgtctctcagggagctgcttacagtccagagggtcagcccatgggctccttcgtgttggacggacagcagcacatgggaattagacccgccgggctacagagcatgcccggcgactacgtgagccagggtggtccaatgggcatgtccatggcccaaccctcatacactcccccgcaaatgacgcctcatcctacacaactcaggcatggcccacctatgcacagctatctgccctctcaccctcaccatcctgctatgatgatgcatggggggccccccactcatcccgggatgactatgtctgcccaatcacctaccatgctcaattctgtggaccctaacgtgggtggacaggttatggatatacatgctcagtag

SEQ ID NO: 293567 - DNA, 1434 bp, Artificial Sequence
  derived and/or modified sequence
atggcccagcggtacgacgagctgccccactacggcggcatggacggcgttggagtccctgccagcatgtatggggaccctcatgccccacgcccaattcccccagtgcaccacctgaaccacggcccccctcttcacgctacccagcactatggggctcatgctccacacccaaacgtcatgccggccagcatgggcagcgcagtgaatgatgctctcaagagggataaagatgcaatatatggtcaccccttatttccactgctggcgttggtatttgagaagtgcgagctggctacttgcacccccagggagcctggcgttgctggtggagatgtctgctcctccgactccttcaatgaagacattgcggtgttcgcgaagcaggtccgtgccgagaagccattgttcagtagtaatcctgagttggacaacctgatgattcaagccatacaggtcctccgatttcacctattggagctcgaaaaggtgcacgaactatgtgacaatttctgtcatcggtatatttcctgcctgaaggggaaaatgcccatcgatctcgtgattgatgaacgggacggatcatccaagagtgaccatgaggaactttctggctcaagtactaatctcgccgaccacaacccctcctcatggagagaccatgacgatgcgacaagcacacattcagctggcacccctggccccagcagcggagggcacgcatctcagtcaggcgataattcctccgagcaaggcgatggtttagataattctgtagcctccccaggaacaggtgacgatgacgacccagacaaagacaagaagcggcaaaagaaacgcggaatatttcccaaagtcgcgactaatattatgcgagcatggctatttcagcacttgacacatccgtatccgagcgaagagcagaaaaaacaacttgcacaggataccgggttaacaatcctccaagtgaacaattggttcatcaatgctcggagaagaatcgtgcaacctatgatcgaccagagtaaccgcgctgggttcctcttggatccttctgtttctcagggggcggcctattcccccgaagggcagccaatgggaagtttcgtactagacggacagcagcatatgggaatccgtcccgcgggtctgcagagcatgcctggcgattatgttagccaggggggacctatgggcatgagcatggctcagccttcttacaccccgccgcagatgactccgcaccctacacagctgaggcacggcccacccatgcactcctacctcccatcacaccctcatcacccggcaatgatgatgcatggcggtcctcctacccatcccgggatgacaatgtcagcccaatcacccacaatgctgaacagcgtcgatcctaacgtgggaggccaagttatggacatccacgctcagtag

SEQ ID NO: 293568 - DNA, 1434 bp, Artificial Sequence
  derived and/or modified sequence
atggcccagagatacgatgaactcccacattatggtgggatggacggggtcggggtccctgccagcatgtatggggacccccatgccccacgccctatccctccagtgcaccaccttaaccatgggcctccactgcatgccacgcagcactacggggcacacgcaccacacccaaatgtgatgcccgcttcaatgggaagcgctgtaaacgacgccctcaagagggacaaggacgccatttacggccaccccctgttcccattgcttgccttggtcttcgagaagtgcgagctggcgacctgtacgcctagagagcctggggtagctggaggggacgtttgtagctcagactcctttaacgaggacatcgccgtgtttgctaaacaagtcagggcggagaaaccactgttttccagcaaccccgagctggataaccttatgatccaggctatacaagtgctgagattccatctgctcgaactggagaaggtgcacgagctttgcgacaacttttgccaccgctacatatcctgcttgaagggaaaaatgcccattgatctagttatcgatgaaagggacggttcatctaaatccgaccacgaggagctctctggatccagcaccaacctcgcagaccataacccttcttcttggagagaccacgacgatgctacctccacccactccgccggaactcctggtccaagctcagggggacatgcgagtcagtccggcgataattcttctgagcagggcgatgggctcgataactcagtcgccagtcctggtaccggagatgatgacgatcctgacaaggataaaaagagacaaaagaagcgcggaatttttcctaaggtcgccactaatattatgagggcgtggctgttccaacacttgacgcatccatacccatcagaggagcagaaaaaacagctcgcccaagacacgggcttgacgattcttcaggtcaataactggtttatcaacgcgcgacgtaggatagttcagcctatgatcgaccagtccaatcgggcaggcttccttcttgatccaagtgtgtctcagggagctgcctattcacctgaaggacaacctatgggttcattcgtgctggacgggcagcagcacatggggataaggcccgcaggcctgcagtctatgcccggtgattacgtcagtcagggcggtcccatgggaatgtccatggcccagcccagttatactccccctcagatgacaccgcatcctacccaactaagacacgggccaccaatgcatagctacctgcctagtcacccgcaccaccccgcaatgatgatgcatggcggtccccctacacatccaggaatgacaatgtcagctcagtctccgactatgctcaactccgttgatccaaacgtgggcggacaggtcatggacatccatgcccaatag

SEQ ID NO: 293569 - DNA, 1434 bp, Artificial Sequence
  derived and/or modified sequence
atggcacagcggtacgatgagctccctcattacgggggtatggacggtgtgggcgtaccagcaagcatgtacggcgacccacacgcccctagaccaatcccaccggtacaccatctgaaccatggcccacccttgcacgctacccagcactatggagcccacgctcctcatcctaacgtgatgccagcctccatgggcagtgccgtgaatgatgctcttaagagggacaaagatgcaatctatggtcacccgctgttcccacttttggccctggtgtttgagaaatgcgaacttgctacctgcacacctcgggagcccggagtggcgggtggagacgtctgtagctctgacagcttcaacgaagatatagctgtgtttgctaagcaggtgagagccgagaaaccattgttcagctccaacccagaactagacaacttgatgatccaagccatccaggtgctgaggttccaccttctggagctggagaaggtgcatgagctatgcgacaacttctgccaccgttacataagttgcctgaagggcaaaatgcctatcgatctggttatcgacgagcgggacggaagttccaaatcagatcacgaggaactctcaggttcaagtacaaatcttgcagatcataaccccagcagttggcgagaccacgacgatgctacatctacacacagcgccggaacacccggtccctctagtgggggacatgcctctcagtctggcgataatagctcagaacagggggatggacttgacaattccgtagcctcgcctggtacgggagacgacgacgaccccgacaaggataaaaaacggcagaaaaagcgcggtattttccccaaggtagcgaccaatataatgagagcttggctgtttcaacacttgacccacccttatccaagcgaggaacaaaaaaagcagcttgcacaagacacagggctaaccattctccaagtgaataactggttcattaatgcaagaaggcgtattgtgcaacctatgattgatcaatcgaacagagccggatttcttctggacccttcagtctctcagggcgctgcgtatagccccgagggacaaccaatgggcagttttgtgctcgacggccaacagcacatgggcatccgcccagctgggctgcaaagcatgccgggagattatgtaagtcagggcggaccaatgggaatgtccatggcccagccctcatataccccaccccaaatgaccccccaccctactcagctgcggcatgggcctcccatgcatagttacctccccagtcatcctcaccaccctgctatgatgatgcatggtgggcctccaactcatccaggcatgaccatgtcagcccagtcacccacaatgcttaactcagtcgatcctaatgtggggggtcaagttatggacatccatgcgcaatag

SEQ ID NO: 293570 - DNA, 1434 bp, Artificial Sequence
  derived and/or modified sequence
atggcccagagatacgacgagctgccccactacggcggcatggacggcgtgggcgtgcccgccagcatgtacggcgacccccacgcccccagacccatcccccccgtgcaccacctgaaccacggcccccccctgcacgccacccagcactacggcgcccacgccccccaccccaacgtgatgcccgccagcatgggcagcgccgtgaacgacgccctgaagagagacaaggacgccatctacggccaccccctgttccccctgctggccctggtgttcgagaagtgcgagctggccacctgcacccccagagagcccggcgtggccggcggcgacgtgtgcagcagcgacagcttcaacgaggacatcgccgtgttcgccaagcaggtgagagccgagaagcccctgttcagcagcaaccccgagctggacaacctgatgatccaggccatccaggtgctgagattccacctgctggagctggagaaggtgcacgagctgtgcgacaacttctgccacagatacatcagctgcctgaagggcaagatgcccatcgacctggtgatcgacgagagagacggcagcagcaagagcgaccacgaggagctgagcggcagcagcaccaacctggccgaccacaaccccagcagctggagagaccacgacgacgccaccagcacccacagcgccggcacccccggccccagcagcggcggccacgccagccagagcggcgacaacagcagcgagcagggcgacggcctggacaacagcgtggccagccccggcaccggcgacgacgacgaccccgacaaggacaagaagagacagaagaagagaggcatcttccccaaggtggccaccaacatcatgagagcctggctgttccagcacctgacccacccctaccccagcgaggagcagaagaagcagctggcccaggacaccggcctgaccatcctgcaggtgaacaactggttcatcaacgccagaagaagaatcgtgcagcccatgatcgaccagagcaacagagccggcttcctgctggaccccagcgtgagccagggcgccgcctacagccccgagggccagcccatgggcagcttcgtgctggacggccagcagcacatgggcatcagacccgccggcctgcagagcatgcccggcgactacgtgagccagggcggccccatgggcatgagcatggcccagcccagctacacccccccccagatgaccccccaccccacccagctgagacacggcccccccatgcacagctacctgcccagccacccccaccaccccgccatgatgatgcacggcggcccccccacccaccccggcatgaccatgagcgcccagagccccaccatgctgaacagcgtggaccccaacgtgggcggccaggtgatggacatccacgcccagtag

SEQ ID NO: 293571 - protein, 79 aa, Artificial Sequence
  derived and/or modified sequence
MALVFEKCELATCTPREPGVAGGDVCSSDSFNEDIAVFAKQVRAEKPLFSSNPELDNLMIQAIQVLRFHLLELEKVSRK

SEQ ID NO: 293572 - DNA, 1238 bp, Artificial Sequence
  derived and/or modified sequence
cccgatgcctcctctcccttcaacgcttctgctgctgctcgctgcttgatgatggcggccagtattttaaaaaatagcaaaattattcatcggcttctttccctcccgtgcctctgcgtgtgtgcgagtgtgtgtgcgtgcgtgtgtgcgtgtctgggcgcgcgtgttccagcgctgtgcgagcgggcgggcggcgagtgcgtgtgagtggtgtgtgtgtgtgcgtgtgcaatcgttacacgctttcgcctcgctccagcttttaccccagcagcgcgattcccccggttctcctgctgccgctgctgcgccgctgccgccgtggctcgcgcggctcggggcgggcacgggctgcgtaggagccgccgccggggccgccgctggggccgcgctgccgcagccgctgcgccgccgcctagactactagcctgggctgcttgttttgtctctgaaattgacaaggacgcagggaatccgctgctaaataatgtttctgtacgatgagctgccccattacggcgggatggacggagtaggggttcccgcttccatgtacggagaccctcacgcgccgcggccgatccccccggttcaccacctgaaccacgggccgccgctccacgccacacagcactacggcgcgcacgccccgcaccccaatgtcatgccggccagtatgggatccgctgtcaacgacgccttgaagcgggacaaggacgcgatctatgggcacccgttgtttcctctgttagctctggtctttgagaagtgcgagctggcgacctgcactccccgggaacctggagtggctggcggagacgtctgctcctccgactccttcaacgaggacatcgcggtcttcgccaagcaggttcgcgccgaaaagccacttttttcctcaaatccagagctggacaatttgatgatacaagcaatacaagtactaaggtttcatcttttggagttagaaaaggtccacgaactgtgcgataacttctgccaccgatacattagctgtttgaaggggaaaatgcccatcgacctcgtcattgatgaaagagacggcagctccaagtcagatcatgaagaactttcaggctcctccacaaatctcgctgaccataacccttcttcttggcgagaccacgatgatgcaacctcaacccactcagcaggcaccccagggccctccagtgggggccatgcttcccagagcggagacaacagcagtgagcaag

SEQ ID NO: 293573 - DNA, 2321 bp, Artificial Sequence
  derived and/or modified sequence
attggagcgcagactgatggcgcaaaggtacgatgagctgccccattacggcgggatggacggagtaggggttcccgcttccatgtacggagaccctcacgcgccgcggccgatccccccggttcaccacctgaaccacgggccgccgctccacgccacacagcactacggcgcgcacgccccgcaccccaatgtcatgccggccagtatgggatccgctgtcaacgacgccttgaagcgggacaaggacgcgatctatgggttcgcgccgaaaagccacttttttcctcaaatccagagctggacaatttgatgatacaagcaatacaagtactaaggtttcatcttttggagttagaaaaggtccacgaactgtgcgataacttctgccaccgatacattagctgtttgaaggggaaaatgcccatcgacctcgtcattgatgaaagagacggcagctccaagtcagatcatgaagaactttcaggctcctccacaaatctcgctgaccataacccttcttcttggcgagaccacgatgatgcaacctcaacccactcagcaggcaccccagggccctccagtgggggccatgcttcccagagcggagacaacagcagtgagcaaggggatggtttagacaacagtgtagcttcacctggtacaggtgacgatgatgatccggataaggacaaaaaacgccagaagaaaagaggcattttccccaaagtagcaacaaatatcatgagagcatggctcttccagcatctcacacatccgtacccttccgaagagcagaagaaacagttagcgcaagacacaggacttacaattctccaagtaaacaactggtttattaatgccagaagaagaatagtacagcccatgattgaccagtcaaatcgagcaggttttcttcttgatccttcagtgagccaaggagcagcatatagtccagagggtcagcccatggggagctttgtgttggatggtcagcaacacatggggatccggcctgcaggacctatgagtggaatgggcatgaatatgggcatggatgggcaatggcactacatgtaaccttcatcatgtaaagcaatcgcaaagcaagggggaagtttgcagagcatgccaggggactacgtttctcagggtggtcctatgggaatgagtatggcacagccaagttacactcctccccagatgaccccacaccctactcaattaagacatggacccccaatgcattcatatttgccaagccatccccaccacccagccatgatgatgcacggaggaccccctacccaccctggaatgactatgtcagcacagagccccacaatgttaaattctgtagatcccaatgttggcggacaggttatggacattcatgcccaatagtataagggaactcaagggaaaaggaaacacacgcaaaaactattttaagactttctgaactttgaccagatgttgacacttaatatgaaattccagacagctgtgattattttttacttttgtcatttttcatcaagcaacagaggaccaatgcaacaagaacacaaatgtgaaatcatgggctgactgagacaattctgtccatgtaaagatcctctggaaaaagactccgagagttataactactgtagtataaatataggaactaagttaaacttgtacatttctgttgatcacgccgttatgttgcctcaaatagttttagaagagaaaaaaaaatatatccttgttttccacactatgtgtgttgttcccaaaagaatgactgttttggttcatcagtgaattcaccatccaggagagactgtggtatatattttaaacctgttgggccaatgagaaaagaaccacactggagatcatgatgaacttttggctgaacctcatcactcgaactccagcttcaagaatgtgttttcatgcccggcctttgttcctccataaatgtgtcctttagtttcaaacagatctttatagttcgtgcttcataagccaattcttattattatttttgggggactcttcttcaaagagcttgccaatgaagatttaaagacagagcaggagcttcttccaggagttctgagccttggttgtggacaaaacaatcttaagttgggcagctttcctcaacacaaaaaaaagttattaatggtcattgaaccataactaggactttatcagaaactcaaagcttgggggataaaaaggagcaagagaatactgtaacaaacttcgtacagagttcggtctattaattgtttcatgttagatattctatgtgtttacctcaattg

SEQ ID NO: 293574 - protein, 255 aa, Artificial Sequence
  derived and/or modified sequence
MIQAIQVLRFHLLELEKVHELCDNFCHRYISCLKGKMPIDLVIDERDGSSKSDHEELSGSSTNLADHNPSSWRDHDDATSTHSAGTPGPSSGGHASQSGDNSSEQGDGLDNSVASPGTGDDDDPDKDKKRQKKRGIFPKVATNIMRAWLFQHLTHPYPSEEQKKQLAQDTGLTILQVNNWFINARRRIVQPMIDQSNRAGFLLDPSVSQGAAYSPEGQPMGSFVLDGQQHMGIRPAGPMSGMGMNMGMDGQWHYM

SEQ ID NO: 293575 - DNA, 768 bp, Artificial Sequence
  derived and/or modified sequence
atgattcaggcaatacaggtgctacgatttcacttgctcgagttggagaaggtacacgaactgtgcgataatttctgtcatcgctacatctcttgcctcaaaggaaaaatgccgatcgatctggttattgacgagagagatggaagctccaagtccgaccatgaagaacttagcgggagctccaccaatcttgcagaccataatccatcctcgtggcgagatcacgacgacgctacctccacgcactcagcaggaacacccggtccatcatctggcggacatgccagccaatccggggataacagcagtgagcagggtgacggcctggacaattcagtggcctctccgggaacgggcgatgatgatgacccggacaaagacaagaagaggcaaaaaaaaaggggcatcttccccaaggtggcgaccaatattatgcgcgcctggctgtttcagcacctgacacatccctatcccagcgaagagcagaagaagcagctcgctcaggatactgggctaaccattctccaagtgaataattggttcatcaatgctagacggcgcattgtacagcctatgatagaccagtctaacagggccggattcctactagacccgagtgtgagtcaaggagcggcctattccccagaagggcagccgatgggatcctttgtgctcgatggacaacagcacatgggcatacggcccgccggcccaatgtctggaatgggcatgaacatgggaatggatggacaatggcactatatgtag

SEQ ID NO: 293576 - DNA, 768 bp, Artificial Sequence
  derived and/or modified sequence
atgatccaggccatccaggtgctgcgcttccacctgctggagctggagaaggtgcatgagctgtgtgacaacttctgccaccgctacatcagctgcctgaagggcaagatgcccatcgacctggtgattgatgaaagagatggcagcagcaagagtgaccacgaggagctgagcggcagcagcaccaacctggccgaccacaaccccagctcctggagggaccatgatgatgccaccagcacccacagcgctggcaccccaggccccagcagcggcggccacgccagccagagcggggacaacagcagcgagcagggagatggcctggacaacagcgtggccagccctggcactggagatgatgatgatcctgacaaggacaagaagaggcagaagaagaggggcatcttccccaaggtggccaccaacatcatgagggcctggctgttccagcacctgacccacccctaccccagcgaggagcagaagaagcagctggcccaggacaccggcctgaccatcctgcaggtgaacaactggttcatcaatgcccggcggcgcatcgtgcagcccatgattgaccagagcaacagagctggcttcctgctggaccccagcgtgtcccagggcgccgcctacagccctgagggccagcccatgggcagctttgtgctggatggccagcagcacatgggcatccggcctgctggccccatgagcggcatgggcatgaacatgggcatggatggccagtggcactacatgtag

SEQ ID NO: 293577 - DNA, 768 bp, Artificial Sequence
  derived and/or modified sequence
atgatccaggccatccaggtgctgcggttccacctgctggagctggagaaggtccatgaactttgcgataacttctgccacaggtatattagttgccttaagggcaagatgccaatcgatctggttatcgatgaaagagacggctcttccaagtctgaccacgaggagctcagcggatcatcaactaacctggcggatcacaaccctagttcctggagagaccatgacgacgcaaccagcactcattcggccgggaccccaggcccttcttccggcggtcatgcctctcagagtggcgacaatagctcagagcaaggagatggcttggacaattctgtagcctctcccgggaccggtgatgacgacgatccagataaagataagaagagacagaagaaacgcggcatcttccctaaagtggccacaaatatcatgcgcgcatggctgttccagcacctgactcacccttatccttcggaagaacagaaaaagcaactagctcaggacacgggcttgaccatactgcaggtcaataattggtttatcaacgcaaggaggaggattgtgcagcccatgatcgatcaaagcaatcgcgccggattcctgttagatccttccgtcagtcagggtgccgcttactcaccagagggccagcccatgggatccttcgtcttagacggccagcagcacatgggcatccgccccgctggtcctatgtctggtatggggatgaacatgggcatggatggtcagtggcattatatgtag

SEQ ID NO: 293578 - DNA, 768 bp, Artificial Sequence
  derived and/or modified sequence
atgatacaggccatacaagttctcaggttccatcttctcgaactggaaaaagtacatgagttatgcgataacttttgccaccgttacatctcatgtttgaaggggaagatgcccattgacttggtcattgacgagcgcgacggatcctctaagtcagaccatgaggaattgagtggatcaagtaccaaccttgctgatcataaccccagcagctggcgcgatcacgatgacgcgacgagcacccactctgccggaacccctggcccaagctccggaggccacgcatctcagagtggcgacaactctagtgagcagggagacgggctggacaactcagtagcctcaccaggcacaggagatgacgacgaccccgacaaggacaaaaaacggcaaaagaagcgaggaatcttcccaaaggtagctaccaatattatgcgggcttggttattccagcacctgacgcacccgtacccgagcgaggaacagaaaaaacaacttgcgcaggacactgggctcaccatcctccaggtaaacaattggttcattaatgctcggcgaagaatcgtgcagcccatgatcgatcaatcaaaccgagccggtttcttgctcgacccttccgttagccagggcgctgcatacagcccagagggacagccgatgggctccttcgttcttgatggacaacagcatatgggaataaggccggcaggaccaatgtccgggatgggaatgaatatgggaatggatggtcagtggcattacatgtag

SEQ ID NO: 293579 - DNA, 768 bp, Artificial Sequence
  derived and/or modified sequence
atgatccaggccatccaggtgctgagattccacctgctggagctggagaaggtgcacgagctgtgcgacaacttctgccacagatacatcagctgcctgaagggcaagatgcccatcgacctggtgatcgacgagagagacggcagcagcaagagcgaccacgaggagctgagcggcagcagcaccaacctggccgaccacaaccccagcagctggagagaccacgacgacgccaccagcacccacagcgccggcacccccggccccagcagcggcggccacgccagccagagcggcgacaacagcagcgagcagggcgacggcctggacaacagcgtggccagccccggcaccggcgacgacgacgaccccgacaaggacaagaagagacagaagaagagaggcatcttccccaaggtggccaccaacatcatgagagcctggctgttccagcacctgacccacccctaccccagcgaggagcagaagaagcagctggcccaggacaccggcctgaccatcctgcaggtgaacaactggttcatcaacgccagaagaagaatcgtgcagcccatgatcgaccagagcaacagagccggcttcctgctggaccccagcgtgagccagggcgccgcctacagccccgagggccagcccatgggcagcttcgtgctggacggccagcagcacatgggcatcagacccgccggccccatgagcggcatgggcatgaacatgggcatggacggccagtggcactacatgtag

SEQ ID NO: 293580 - protein, 2619 aa, Artificial Sequence
  derived and/or modified sequence
MNINDGGRRRFEDNEHTLRIYPGAISEGTIYCPIPARKNSTAAEVIESLINKLHLDKTKCYVLAEVKEFGGEEWILNPTDCPVQRMMLWPRMALENRLSGEDYRFLLREKNLDGSIHYGSLQSWLRVTEERRRMMERGFLPQPQQKDFDDLCSLPDLNEKTLLENLRNRFKHEKIYTYVGSILIVINPFKFLPIYNPKYVKMYDNHQLGKLEPHIYAVADVAYHAMLQRKKNQCIVISGESGSGKTQSTNFLIHHLTALSQKGFASGVEQIILGAGPVLEAFGNAKTAHNNNSSRFGKFIQVNYQETGTVLGAYVEKYLLEKSRLVYQEHNERNYHVFYYLLAGASEDERSAFHLKQPEEYHYLNQITKKPLRQSWDDYCYDSEPDCFTVEGEDLRHDFERLQLAMEMVGFLPKTRRQIFSLLSAILHLGNICYKKKTYRDDSIDICNPEVLPIVSELLEVKEEMLFEALVTRKTVTVGEKLILPYKLAEAVTVRNSMAKSLYSALFDWIVFRINHALLNSKDLEHNTKTLSIGVLDIFGFEDYENNSFEQFCINFANERLQHYFNQHIFKLEQEEYRTEGISWHNIDYIDNTCCINLISKKPTGLLHLLDEESNFPQATNQTLLDKFKHQHEDNSYIEFPAVMEPAFIIKHYAGKVKYGVKDFREKNTDHMRPDIVALLRSSKNAFISGMIGIDPVAVFRWAILRAFFRAMVAFREAGKRNIHRKTGHDDTAPCAILKSMDSFSFLQHPVHQRSLEILQRCKEEKYSITRKNPRTPLSDLQGMNALNEKNQHDTFDIAWNGRTGIRQSRLSSGTSLLDKDGIFANSTSSKLLERAHGILTRNKNFKSKPALPKHLLEVNSLKHLTRLTLQDRITKSLLHLHKKKKPPSISAQFQASLSKLMETLGQAEPYFVKCIRSNAEKLPLRFSDVLVLRQLRYTGMLETVRIRQSGYSSKYSFQDFVSHFHVLLPRNIIPSKFNIQDFFRKINLNPDNYQVGKTMVFLKEQERQHLQDLLHQEVLRRIILLQRWFRVLLCRQHFLHLRQASVIIQRFWRNYLNQKQVRDAAVQKDAFVMASAAALLQASWRAHLERQRYLELRAAAIVIQQKWRDYYRRRHMAAICIQARWKAYRESKRYQEQRKKIILLQSTCRGFRARQRFKALKEQRLRETKPEVGLVNIKGYGSLEIQGSDPSGWEDCSFDNRIKAIEECKSVIESNRISRESSVDCLKESPNKQQERAQSQSGVDLQEDVLVRERPRSLEDLHQKKVGRAKRESRRMRELEQAIFSLELLKVRSLGGISPSEDRRWSTELVPEGLQSPRGTPDSESSQGSLELLSYEESQKSKLESVISDEGDLQFPSPKISSSPKFDSRDNALSASNETSSAEHLKDGTMKEMVVCSSESITCKPQLKDSFISNSLPTFFYIPQQDPLKTNSQLDTSIQRNKLLENEDTAGEALTLDINRETRRYHCSGKDQIVPSLNTESSNPVLKKLEKLNTEKEERQKQLQQQNEKEMMEQIRQQTDILEKERKAFKTIEKPRIGECLVAPSSYQSKQRVERPSSLLSLNTSNKGELNVLGSLSLKDAALAQKDSSSAHLPPKDRPVTVFFERKGSPCQSSTVKELSKTDRMGTQLNVACKLSNNRISKREHFRPTQSYSHNSDDLSREGNARPIFFTPKDNMSIPLVSKEALNSKNPQLHKEDEPAWKPVKLAGPGQREVARPAHKKKARMARTRSDFLTRGTFADGEGDTEEDDYDDIIEPLLSLDQASHCELGPAPSLGQASHSDSEMTSQRFSSVDEQAKLHKTMSQGEITKLAVRQKASDSDIRPQRAKMRFWAKGKQGEKKTTRVKPTTQSEVSPLFAGTDVIPAHQFPDELAAYHPTPPLSPELPGSCRKEFKENKEPSPKAKRKRSVKISNVALDSMHWQNDSVQIIASVSDLKSMDEFLLKKVNDLDNEDSKKDTLVDVVFKKALKEFRQNIFSFYSSALAMDDGKSIRYKDLYALFEQILEKTMRLEQRDSLGESPVRVWVNTFKVFLDEYMNEFKTSDCTATKVPKTERKKRRKKETDLVEEHNGHIFKATQYSIPTYCEYCSSLIWIMDRASVCKLCKYACHKKCCLKTTAKCSKKYDPELSSRQFGVELSRLTSEDRTVPLVVEKLINYIEMHGLYTEGIYRKSGSTNKIKELRQGLDTDAESVNLDDYNIHVIASVFKQWLRDLPNPLMTFELYEEFLRAMGLQERKETIRGVYSVIDQLSRTHLNTLERLIFHLVRIALQEDTNRMSANALAIVFAPCILRCPDTTDPLQSVQDISKTTTCVELIVVEQMNKYKARLKDISSLEFAENKAKTRLSLIRRSMGKGRIRRGNYPGPSSPVVVRLPSVSDVSEETLTSEAAMETDITEQQQAAMQQEERVLTEQIENLQKEKEELTFEMLVLEPRASDDETLESEASIGTADSSENLNMESEYAISEKSERSLALSSLKTAGKSEPSSKLRKQLKKQQDSLDVVDSSVSSLCLSNTASSHGTRKLFQIYSKSPFYRAASGNEALGMEGPLGQTKFLEDKPQFISRGTFNPEKGKQKLKNVKNSPQKTKETPEGTVMSGRRKTVDPDCTSNQQLALFGNNEFMV

SEQ ID NO: 293581 - DNA, 7860 bp, Artificial Sequence
  derived and/or modified sequence
atgaatatcaatgacgggggccggagacggtttgaggataacgagcacactttgcggatttaccccggagccatctccgaagggacgatctattgtcccattccagcccgtaaaaacagcacagctgccgaggttattgagagcctcatcaataaactgcacttggacaagacaaagtgttacgtgctcgccgaagtcaaggagtttggcggggaggagtggatcctgaatcccacggactgccccgtccaacgtatgatgctgtggcctaggatggctctagagaatcgtctgtccggggaagactaccgattcctccttagggagaaaaatctggatggatccatccattatggctccctccagtcttggctccgtgtgaccgaggagcggcgcagaatgatggagcgtggtttcttaccccaacctcagcaaaaagattttgacgacctttgctcactgcccgacctgaacgagaagacgttgcttgagaacctcaggaatcggtttaagcatgagaagatctatacatacgtgggttcaatcctcatcgtcatcaacccttttaagtttttgcctatctataaccccaagtatgtcaagatgtatgacaatcaccaacttggaaagttagagccccacatttacgcagtcgcggatgtggcctaccatgccatgctgcagaggaagaaaaatcagtgtattgtgatctcaggagaatcaggcagcgggaagactcagtccacaaattttttaatccaccacctgaccgcactctctcaaaagggatttgcctccggtgtagagcagatcatattgggagctggccctgtgcttgaggcatttggcaatgcaaaaacagcccacaacaataattcctcgcgctttggcaagtttattcaagtgaattatcaagaaaccggaacagtccttggagcttatgtagagaaataccttctcgagaaatccaggctggtgtatcaagaacataatgagcgcaattatcacgtcttttattatctactggcaggtgcctctgaggacgaacggtctgccttccacctgaaacaaccggaagaatatcactatctgaaccagattacaaagaaacctttgcgccagagctgggatgattattgctatgactcagagccggattgtttcaccgtcgaaggtgaggacctgagacatgatttcgaaagactccagcttgcaatggaaatggtgggctttctacctaagactcgccgacaaattttttctctgttgtcagcaatcctacatctggggaacatttgttacaagaaaaaaacatatcgggacgattcaattgacatctgcaacccggaggtgcttccaatcgtttctgagctgctggaggtgaaagaagagatgctattcgaagcgctggtcactcgaaagaccgtaactgtgggggagaaactcatcttgccctacaaacttgcagaagctgtgacagtccgtaactcaatggccaaatcactctattcagccttattcgactggatcgtattccgcataaaccatgctttactcaatagcaaggatctggagcacaacaccaagaccctgtccatcggagtgctcgatatcttcggatttgaagattacgagaacaatagcttcgaacagttctgtattaatttcgctaacgaacgcctccagcactacttcaaccagcacattttcaagctcgagcaagaagaatataggacagaaggcatctcttggcataatattgactacatcgataacacttgttgcattaaccttatctctaaaaagccaactggccttcttcatcttctggatgaggaaagcaatttcccgcaggcgaccaaccagacccttttggataaattcaaacaccaacacgaggacaattcctatatcgaattccccgctgtgatggaaccagcctttatcatcaagcattacgcgggtaaggtgaaatacggagtcaaggatttccgagagaaaaacactgatcacatgcgacccgacatcgtagcactcctgcggtcgtctaagaacgcattcatttctgggatgattggtatagaccccgtcgccgttttcaggtgggctattctgagagcgttcttcagggccatggtggcattccgggaggcgggaaagcgcaacatccaccgaaagacggggcacgatgacacagcaccctgtgcaatcctaaagagcatggacagcttttcgtttctgcagcacccagttcaccagcgctcacttgaaattctccagcggtgcaaggaggaaaagtatagcattactaggaagaaccccaggactcctttgagcgacctgcaaggcatgaatgctttgaatgagaaaaatcagcatgatacgttcgacattgcgtggaacggcaggacaggtatacgccagagtcgcctctcgagcggaactagtctcctggacaaagatggtatctttgcgaatagtacctcttcgaaactactggagcgagctcatgggatcctgacgaggaataaaaactttaagagcaagcccgcgcttcccaagcatctgttagaggttaattctctgaaacatctgacacgccttaccctccaagataggattactaaaagccttttacatttgcacaaaaagaagaagcctccatccatatcagctcaattccaggccagcttgagcaagctaatggaaactttgggacaagcagaaccttacttcgtgaaatgcatacgttctaatgccgagaaactccccctcagatttagcgatgtcctcgttcttaggcagctacgatatactggaatgctcgagaccgtcagaattcggcagtccgggtattcttctaaatatagctttcaagacttcgtgagtcatttccacgtgctgctgccaaggaacattataccatctaaatttaacattcaggatttttttcgcaagattaacctgaaccctgacaactatcaagtcggcaaaaccatggtctttctcaaggagcaggagcgccaacacttgcaagacttacttcaccaggaagtgctccggcgcatcatcttgctgcagcgctggttccgggttttgttatgccgtcagcactttctccacctgaggcaggccagtgtgatcattcagaggttctggaggaactacctgaatcagaaacaggtgcgcgacgccgcagtccagaaggacgcatttgtaatggcttccgcggccgcactgctacaggcatcctggcgagcacacctcgagagacagagatacctcgaactgagggctgcggccatcgtcatccagcaaaagtggcgagactactatcgtcggcgccatatggccgctatttgcatccaggctcgctggaaggcatacagggagtcaaagcgctaccaggagcagaggaaaaaaataattctcttacagtccacatgtcgcggattcagggccagacaacgattcaaggccttgaaggaacagagactccgggaaacaaaaccagaggtggggctggtaaacatcaaggggtacggcagcctggagatccaaggaagtgacccttctggctgggaggactgctcatttgataatcgcataaaagccattgaggagtgtaaaagtgtcatcgaatccaatagaataagtagagaatcttccgtcgattgtctgaaggaatcacccaataaacaacaagagagggcccagtcacaaagcggcgtggacctccaagaggacgtgctggtgcgcgaacgacctaggtccctggaggatctccaccagaaaaaagtgggtagggctaagcgcgagtcaagaaggatgcgagagctggagcaggctatcttcagccttgagttactgaaggttaggtccttgggcgggatctcgccctctgaggaccgcagatggagtacagaactggtgccagaaggtctgcagtcaccacgcggaacccccgattccgaaagcagccagggttctttggagctgcttagctacgaggaatctcagaagtcaaagttggagtctgttatcagcgacgagggcgacctgcaatttccatctcccaaaatcagtagttcaccaaaattcgattcccgagataacgccctgtcagcttctaacgagaccagttccgccgagcatctcaaagatggcaccatgaaggagatggtggtatgctcctccgaatccattacatgtaagccgcagctgaaagactcctttataagcaatagtctacctacgttcttttacatacctcagcaggaccctttaaaaaccaacagtcaactggacaccagcatccaacggaacaagctcttagagaacgaggatactgcgggggaagccctcacactggatataaacagagagactcggcgatatcactgtagtggcaaggatcagatcgttccatcactcaacaccgaatcctctaatcctgtgttaaaaaaactggaaaagctgaacacagaaaaggaagaacgccagaagcagctgcagcaacagaatgaaaaggaaatgatggagcagatcaggcaacagacagatattctagagaaggaacgaaaggctttcaagaccatagagaaacctcgcattggagagtgcctggtcgcccctagctcataccagtcaaaacagcgcgtcgagcgcccctcatcgctgctcagtttaaataccagcaataagggtgagctcaatgtgctcgggagtctgtccctgaaagacgctgcactcgcccagaaagattcctcatccgcccaccttcccccaaaggataggccagtgacagtgttcttcgagcgcaagggttctccttgccagtcgagcacagtgaaggaacttagcaaaacagacagaatggggacacaactaaatgtggcttgcaagttgagcaataatagaatctctaagcgcgaacactttcgtccaactcagtcctactctcacaacagcgatgatctgtcgagggagggtaacgcacgacccatcttctttactccaaaggacaatatgagcattcccctcgtctcaaaagaggctctgaactccaaaaatcctcagctgcacaaggaagatgaacccgcttggaaaccagtgaagctggcgggtccaggtcaaagggaagtggcaagacccgcccataaaaagaaagcccgtatggcccggacaagatccgactttcttacacgcggcacctttgcagacggggaaggagacactgaggaagacgattacgatgacattatcgaacccctgctgagccttgatcaggctagccactgtgagttgggacccgctccaagtctgggtcaggcctcacattccgatagtgagatgacctctcaacgattttccagcgtggatgagcaggctaagttacacaagacaatgtcccagggagagatcactaaactggccgtacgccagaaggccagcgatagcgacatccggccccaacgggccaaaatgagattttgggcaaaaggtaagcagggggagaagaaaacaacccgcgttaagccgactacgcagtccgaagtgtcccccttatttgcgggaactgatgtgatccctgctcaccagttcccagatgaattagcggcatatcatcctacgcccccacttagtcctgaattgccaggttcatgtagaaaagagttcaaggagaataaggagccatcacccaaggccaaacggaagcggtcagtgaagatctccaatgtggctctggattctatgcactggcagaacgattcagtccaaattatagcatcagtgtctgacctcaagtcaatggatgagtttcttctgaaaaaagtgaacgacctggataacgaagattccaagaaggacaccttggtggacgtggtgttcaagaaagccctcaaggaatttcggcagaacatcttctctttctactcttctgctctggccatggacgatgggaagagcattcgctataaagacctgtatgctttgttcgagcaaattctggagaaaacaatgcgcctcgagcagcgggatagcttaggcgaatctcctgtccgagtgtgggttaacacatttaaagtcttcctcgacgagtatatgaatgagtttaagaccagtgattgcaccgcgacaaaggttcctaagaccgagaggaaaaaaagaagaaagaaggaaacagatcttgtcgaggagcacaatgggcacatcttcaaggcgacacagtattccatcccaacatattgcgaatactgtagttcactgatctggatcatggaccgcgcttccgtctgcaaactgtgcaagtacgcttgccataaaaagtgctgcctgaaaaccacggctaagtgttccaaaaagtacgacccagagctgtcatcacggcaattcggggtagaactgagcaggctcaccagcgaggacaggactgtcccactcgttgtggaaaaactgatcaattatattgaaatgcacggactctacactgaagggatttaccgtaagtcaggtagcactaacaaaatcaaagagctccgtcaaggtcttgataccgatgctgagtcagttaacctggacgactacaatatacacgtgatagcttctgttttcaagcagtggctcagggatctgccaaaccctctcatgacctttgagttatacgaagaatttctgagggctatgggactccaggaaagaaaagaaactatccgaggtgtgtattctgtgatagaccagctgagtagaactcacctcaacactctggaaaggttgatcttccacctggtgcgcatagctctgcaggaggatactaacaggatgagcgctaacgctcttgcgatcgtgtttgccccatgtattctgcggtgccccgatactacagatccactgcagagcgtgcaggatatctccaagactaccacttgtgtcgaattgatagtggttgagcagatgaacaaatataaagctaggctgaaagatatcagctcactggagtttgccgagaataaggctaagacaaggctgagtctgattcggcggagtatgggcaaagggcgtattcggcgaggaaactatccagggccgagcagcccagtcgtggtgcggctgccttccgtgtcagacgtgtcggaagagacattgacaagtgaggcagctatggaaaccgacattactgaacagcagcaggcagcgatgcaacaggaggagagggtgctgacagagcagatagaaaatctccagaaagaaaaggaagagttgaccttcgagatgttagtgctggagccccgggcctccgatgacgagacattggagtcagaggcgtcaattggaaccgcggactcttcggaaaacctgaacatggaatccgagtacgccatctccgagaaaagtgaaaggtcacttgctctgagctctctcaagacagcaggcaagagcgaaccatccagcaagcttcggaaacagctgaagaaacaacaggacagtctggatgttgtggattctagcgtgagttccctttgtctcagcaataccgctagtagccacggtactagaaaactgttccaaatctattctaagagtccattctatcgggccgctagtggtaacgaagctcttggcatggagggtcctttgggtcaaactaaatttttggaagacaagccacagttcatctcgcgcgggacctttaatcctgagaaggggaagcagaagctgaaaaacgtgaaaaattcaccccaaaagacaaaagaaacacccgaggggactgtcatgtctggcagacggaagactgtcgatcctgactgcacctctaatcaacagctcgcactattcggaaacaacgagtttatggtctag

SEQ ID NO: 293582 - DNA, 7860 bp, Artificial Sequence
  derived and/or modified sequence
atgaacatcaatgatggcggcagaagaagatttgaggacaatgagcacaccctgcgcatctacccaggggccatcagcgagggcaccatctactgccccatcccagccaggaagaacagcacagctgctgaggtgattgagagcctcatcaacaagctgcacctggacaagaccaagtgctacgtgctggccgaggtgaaggagtttggaggagaggagtggatcctgaaccccacagactgccctgtgcagaggatgatgctgtggcccaggatggccctggagaaccggctgtctggagaggactaccgcttcctgctgcgggagaagaacctggatggcagcatccactacggcagcctgcagagctggctgcgggtgacagaggagaggaggaggatgatggagcggggcttcctgccccagccccagcagaaggactttgatgacctgtgcagcctgcctgacctgaatgagaagaccctgctggagaacctgaggaaccgcttcaagcatgagaagatctacacctacgtgggcagcatcctgattgtcatcaaccccttcaagttcctgcccatctacaaccccaagtatgtgaagatgtatgacaaccaccagctgggcaagctggagccccacatctatgctgtggctgatgtggcctaccacgccatgctgcagaggaagaagaaccagtgcatcgtcatcagcggggagagcggcagcggcaagacccagagcaccaacttcctgatccaccacctgacagccctgagccagaagggctttgccagcggcgtggagcagatcatcctgggcgccggccctgtgctggaggcctttggaaatgccaagacagcccacaacaacaacagcagcagatttgggaagttcatccaggtgaactaccaggagactggaacagtgctgggcgcctacgtggagaagtacctgctggagaagagccggctggtgtaccaggagcacaatgaaagaaactaccacgtgttctactacctgctggccggggcctctgaagatgagaggtctgccttccacctgaagcagcctgaggagtaccactacctgaaccagatcaccaagaagcccctgcggcagagctgggatgactactgctatgattctgagccagactgcttcaccgtggagggggaggacctgcggcatgactttgagcggctgcagctggccatggagatggtgggcttcctgcccaagacccggcggcagatcttcagcctgctgagcgccatcctgcacctgggcaacatctgctacaagaagaagacctacagagatgacagcattgacatctgcaaccctgaggtgctgcccatcgtgtctgagctgctggaggtgaaggaggagatgctgtttgaggccctggtgaccaggaagacagtgacagtgggggagaagctgatcctgccctacaagctggccgaggccgtgacagtgagaaattccatggccaagagcctgtacagcgccctgtttgactggatcgtgttccgcatcaaccacgccctgctgaacagcaaggacctggagcacaacaccaagaccctgagcattggagtgctggacatctttggatttgaggactatgagaacaacagctttgagcagttctgcatcaactttgccaatgaaaggctgcagcactacttcaaccagcacatcttcaagctggagcaggaggagtacagaacagagggcatctcctggcacaacatcgactacatcgacaacacctgctgcatcaacctgatcagcaagaagcccaccggcctgctgcacctgctggatgaggagagcaacttcccccaggccaccaaccagaccctgctggacaagttcaagcaccagcacgaggacaacagctacatcgagttccctgctgtgatggagcccgccttcatcatcaagcactacgccggcaaggtgaagtatggagtgaaggacttccgggagaagaacacagaccacatgaggccagacatcgtggccctgctgcggagcagcaagaatgccttcatcagcggcatgattggcatcgaccctgtggccgtgttccgctgggccatcctgcgggccttcttccgggccatggtggccttccgggaggccggcaagaggaacatccacaggaagacaggccatgatgacacagccccctgtgccatcctgaagtccatggacagcttctccttcctgcagcaccctgtgcaccagaggagcctggagatcctgcagcgctgcaaggaggagaagtacagcatcaccaggaagaaccccaggacccccctgagtgacctgcagggcatgaatgccctgaatgagaagaaccagcacgacacctttgacatcgcctggaatggaagaacaggcatccggcagagccggctgagcagcggcaccagcctgctggacaaggatggcatctttgccaacagcaccagcagcaagctgctggagcgggcccacggcatcctgaccaggaacaagaacttcaagagcaagccagccctgcccaagcacctgctggaggtgaacagcctgaagcacctgacccggctgaccctgcaggaccgcatcaccaagagcctgctgcacctgcacaagaagaagaagcccccatccatcagcgcccagttccaggccagcctgagcaagctgatggagaccctgggccaggccgagccctactttgtgaagtgcatccgcagcaatgctgagaagctgcccctgcgcttcagtgatgtgctggtgctgcggcagctgcgctacacaggcatgctggagaccgtgcgcatccggcagagcggctacagcagcaagtacagcttccaggactttgtgagccacttccacgtgctgctgcccaggaacatcatccccagcaagttcaacatccaggacttcttcaggaagatcaacctgaacccagacaactaccaggtgggcaagaccatggtgttcctgaaggagcaggagcggcagcacctgcaggacctgctgcaccaggaggtgctgcggcgcatcatcctgctgcagcgctggttccgggtgctgctgtgccggcagcacttcctgcacctgcggcaggccagcgtcatcatccagcgcttctggaggaactacctgaaccagaagcaggtgagagatgctgctgtgcagaaggatgcctttgtgatggccagcgctgctgccctgctgcaggcctcctggagggcccacctggagcggcagcgctacctggagctgcgggccgccgccatcgtcatccagcagaagtggagggactactacagaagaagacacatggccgccatctgcatccaggcccgctggaaggcctaccgggagagcaagcgctaccaggagcagaggaagaagatcatcctgctgcagagcacctgccggggcttccgggcccggcagcgcttcaaggccctgaaggagcagaggctgcgggagaccaagccagaggtgggcctggtgaacatcaagggctacggcagcctggagatccagggcagtgaccccagcggctgggaggactgcagctttgacaaccgcatcaaggccatcgaggagtgcaagtctgtgattgagagcaaccgcatcagccgggagagctctgtggactgcctgaaggagagccccaacaagcagcaggagcgggcccagagccagagcggcgtggacctgcaggaggatgtgctggtgcgggagcggcccaggagcctggaggacctgcaccagaagaaggtgggccgggccaagcgggagagcaggaggatgagggagctggagcaggccatcttcagcctggagctgctgaaggtgcgcagcctgggcggcatcagccccagcgaggaccggcgctggagcacagagctggtgcctgagggcctgcagagcccccggggcaccccagacagcgagagcagccagggcagcctggagctgctgtcctatgaggagagccagaagagcaagctggagagcgtcatcagtgatgaaggagacctgcagttccccagccccaagatcagcagcagccccaagtttgacagccgggacaatgccctgagcgccagcaatgagaccagcagcgctgagcacctgaaggatggcaccatgaaggagatggtggtgtgcagcagcgagagcatcacctgcaagccccagctgaaggacagcttcatcagcaacagcctgcccaccttcttctacatcccccagcaggaccccctgaagaccaacagccagctggacaccagcatccagaggaacaagctgctggagaatgaagacacagctggggaggccctgaccctggacatcaaccgggagacccggcgctaccactgcagcggcaaggaccagatcgtgcccagcctgaacacagagagcagcaaccctgtgctgaagaagctggagaagctgaacacagagaaggaggagcggcagaagcagctgcagcagcagaatgagaaggagatgatggagcagatccggcagcagacagacatcctggagaaggagaggaaggccttcaagaccatcgagaagccccgcatcggggagtgcctggtggcccccagcagctaccagagcaagcagagggtggagcggcccagcagcctgctgagcctgaacaccagcaacaagggggagctgaatgtgctgggcagcctgagcctgaaggatgctgccctggcccagaaggacagcagcagcgcccacctgccccccaaggacaggcctgtgaccgtcttctttgagaggaagggcagcccctgccagagcagcacagtgaaggagctgagcaagacagacaggatgggcacccagctgaatgtggcctgcaagctgagcaacaaccgcatcagcaagcgggagcacttccggcccacccagagctacagccacaacagtgatgacctgagccgggagggcaatgcccggcccatcttcttcacccccaaggacaacatgagcatccccctggtgtccaaggaggccctgaacagcaagaacccccagctgcacaaggaggatgagcccgcctggaagcctgtgaagctggccggccctggccagcgggaggtggcccggcctgcccacaagaagaaggccaggatggcccggaccaggagtgacttcctgacccggggcacctttgctgatggagagggggacacagaggaggatgattatgatgacatcatcgagcccctgctgagcctggaccaggccagccactgtgagctgggccctgcccccagcctgggccaggccagccacagcgacagcgagatgaccagccagcgcttcagctctgtggatgagcaggccaagctgcacaagaccatgagccagggcgagatcaccaagctggccgtgcggcagaaggccagtgacagcgacatccggccccagagggccaagatgaggttctgggccaagggcaagcagggcgagaagaagaccaccagggtgaagcccaccacccagagcgaggtgagccccctgtttgctggaacagatgtgatcccagcccaccagttcccagatgagctggccgcctaccaccccaccccacccctgagccctgagctgcccggcagctgcaggaaggagttcaaggagaacaaggagcccagccccaaggccaagaggaagaggtctgtgaagatcagcaatgtggccctggacagcatgcactggcagaatgattctgtgcagatcatcgcctctgtgtctgacctgaagtccatggatgagttcctgctgaagaaggtgaatgacctggacaatgaagacagcaagaaggacaccctggtggatgtggtgttcaagaaggccctgaaggagttccggcagaacatcttctccttctacagcagcgccctggccatggatgatggcaagagcatccgctacaaggacctgtatgccctgtttgagcagatcctggagaagaccatgaggctggagcagagggacagcctgggggagagccctgtgcgggtgtgggtgaacaccttcaaggtgttcctggatgagtacatgaatgagttcaagaccagtgactgcacagccaccaaggtgcccaagacagagaggaagaagaggaggaagaaggagacagacctggtggaggagcacaacggccacatcttcaaggccacccagtacagcatccccacctactgtgagtactgcagcagcctcatctggatcatggaccgggcctctgtgtgcaagctgtgcaagtatgcctgccacaagaagtgctgcctgaagaccacagccaagtgcagcaagaagtatgaccctgagctgagcagccggcagtttggagtggagctgagccggctgaccagcgaggacagaacagtgcccctggtggtggagaagctgatcaactacatcgagatgcacggcctgtacacagagggcatctacaggaagagcggcagcaccaacaagatcaaggagctgcggcagggcctggacacagatgctgagagcgtgaacctggatgactacaacatccacgtgattgcctctgtgttcaagcagtggctgcgggacctgcccaaccccctgatgacctttgagctgtatgaggagttcctgcgggccatgggcctgcaggagaggaaggagaccatccggggcgtgtacagcgtgattgaccagctgagcaggacccacctgaacaccctggagcggctcatcttccacctggtgcgcatcgccctgcaggaggacaccaacaggatgtctgccaatgccctggccatcgtgtttgccccctgcatcctgcgctgcccagacaccacagaccccctgcagagcgtgcaggacatcagcaagaccaccacctgtgtggagctgattgtggtggagcagatgaacaagtacaaggcccggctgaaggacatcagcagcctggagtttgctgagaacaaggccaagacccggctgagcctcatcagaagatccatgggcaagggccgcatccggcggggcaactacccaggccccagcagccctgtggtggtgcggctgcccagcgtgtctgatgtgtctgaggagaccctgaccagcgaggccgccatggagacagacatcacagagcagcagcaggccgccatgcagcaggaggagcgggtgctgacagagcagatcgagaacctgcagaaggagaaggaggagctgacctttgagatgctggtgctggagccccgggccagtgatgatgagaccctggagagcgaggccagcatcggcacagctgacagcagcgagaacctgaacatggagagtgaatatgccatcagcgagaagtctgagaggagcctggccctgagcagcctgaagacagctgggaagtctgagcccagcagcaagctgaggaagcagctgaagaagcagcaggacagcctggatgtggtggacagctctgtgagcagcctgtgcctgagcaacacagccagcagccacggcaccaggaagctgttccagatctacagcaagagccccttctacagagctgccagcggaaatgaggccctgggcatggagggccccctgggccagaccaagttcctggaggacaagccccagttcatcagccggggcaccttcaaccctgagaagggcaagcagaagctgaagaatgtgaagaacagcccccagaagaccaaggagaccccagagggcaccgtgatgtctggaagaaggaagacagtggaccctgactgcaccagcaaccagcagctggccctgtttggaaataatgagttcatggtgtag

SEQ ID NO: 293583 - DNA, 8885 bp, Artificial Sequence
  derived and/or modified sequence
gcgcgaccgaagcggataagggacgcggcggcggttggctgtgtctgttgagagagtacaggacagcccggactgcgagaggcggcggcggaggcagtagttgcaccggcagaggcggccgctggcagcggttgaggcggcggtccaacgcgtgctctctgggcggggtgcggcgggggatgtgcctgctcaggccgggcggagtctctctgacagggcgggggatgcgccgcggccgctcgcccggaccctgaggctgctgggcccaccctcccggaaccgtccgaccctcggtggcctcggcctcttctgccatctccggtcctaccctggggcggagggtggaaggcagcttccgtcgaagaggagggggctgcggtggccaccgcggcggagcccgagttattttaccaagaaaatggtttgcacgactttgaacatatactatccatgctgatgggacaggatccaatatgaatataaatgatggaggaagacgacgctttgaagataatgaacatacattacggatatatcctggggctatttcagaagggacaatctactgtccgattcctgccagaaaaaactccacagctgctgaggtgattgagtctcttataaacaaacttcatcttgacaaaacaaaatgttatgttctagcagaggtaaaggaatttggtggagaagaatggattctcaatccaacagattgtccagttcagcgaatgatgctgtggccccgaatggctctggaaaatcgcttaagtggagaggactaccgcttccttctgagagagaaaaaccttgatggatcaatccattatggtagcctgcagtcatggctacgggtaacagaagaacgtcgcaggatgatggaacggggttttcttccacagcctcaacagaaagactttgatgatttatgtagtttacctgatttgaatgagaaaactctcttagaaaacctacgaaatcgctttaagcatgaaaaaatttatacctatgttggcagtattctaatagttattaacccattcaagtttcttcctatttataaccccaaatatgtcaaaatgtatgataaccaccaactgggaaaacttgagccccacatttatgctgtggctgatgtagcttatcatgccatgcttcagcgcaaaaagaatcagtgcatcgtgatttcaggagagagtggttctgggaagactcaaagcacaaactttcttattcaccaccttactgctctcagtcagaaaggatttgccagtggagtagaacagattattcttggagctggaccagtacttgaggcctttggaaatgcaaagacagctcataataacaattcaagtcgttttgggaagtttattcaagtaaattaccaggaaacaggcactgtacttggtgcctatgttgaaaaatatctactggagaagtccagactcgtttatcaggagcataatgaacggaactatcatgtattctattacctcctggcaggagcaagtgaagatgagagatcagcattccatcttaagcaaccagaggaatatcattatctcaatcagataacaaagaaacccctcagacagagctgggatgattattgctatgactctgagccggattgcttcacggtggaaggagaagatttgagacatgactttgagcgcctacaacttgccatggaaatggtaggatttcttcccaagacacgaagacagattttctctcttctctcagccatactacatttgggtaatatctgttacaaaaagaagacataccgggatgactccattgatatctgtaatcctgaagttctgcctattgtctcagaattattagaggttaaagaagagatgctatttgaagcattagttacaaggaagacggtgacagtgggagaaaagcttattttgccatacaagttggcagaggctgtgacagtgaggaactccatggctaagtctctgtatagtgccctgtttgactggatagtttttcgaattaatcatgcacttctgaatagtaaagatttagagcataataccaagacattgtctattggtgttcttgatatttttgggtttgaagattatgaaaataacagctttgaacagttctgtattaattttgctaatgaacgtttacagcactactttaatcagcatatctttaaattggaacaagaggaatatagaactgaaggtatcagctggcacaacatagattacattgataatacctgctgcataaatcttattagcaaaaaaccaacaggactgcttcatcttttggatgaagaaagcaactttccacaggctacaaatcaaacattgctagacaagtttaagcatcaacatgaagataattcttacatcgaatttccagccgtgatggagcctgctttcattataaaacattatgctggaaaagtaaaatatggggtaaaggatttccgggaaaaaaatacagatcatatgcgcccagacattgtagctcttctgagaagcagcaagaatgcatttatctctgggatgattggaattgatcctgtagctgttttccgatgggcaattctccgagcttttttcagagccatggttgctttcagggaagctgggaaaagaaacattcacagaaaaactggacatgatgatacagcgccatgtgcaattttgaaaagtatggatagttttagctttctccaacacccagtccaccagaggagcttagagattctgcagagatgcaaggaagagaagtacagtataacccggaaaaatcccagaacacctctttctgatctccagggcatgaatgctctaaatgaaaaaaaccaacatgatacatttgatattgcctggaatggcagaactgggattcgccagagcagactatcaagtggcacctccttgcttgataaagatggaatatttgctaattcaactagcagcaaactcctggagagagcccatggaattctcacgagaaacaaaaatttcaaatccaagcctgcccttccaaagcacttgctagaagtaaattctttaaagcacctgacaagactgacactacaagatcgcattaccaagtctcttcttcatttacacaagaagaaaaaacctcccagcatcagtgcccagtttcaggcatcattaagcaagctaatggaaacacttggtcaagcagaaccatattttgtaaaatgcattcgctctaatgctgaaaagctgcccttaaggttcagtgatgtcttggtacttagacagcttcgatacaccgggatgctggaaacagttcgaattcgccaatcaggatacagctccaaatattctttccaggattttgtgagccacttccatgtacttcttccccgaaatattattccatccaaatttaacattcaggatttcttcaggaaaataaatcttaatccagataattatcaagttggaaaaaccatggtctttctaaaggagcaggaacgacagcacttacaagatctgcttcaccaagaggtgctccgcagaatcatattgttgcagcgatggttcagggtcttgctgtgtaggcagcatttcctccatctgagacaagcatctgttattatccagagattctggaggaattacctaaatcagaagcaagtcagagatgcagctgtgcagaaggatgcttttgttatggctagtgcagctgctcttctccaagcttcctggcgtgctcacttagagaggcagcggtacttggagttacgggctgcagccatcgttatccagcagaaatggagagattactataggcgcaggcacatggctgctatttgcatacaagcaagatggaaagcctacagggaaagtaaaaggtaccaagaacaaaggaaaaaaattatccttttgcaatcaacatgtagaggattcagagcaagacaaagatttaaagctttaaaagaacaaaggctaagagaaacaaagccagaagttggattggtgaatattaagggatatggatctctggaaattcagggttcagacccttcaggatgggaggattgttcttttgacaacagaataaaagccatagaggaatgtaaatctgtaatagagagtaatcgaattagccgtgaaagttcagtggactgcttgaaggagtcaccaaacaagcagcaggagagagcccaaagccagagtggtgtggacttgcaggaagatgtgcttgtaagagagagacccagatccttggaggatctccatcagaaaaaagtaggccgggctaagagagaaagtaggagaatgagagaactagagcaagctatatttagcttagaattgctgaaagttcgttctcttggtggtatttctccttcagaggatcgcagatggtctacagaattggtgcctgaaggccttcagtctccacggggtacacctgatagtgagagctctcaaggaagcttggaacttctgagctatgaggaaagccaaaagagcaaactagagtctgtcatttcagatgaaggagacttgcagtttccatcacctaagatatccagcagtccaaaatttgattcacgggacaatgccctcagtgcctcaaatgagactagcagtgcagagcatttgaaggatggaactatgaaggaaatggtggtctgcagttctgagtctattacctgtaaaccacagctgaaagactccttcatttcaaatagtctacctacttttttttatatcccccaacaagacccactgaaaacaaattcccaactagacacaagtatccaaagaaacaaactattggaaaatgaagacacagcgggggaagctcttactttggatatcaacagggaaactagaaggtatcactgctcaggaaaagatcagattgttccttctttgaatacagagtcttctaatcctgtgcttaagaagttagaaaagctaaacactgagaaggaagaaaggcaaaaacagttgcagcaacagaatgaaaaagagatgatggaacagattcgccagcaaacagatattttagagaaggagcgcaaagccttcaagacaattgaaaagccaagaattggagagtgtttggtggcaccatcttcctatcagtcaaagcaaagagtagagaggccatcctctctcctcagcttaaatacctcaaataagggagaacttaatgtactggggtccctatcattaaaagatgcagctcttgcccaaaaagacagttcctctgctcacttacccccaaaggaccgacctgtcaccgtgttctttgaaagaaaaggaagtccatgccaatctagtactgtcaaggaattatccaagacagacagaatgggcacccagctgaatgtagcctgtaaactctcaaataatcgcatttcaaaaagagaacactttaggccaactcagtcttacagccacaattctgatgacctttccagagagggaaatgctaggcccattttcttcactccaaaggacaatatgagtattccccttgtcagcaaagaagccttaaacagtaaaaatcctcaactccataaagaagatgaaccagcatggaaacctgtgaagttagctgggccaggccaaagagaggttgccagaccggcccataaaaagaaagctcgaatggcgcggacgcgctccgatttcttgactagaggtacttttgccgatggggagggggatacagaggaagatgattacgatgacattattgagccccttctctcccttgaccaagcttctcactgtgagctagggcctgcacccagcctgggtcaggcctctcacagtgactccgaaatgacatcacagcgattttcgtcagttgatgaacaagcaaaacttcataagactatgtctcaaggagagattaccaagttggcagtgagacagaaggcttcagattcagatataagacctcagagagctaagatgagattctgggccaaagggaaacaaggggagaagaagactaccagagtgaaacctactacccagtcagaggtttcgccactctttgcaggcacagatgtgattccagctcatcagtttccagatgaattagctgcatatcacccaacacctcctttgagcccagaactgcccggcagttgccggaaggaattcaaagagaacaaagaaccttctccaaaggctaagcgcaagcgaagtgtgaagattagcaacgtggctttggattctatgcattggcaaaatgactctgtccagatcatagcaagtgtcagtgatttaaaaagcatggatgaatttcttctgaaaaaggtgaatgacctagataatgaagacagcaagaaggatacactagtggatgttgtatttaaaaaagccctgaaggaatttcggcagaatatcttcagcttttattcatctgcattggcgatggatgatgggaaaagcatacggtataaagacctctatgcactatttgaacagattctggaaaagacgatgaggcttgagcagcgtgattcactgggtgaatctccagtgagagtttgggtcaacacttttaaagtgtttttagatgaatatatgaatgaattcaagacttcagattgcacagccacaaaggtgccaaaaacagaaagaaagaaaagaaggaaaaaggaaactgatttggtggaagaacacaatggtcacatctttaaagccacccaatatagcatccctacatactgtgaatactgttcttctttgatatggataatggaccgagcctctgtttgcaaattatgcaagtatgcttgccataagaagtgctgtctgaaaaccacagccaagtgctctaaaaagtatgatccagagctgtcatctcgacaatttggggttgaactgtcccgtttgaccagtgaagaccgaactgttcctttagtagtggaaaagctcataaactacattgaaatgcatggactgtatacagaaggtatttatcgaaagtctggttcgactaataaaatcaaggagcttcggcagggtctagatacagatgctgagagtgtaaatctagatgactataacatacacgtcattgcaagtgtattcaaacaatggcttcgagatttgcccaatcctctcatgacctttgaactctatgaggaatttcttcgagctatgggccttcaggagaggaaggagacaatccgtggtgtatactctgtgattgatcaactctcccgaactcatctcaatacactggaacgcctcatctttcatctagtcaggattgctctgcaggaagacactaatcgaatgtctgctaatgctttggccattgtgtttgcgccctgcattctccgctgccctgacaccactgacccactacaaagtgtacaggacatcagtaagactaccacttgtgtggaactgattgttgtggaacaaatgaataaatacaaggctcgtctcaaagatatcagtagcttggaatttgctgagaataaggcaaagaccaggttgtcactgattcgtagatcaatgggaaaggggcgtattcgtcgaggaaactatccaggtccatcgtctcctgttgtagttcggttgccttctgtgtctgatgtctcagaggagaccttgactagtgaggcagccatggagactgacatcacagaacagcagcaagcagctatgcagcaggaggagagagtactgactgagcagattgagaacctacagaaggagaaggaggagctaacatttgagatgcttgtactggaaccccgtgcctctgatgatgaaacccttgagtctgaggcctccattgggactgctgatagctcagagaatttgaatatggagtctgaatatgctatctctgagaaatcagaaagaagcttagcccttagctccctgaagacagctggcaagtctgaaccttccagcaagttgcgaaagcaacttaaaaagcagcaagactctttagatgtcgtggactcttcggtctcctctttatgtctgtctaacacggcatcatctcatgggaccagaaaactatttcagatttattccaaatctccattctaccgagctgcctcaggtaatgaggccctgggaatggaaggaccattgggccagaccaaattcctggaagacaagcctcagttcatcagcagaggaaccttcaacccggaaaagggcaaacaaaaattaaagaatgtgaaaaactcacctcagaaaaccaaagagaccccagaggggacagtcatgtctggccgcagaaaaactgtggacccagactgcacctccaaccaacagctagcactctttggaaataatgaatttatggtctgaaccggcagatgtgtgtccctccgtggctacagagtggtaaacaaatctcacctttggggctgcgtttcatcacctcgtccacaatagtcaatcctaattgtggtcctgcctcttttctaagcatatggctaagactgtatgtgctgaattcctgggcctcctgcagaagcagaaagcctgctggggatggtgccagctgtgccttggctgttgtatttgaattgagatttttactatacaaagccacctagggcctggggatttgggtcagttgtagttgcctctcccccaccctcttttcccttcccaaaggtgggtgttgaactaggggggatattgctgtcctgagggaccctctcatttctgacatttgaagaaaacgtataaatctttcttaaccgtgaaagcaaaagcctttgggtttattttgggatagttaggagctagggtagaatataatttttttccaaaaacttacttacaaacaaaaagcctaatccctctattttaagatttctgaaaaaacactccatgttatattctggggaaagc

SEQ ID NO: 293584 - DNA, 7860 bp, Artificial Sequence
  derived and/or modified sequence
atgaacatcaacgacggcggccggcggcggttcgaggacaacgagcacactctcagaatctatccaggagctattagcgagggtacgatttattgcccaattcctgcaaggaagaattccactgctgccgaagtcatcgaatccctgattaacaaactgcatctggacaagacgaaatgctatgtcctcgccgaagtgaaggagtttggcggggaagagtggattctgaaccctaccgattgtccagtacagaggatgatgctgtggccccggatggcacttgagaacagattgtcaggggaggattaccggtttttactgagagagaagaacctagacggcagtattcattacggatcgcttcaatcatggctgcgcgtgacagaagagcgaagaagaatgatggaaagaggttttctgcctcagccgcagcaaaaggattttgacgacttgtgctcactgccggatttaaacgagaagaccctccttgaaaatctgcgaaaccgctttaagcatgagaagatctacacctatgtgggtagcatactgatcgtcataaaccctttcaagtttctacctatctataatcccaagtatgtaaagatgtatgataatcaccagttaggcaagctggagccgcacatctatgccgtggccgatgtggcctaccacgctatgctgcagcggaagaaaaatcagtgtatcgtgatttcaggggagagcgggagtggcaagacccagagtacgaacttcctcatccatcatttgaccgcgcttagtcaaaagggcttcgctagcggcgtggaacagattatcctgggtgcgggtcccgttctagaagcctttggcaatgctaagaccgcccataataacaacagtagccgtttcgggaagttcattcaggtgaattaccaagagaccggtacagtgctcggagcctatgttgagaaatatcttcttgaaaaaagccgcctcgtctatcaggagcataacgagagaaattatcacgtgttttattatctcttagcaggtgcttcagaggacgaacgcagcgcttttcacctcaaacagcctgaggaataccactatctgaaccaaattaccaagaaacctttgcgtcaatcctgggacgattattgttacgacagcgaacctgactgttttaccgtagagggcgaggatctcaggcacgatttcgagcggctacaacttgctatggagatggtcggctttctgccaaagacccgacgccagatcttttctctgcttagtgccattctccatcttggaaacatttgctacaagaaaaaaacgtaccgcgacgatagtattgacatctgtaaccctgaagtcctgcccatagtaagcgaactgctggaggtgaaagaagaaatgctgtttgaggccctggtcactagaaagacagtgaccgtgggagagaagttgatcctaccctataagctcgctgaggcagttaccgtaagaaatagcatggccaagtcactctactccgctctgtttgactggatcgtgttccgaattaaccacgcactgttgaacagtaaggatctggaacataacacgaaaacccttagcattggcgtgttggatatctttgggttcgaagattacgaaaataactccttcgagcaattttgcatcaatttcgcaaacgaaaggcttcagcactacttcaatcagcatatcttcaaattagagcaggaagagtaccggactgaagggatttcctggcacaacatcgattatattgacaacacctgttgcatcaatttaatcagtaagaagcccactgggctattgcatttgttagacgaggagtctaacttcccgcaggccacaaaccagaccctgctcgataaattcaagcaccagcacgaggacaactcctacatcgaatttccagccgtcatggaacctgcgttcataattaagcactacgctggcaaggttaaatacggcgttaaggatttccgggagaagaatacagatcacatgcgcccagacatagtagccctgctgcgatcctccaaaaacgcatttattagtgggatgatcggcatcgatccagtggctgtttttcggtgggctattttgcgggctttttttagagcgatggtggctttcagagaagcagggaaaagaaacattcaccgcaaaacggggcatgatgacacagccccatgcgccattctgaagagcatggactcgttttcgttcctgcagcatccagtccaccagcgctctctggagattctgcagcgatgcaaagaagagaagtactctattacccgcaagaacccaagaactccactctccgacttacaaggtatgaatgcactcaacgaaaaaaaccaacatgacacttttgacatagcatggaatggcaggacggggattaggcagtccaggttaagctcagggacttcccttcttgataaggacggtatttttgcaaacagcactagctccaaacttttggagagggcccacggcatcctaaccagaaacaaaaactttaaatcaaagcccgccttgcctaagcacctgctggaagtgaattcgcttaagcatttgaccaggcttaccctccaagataggatcaccaagagtttactgcacctgcacaaaaaaaagaagcccccctctatttcagcccaattccaggcgtctctatcaaagctcatggaaaccctcgggcaagccgaaccttatttcgtaaagtgtatacggtcaaacgcggagaagctgcccctgcggtttagtgacgtgctcgtgttaagacagctacgatacactgggatgctggaaaccgttcggatccgtcaatccggctattctagcaagtattcatttcaggacttcgtcagccatttccatgttctacttccacgtaacattatcccttcaaagtttaatatccaggactttttccggaaaataaaccttaatccagacaactaccaggtgggaaagaccatggtttttctgaaggaacaggagagacagcacctccaggatttgctacaccaggaggtgcttagaagaatcatactactgcaacgctggttcagagtgctactgtgccggcagcattttctacatctgagacaggcctcagtcatcatccagcggttttggcggaactacctgaatcagaagcaggtgcgagatgcagcagtgcaaaaggatgccttcgtaatggcatctgcagctgcactgctgcaggcgagctggcgcgcgcatctggaacgccagcgctacctggaactccgcgctgctgccatagtgatccagcaaaagtggagagattactaccggagaagacacatggctgcgatctgtattcaggcccgatggaaagcctatagggaatccaaacggtaccaagagcagagaaaaaagataatcctactgcagagtacctgcagaggtttccgggccagacagcgcttcaaagcactcaaggagcagcgattgcgtgagacgaagcccgaagtcgggctagtcaatatcaagggctatggtagtctggagatccagggctccgatccttccgggtgggaagattgcagctttgacaacaggattaaagcaattgaagagtgcaaatccgtcatcgagtccaaccggatctctcgggaatcttctgtggactgcttaaaagagtcaccgaacaagcagcaggagagggcccagagtcagtcaggcgtggatttacaggaggatgtgctcgttagagaacggcctagatccctcgaggacctgcaccagaagaaggtgggtagggctaagcgtgaatcccgcaggatgcgagagcttgaacaagccattttctctctcgagttactaaaagtgaggtccttgggcgggatttccccaagcgaagatcggcggtggagtaccgagctagtccctgaaggtctgcagtccccaagaggaacgcctgatagtgaatcttcccagggtagccttgagctgctgagttacgaggaatctcaaaaatcaaagttagaaagcgtgatctccgacgaaggcgacttgcagttccctagtcccaagatatcttcaagccctaagtttgactccagagacaacgctctgagcgcaagcaacgagacctcaagcgcagagcacctcaaggatggcactatgaaggaaatggtcgtatgctcgagcgagagcatcacttgcaagccccagctgaaagatagctttatatcaaactcccttcctacattcttttacataccgcaacaggaccctctcaaaacaaactcccagttggatacttctatacagcggaataaactgttggaaaacgaggataccgctggagaggccctcacacttgacatcaacagagaaaccagacgctaccactgttccgggaaggatcagattgtgccaagcctcaatactgaatcctccaatcctgtgctaaagaaactggaaaaactgaacaccgagaaagaagagcgccagaagcagctgcagcagcaaaatgaaaaagagatgatggaacagataagacagcaaactgacatactggagaaagaacgtaaagcatttaaaaccattgagaagccaaggatcggcgagtgtcttgtcgccccgtcttcctaccagagtaaacaacgtgtcgagaggccatcatccctgctgtcactgaatacttcaaacaaaggagaactcaacgtcctggggtccctgagtcttaaagatgcggcactcgcacagaaggactcctcgagcgcgcacctgcctcccaaagaccggcccgtgactgtcttttttgagagaaaaggaagcccatgtcaatcttcaaccgtgaaggagctgtccaagaccgaccgcatgggaactcaactaaacgttgcctgcaaactcagcaataaccggattagcaaaagagagcatttccggcccacccagtcctacagccataactccgacgatctctccagagaaggtaacgcccggccaatcttctttacacctaaagataatatgagcattcccctggtatccaaagaggcgttgaatagtaaaaatccccaactacataaagaagatgagccagcgtggaagccagtgaaactggccggccccggccagagggaagtggctcgtcccgctcacaaaaagaaggctaggatggctaggacccgaagcgactttctcacccgaggcacctttgcagacggagaaggcgacacagaagaagatgactatgacgatatcatcgaaccgctcttgagcctggatcaggcttctcactgtgaactgggacccgccccatccctgggccaggcctctcactctgatagtgaaatgacaagccaaaggttcagcagcgtggatgaacaagccaagctgcacaagacgatgagccaaggtgaaattaccaagctggcagtccgacagaaggcttcagattcagatatcaggccacagagggccaaaatgcggttctgggctaagggcaagcagggcgagaagaagactacccgcgtgaagcctactactcagtccgaagtttctcccctattcgccggaacggacgtcattcccgctcaccagttccctgacgagcttgctgcctaccatcccaccccccctctgtcccctgagctaccaggatcctgccgtaaggagtttaaggagaataaggagccttccccgaaggcaaagcggaagcgttccgttaagatttccaacgtcgcccttgattcaatgcactggcagaacgacagtgtgcaaatcatcgcctctgtaagcgatttgaagtctatggatgagttcctccttaagaaggttaacgatctggataatgaggactcaaaaaaagacacattagtagacgtcgtgttcaagaaggcattaaaggaattcagacagaacatcttctccttctacagttccgcactggctatggacgatggcaaaagcatacgctacaaggatctctatgccttatttgagcaaatattagagaagaccatgaggctggagcagagagattcactgggcgaatcacccgtgcgtgtgtgggtgaatactttcaaggtgttcctggatgagtatatgaacgagttcaagacatcagattgtaccgccacaaaggtgccaaaaaccgagcgtaaaaaacgtcggaaaaaagaaactgaccttgtcgaggagcataatggccatatatttaaagcaactcagtactctatacctacgtactgcgagtactgtagcagtctcatatggatcatggatcgagccagcgtgtgtaaactctgtaagtacgcctgtcacaagaagtgctgcctgaaaaccactgctaaatgttcaaaaaagtatgaccctgagctgagttcgcgacagtttggggtggaattgtctcggctgacctctgaggatcgtaccgtccctctcgtggtcgaaaagttgataaactacattgagatgcacggcctgtataccgaggggatatatcgaaagtctggatccacaaataagataaaggagctgcgtcagggtctggacacagacgcggagtcagtgaacctcgatgactacaacatacacgtgatcgcgagtgtattcaagcagtggctgcgggacctgcctaatcctctcatgaccttcgagctctatgaagagttcctccgagccatgggtctacaggaacgtaaagaaacaataaggggggtgtacagcgtgatcgaccagctcagtagaacccatctgaacactctcgagagactcatatttcacctcgtccgcatagcactgcaggaggatacgaataggatgagtgctaatgcactagcgattgtattcgcaccctgtatactgcgttgtccagataccaccgaccctttacagtcggtgcaggatatatcaaagaccaccacatgtgttgagctaatcgtagttgagcagatgaataagtacaaagcaaggctaaaagatatatctagcttggagtttgcagagaacaaagcaaagacacggctgagcctcatccgtcggtcaatgggcaaggggcgtatccggaggggtaactatccaggtccctcttccccagtggtcgtgaggctgccctccgttagtgatgtgagtgaggagactctcaccagcgaggcagccatggaaacagacataactgaacagcagcaagccgccatgcagcaggaagaacgggtcctgaccgagcagattgaaaacctccaaaaggagaaggaggaactgactttcgagatgctggttttggagcctcgagcctccgatgacgaaaccttggagagcgaggcaagcatcggaacagctgatagcagcgagaatctcaacatggagtctgagtatgccattagcgagaagtctgagcggtccctcgccctgtcctccttgaagactgctggaaagagcgagcctagcagtaagcttcgaaaacagctgaagaagcagcaggactcactggatgtggtggatagctccgtctcgagtttgtgcctcagcaataccgccagcagtcacggaaccagaaagctgttccaaatttacagcaagtctcccttctatagggcagcatctggcaacgaggccctgggcatggaggggcccctgggacagaccaaattcttagaggataaaccgcagtttattagccggggcacattcaaccctgaaaaggggaaacagaaactcaagaatgtcaagaacagcccacagaagacaaaggaaacaccggagggaaccgtaatgtcaggtaggcgcaaaaccgtggaccccgattgcaccagtaaccagcagctggctttgtttggcaataatgaattcatggtgtag

SEQ ID NO: 293585 - DNA, 7859 bp, Artificial Sequence
  derived and/or modified sequence
atgaatattaacgacggtgggaggcgtagatttgaagataatgagcatactctgagaatataccccggagcaatcagtgaagggactatctattgtccaattccagcacgaaaaaactccactgccgcagaggtgatcgagagcctgattaataagttgcatctggacaagaccaaatgctacgtgttagcagaggtcaaagagtttgggggagaagagtggatcttgaacccgaccgactgtccagtccagcgtatgatgctctggcccaggatggctcttgagaataggttgtccggagaagactatagattcctgctgcgagaaaagaacctggatggttccatccattacggcagcttgcagtcctggctcagggtcactgaggagaggagaagaatgatggagcgagggtttctgccacagccccagcagaaagatttcgacgatctttgtagcctcccagatcttaacgaaaaaacactgctcgaaaatctgaggaatagatttaaacatgagaagatctacacatacgttggcagcatcctaattgtgattaatccgtttaagtttctgcccatatacaacccgaagtacgttaagatgtatgataaccatcagttaggcaagctggagccccacatctacgccgtggcggatgtcgcataccacgccatgcttcagagaaaaaagaaccaatgtatcgtcatctccggcgagagcggatccggcaagacacagagtaccaattttcttatccaccacctgactgcactctctcagaaggggttcgcttccggtgtggaacaaattattctgggcgctgggcctgttcttgaggcatttgggaatgcaaagacggcacacaacaataatagttcgagattcggaaagtttattcaggttaactaccaagaaactggaactgttctgggcgcttacgtggagaaatacctgttggagaagtcccgactcgtttaccaggagcacaacgaacggaattaccatgtgttctattacctcctggcaggcgcttctgaagatgagcggagtgcatttcacctgaaacagcccgaggagtaccattatttgaaccaaatcactaaaaaaccgctgcgacagtcctgggacgactactgctatgacagcgaacccgattgctttactgtagagggagaggacctgcggcatgattttgagaggctgcagctcgccatggagatggtcggatttctgccaaagacacgtcgacagatctttagcctgctctctgcaattcttcacctaggcaatatctgctacaaaaaaaaaacataccgtgacgactccatcgacatctgcaatcccgaagtcctgcccattgttagtgagttactggaagttaaggaagagatgctgttcgaggctctagtaacaaggaagactgtgaccgtgggagaaaagttgatactaccatataaactcgcggaagctgttacggtgcgcaactcaatggcaaaaagcttatatagcgccctcttcgattggatagttttccggatcaaccatgctcttctgaactctaaggaccttgagcacaacacaaaaacccttagtattggcgtcttggacatctttggttttgaagactatgagaataattccttcgagcagttctgcataaattttgctaacgagagattgcaacattactttaaccagcatatcttcaagttggaacaggaagaatacaggacggagggaatatcctggcacaatattgactacattgataacacgtgttgtatcaacctcatctccaagaaacctactgggctcttacatctgctcgacgaggaaagcaattttcctcaggctaccaaccaaaccctcctcgacaagttcaaacaccagcatgaggacaatagctacattgaattccccgcagttatggaaccagcctttatcatcaaacactatgccggaaaggtaaaatacggggtgaaagatttccgcgaaaagaataccgatcacatgcggccagatatagtggctttactcaggtcatcgaagaacgctttcatttcaggaatgattgggattgaccctgtggctgtgtttaggtgggcgattctccgagcattctttcgggcaatggtcgcattccgcgaggccggaaaacggaatatccataggaagacagggcatgatgataccgccccatgcgcaatcctaaagagcatggattctttttctttcctacagcatcctgtccatcagagatccctggagattcttcagcgatgcaaagaagaaaaatattccatcacccgcaagaaccctcgcacaccccttagcgacctacaggggatgaacgccttgaacgaaaagaaccagcatgacacgttcgacatagcctggaatggccgaaccgggatccgacaaagccggctgtccagtggaaccagtctgctggacaaggacggtatattcgccaactctacctcctcaaaactgttagaacgggctcacggtattctgaccagaaacaaaaatttcaaaagcaaaccggcactcccaaaacatctgttagaggttaatagcctgaaacatttgacaagactgacacttcaggaccgtatcactaaaagcctcctccacctacataagaagaagaaaccaccgtccatctcggctcaatttcaggcttctttgtcaaaattaatggaaaccctgggccaggcagaaccttattttgtgaagtgtatcaggtccaatgccgagaagttgccgctgcggtttagcgatgtcctggttctgagacagttaaggtataccggaatgctggagaccgttcggatacggcagtccgggtacagtagcaaatattcctttcaggatttcgtgagccacttccacgtgctgctgccacgcaatatcatcccatctaagtttaacattcaggacttcttcaggaaaatcaacctaaatcctgataattaccaagttggcaagacaatggtgttcctaaaagagcaggaacgccagcatcttcaggatctgctgcaccaggaagtgctgcgcagaattatactccttcagcgatggtttagagtattgctatgtagacagcactttttgcacctgagacaggcatcggtgattattcagaggttttggagaaactacctcaaccagaaacaggtgagagatgctgccgtccaaaaggatgcttttgttatggcctccgccgcagcactcctccaggcgagctggcgcgctcatttggaaagacagcggtacttggaactcagagctgctgcgatcgtgatccagcagaaatggcgagattattaccgaagacggcatatggcagcaatatgcattcaggccaggtggaaagcctaccgggaatcaaagagatatcaggaacagcggaaaaaaattatcctcctccagtctacttgcagggggttccgcgcacgccagaggtttaaggctctgaaggagcagagactgcgggaaaccaaacctgaggtcggcctggtgaatatcaagggatatggctccttggagattcagggcagcgatccaagcggatgggaagactgctcattcgataacagaataaaggcgatcgaggagtgcaagagcgtcatcgagagcaaccgcatctctcgtgaatccagcgtggactgccttaaagaatcccctaataaacagcaggaaagagctcagagccagtccggagtcgacctccaagaggacgtactggtcagggagcgtcctaggtctcttgaagatttgcatcagaagaaggtcggacgagcaaagagagagagccgtcggatgcgcgagctggaacaggcaatctttagtctggaactgctgaaggtgcggtccctgggcggaatctccccttcggaagatagaaggtggtccacagagctggtgcctgaggggcttcagtccccccgtggaactcctgactctgaaagcagccagggatcccttgaattgctgtcctatgaggagtctcagaagagtaagctggagagcgtgattagcgatgaaggtgacttgcagtttccctctcccaagattagctcctctccaaaatttgactcacgggacaatgccctgtctgcatccaacgaaacctcaagcgctgaacacctgaaggacggtaccatgaaggaaatggtggtttgcagttctgagagcatcacatgcaagccccaactgaaggactcctttattagcaacagcctgcccacattcttctacatcccccagcaggatccactcaagacgaactcgcagctcgatacaagcattcaaaggaataaactgctggaaaatgaggacaccgctggtgaggccctgactctggacattaaccgagaaacaagacgataccactgtagcggcaaagatcagatcgtgccatctttaaataccgaaagctcaaaccccgtgcttaagaaactcgagaaactgaataccgagaaagaagagagacagaagcaactccaacagcaaaatgagaaggagatgatggaacaaatccgacagcagaccgacatcctagaaaaggaacgcaaagccttcaaaacgattgagaaacccagaattggggagtgcttggtcgcgccaagttcttaccaatctaagcaaagagtagaacgaccatcttccctcctgtccctcaacactagcaataagggcgagctgaacgtgctgggctctctatcgctgaaggacgccgctctggcccagaaggactctagctctgcccacttgcccccaaaggatagaccagtgactgtcttttttgagcggaaaggatcaccttgtcagtctagtacggtaaaagaattgtccaagactgacaggatgggtactcagttaaatgtagcttgcaagctttccaacaaccgcatctctaaaagggagcacttccggccaacccagtcctattcacacaattctgatgatttatccagggaaggaaatgccagacccattttcttcacacctaaagacaatatgagcatcccccttgtttcaaaagaagccctgaatagtaagaatcctcagctgcataaggaggatgagcccgcatggaagccggttaagcttgccggaccaggacagagggaagtcgcacgacctgcccacaagaaaaaggcgcgaatggccaggaccaggtccgactttcttacacggggtacctttgcggatggggagggggatactgaagaggatgactacgacgatataattgaaccattgttgtccctggaccaggcatcgcattgcgagctcggccctgcccctagcttaggacaggcttcccattcggatagcgagatgaccagtcagaggttcagtagtgtggatgagcaggccaagcttcacaagacaatgagccagggcgaaatcactaagctggcagtccggcagaaggccagtgacagcgacattcgccctcagagggctaagatgagattctgggccaaggggaagcagggggaaaagaaaaccactcgtgttaagcctactacccagtctgaagtgtctccattattcgcaggaactgacgtgattcccgctcaccagttcccagacgagctcgcagcttatcacccgactccccctctgtcacctgagctaccagggtcctgcagaaaagagtttaaggagaataaggaaccatcccccaaagcaaaaagaaaaaggagcgtgaagattagcaacgtagccttggatagcatgcattggcagaacgatagcgtgcagatcatcgcctccgtgtctgacctgaagtctatggacgagttcctgctcaaaaaggtgaatgatcttgacaacgaggactcgaaaaaggacaccctcgtggacgttgtcttcaaaaaggccctaaaggagtttcgacagaacattttctctttctattcatctgctcttgcaatggacgatgggaaatcgattagatataaagacctgtacgccctgttcgagcaaatcctggagaaaaccatgagacttgaacagcgtgattctctgggggaatcacctgtgcgcgtctgggtgaatacatttaaggtgttcctggacgaatatatgaatgaatttaagaccagtgactgcaccgctactaaggttcccaaaacagagcgaaagaagcggaggaagaaagaaaccgaccttgtggaagagcataatggccatatctttaaagccacacagtacagcatacctacgtactgcgaatattgctcatcgttgatttggataatggatcgggcatcagtgtgtaaactatgtaaatacgcttgtcacaagaaatgttgtctcaagacaactgcaaagtgctcaaaaaaatatgacccggagttatcctctagacagtttggtgtcgaattgtctcggctcaccagcgaagatcgaaccgtgcctttggtcgtggagaagctcatcaactacatcgagatgcatgggttgtataccgagggaatctaccggaagtcaggtagcacaaataagattaaggagcttcgtcaagggctggacaccgacgctgaaagcgtgaatttagacgattacaatatccacgtgatagctagtgtgtttaagcagtggctccgggatctgcctaaccctctgatgaccttcgagctgtacgaagaattcctgagagctatgggactgcaagagagaaaggaaacgattaggggggtgtactccgttatcgatcagctgagccgaactcatctcaataccctcgagcgtctcatcttccacctggtgaggatcgctttgcaggaagacactaaccggatgtccgcaaacgccttggccattgtttttgctccctgtatcctgagatgcccggatacaactgacccccttcagtccgtacaagatatttccaaaacaacaacctgcgtggagctgatcgtggtggagcagatgaataagtacaaggccaggctcaaggatatctcctccctggaatttgcagaaaacaaggctaagacgagactgagtctgataagacgatctatgggcaaaggtaggattagacgtggtaactaccccggaccatcgtcgcccgtggtagtccgtctgccttccgtgtcggacgtgagcgaagaaacgcttacgagcgaggccgctatggagactgacattacggaacagcagcaagctgccatgcagcaggaggaacgggtactgactgaacagatcgaaaacctgcagaaagaaaaagaggagctgacttttgaaatgcttgtgctggagcccagggccagtgatgacgaaaccctggagtccgaggccagcatagggactgccgacagttctgagaaccttaacatggaaagtgagtatgccatcagcgagaagtcggaacggtcacttgccctgagcagtctgaagacagctggcaagtcagagccatcttctaagctacgaaagcagctgaaaaaacagcaggactcgctggatgtagtggatagttccgtgtcctccctctgcttgtctaatactgcatcctcacacggcaccaggaagctgtttcagatctactccaagagcccgttctatcgcgctgcgagtgggaacgaggcactcggaatggaagggccacttggtcaaaccaaattcctggaggacaagccacagttcatttcccgtgggacctttaacccagagaaggggaagcaaaagttgaagaatgtcaagaattctcctcagaaaactaaggaaaccccggagggaactgtcatgtccggtagaaggaagaccgtggatcctgactgcaccagtaaccaacagctggcactgtttgggaataacgaatttatggtcta

SEQ ID NO: 293586 - DNA, 7860 bp, Artificial Sequence
  derived and/or modified sequence
atgaacatcaacgacggcggcagaagaagattcgaggacaacgagcacaccctgagaatctaccccggcgccatcagcgagggcaccatctactgccccatccccgccagaaagaacagcaccgccgccgaggtgatcgagagcctgatcaacaagctgcacctggacaagaccaagtgctacgtgctggccgaggtgaaggagttcggcggcgaggagtggatcctgaaccccaccgactgccccgtgcagagaatgatgctgtggcccagaatggccctggagaacagactgagcggcgaggactacagattcctgctgagagagaagaacctggacggcagcatccactacggcagcctgcagagctggctgagagtgaccgaggagagaagaagaatgatggagagaggcttcctgccccagccccagcagaaggacttcgacgacctgtgcagcctgcccgacctgaacgagaagaccctgctggagaacctgagaaacagattcaagcacgagaagatctacacctacgtgggcagcatcctgatcgtgatcaaccccttcaagttcctgcccatctacaaccccaagtacgtgaagatgtacgacaaccaccagctgggcaagctggagccccacatctacgccgtggccgacgtggcctaccacgccatgctgcagagaaagaagaaccagtgcatcgtgatcagcggcgagagcggcagcggcaagacccagagcaccaacttcctgatccaccacctgaccgccctgagccagaagggcttcgccagcggcgtggagcagatcatcctgggcgccggccccgtgctggaggccttcggcaacgccaagaccgcccacaacaacaacagcagcagattcggcaagttcatccaggtgaactaccaggagaccggcaccgtgctgggcgcctacgtggagaagtacctgctggagaagagcagactggtgtaccaggagcacaacgagagaaactaccacgtgttctactacctgctggccggcgccagcgaggacgagagaagcgccttccacctgaagcagcccgaggagtaccactacctgaaccagatcaccaagaagcccctgagacagagctgggacgactactgctacgacagcgagcccgactgcttcaccgtggagggcgaggacctgagacacgacttcgagagactgcagctggccatggagatggtgggcttcctgcccaagaccagaagacagatcttcagcctgctgagcgccatcctgcacctgggcaacatctgctacaagaagaagacctacagagacgacagcatcgacatctgcaaccccgaggtgctgcccatcgtgagcgagctgctggaggtgaaggaggagatgctgttcgaggccctggtgaccagaaagaccgtgaccgtgggcgagaagctgatcctgccctacaagctggccgaggccgtgaccgtgagaaacagcatggccaagagcctgtacagcgccctgttcgactggatcgtgttcagaatcaaccacgccctgctgaacagcaaggacctggagcacaacaccaagaccctgagcatcggcgtgctggacatcttcggcttcgaggactacgagaacaacagcttcgagcagttctgcatcaacttcgccaacgagagactgcagcactacttcaaccagcacatcttcaagctggagcaggaggagtacagaaccgagggcatcagctggcacaacatcgactacatcgacaacacctgctgcatcaacctgatcagcaagaagcccaccggcctgctgcacctgctggacgaggagagcaacttcccccaggccaccaaccagaccctgctggacaagttcaagcaccagcacgaggacaacagctacatcgagttccccgccgtgatggagcccgccttcatcatcaagcactacgccggcaaggtgaagtacggcgtgaaggacttcagagagaagaacaccgaccacatgagacccgacatcgtggccctgctgagaagcagcaagaacgccttcatcagcggcatgatcggcatcgaccccgtggccgtgttcagatgggccatcctgagagccttcttcagagccatggtggccttcagagaggccggcaagagaaacatccacagaaagaccggccacgacgacaccgccccctgcgccatcctgaagagcatggacagcttcagcttcctgcagcaccccgtgcaccagagaagcctggagatcctgcagagatgcaaggaggagaagtacagcatcaccagaaagaaccccagaacccccctgagcgacctgcagggcatgaacgccctgaacgagaagaaccagcacgacaccttcgacatcgcctggaacggcagaaccggcatcagacagagcagactgagcagcggcaccagcctgctggacaaggacggcatcttcgccaacagcaccagcagcaagctgctggagagagcccacggcatcctgaccagaaacaagaacttcaagagcaagcccgccctgcccaagcacctgctggaggtgaacagcctgaagcacctgaccagactgaccctgcaggacagaatcaccaagagcctgctgcacctgcacaagaagaagaagccccccagcatcagcgcccagttccaggccagcctgagcaagctgatggagaccctgggccaggccgagccctacttcgtgaagtgcatcagaagcaacgccgagaagctgcccctgagattcagcgacgtgctggtgctgagacagctgagatacaccggcatgctggagaccgtgagaatcagacagagcggctacagcagcaagtacagcttccaggacttcgtgagccacttccacgtgctgctgcccagaaacatcatccccagcaagttcaacatccaggacttcttcagaaagatcaacctgaaccccgacaactaccaggtgggcaagaccatggtgttcctgaaggagcaggagagacagcacctgcaggacctgctgcaccaggaggtgctgagaagaatcatcctgctgcagagatggttcagagtgctgctgtgcagacagcacttcctgcacctgagacaggccagcgtgatcatccagagattctggagaaactacctgaaccagaagcaggtgagagacgccgccgtgcagaaggacgccttcgtgatggccagcgccgccgccctgctgcaggccagctggagagcccacctggagagacagagatacctggagctgagagccgccgccatcgtgatccagcagaagtggagagactactacagaagaagacacatggccgccatctgcatccaggccagatggaaggcctacagagagagcaagagataccaggagcagagaaagaagatcatcctgctgcagagcacctgcagaggcttcagagccagacagagattcaaggccctgaaggagcagagactgagagagaccaagcccgaggtgggcctggtgaacatcaagggctacggcagcctggagatccagggcagcgaccccagcggctgggaggactgcagcttcgacaacagaatcaaggccatcgaggagtgcaagagcgtgatcgagagcaacagaatcagcagagagagcagcgtggactgcctgaaggagagccccaacaagcagcaggagagagcccagagccagagcggcgtggacctgcaggaggacgtgctggtgagagagagacccagaagcctggaggacctgcaccagaagaaggtgggcagagccaagagagagagcagaagaatgagagagctggagcaggccatcttcagcctggagctgctgaaggtgagaagcctgggcggcatcagccccagcgaggacagaagatggagcaccgagctggtgcccgagggcctgcagagccccagaggcacccccgacagcgagagcagccagggcagcctggagctgctgagctacgaggagagccagaagagcaagctggagagcgtgatcagcgacgagggcgacctgcagttccccagccccaagatcagcagcagccccaagttcgacagcagagacaacgccctgagcgccagcaacgagaccagcagcgccgagcacctgaaggacggcaccatgaaggagatggtggtgtgcagcagcgagagcatcacctgcaagccccagctgaaggacagcttcatcagcaacagcctgcccaccttcttctacatcccccagcaggaccccctgaagaccaacagccagctggacaccagcatccagagaaacaagctgctggagaacgaggacaccgccggcgaggccctgaccctggacatcaacagagagaccagaagataccactgcagcggcaaggaccagatcgtgcccagcctgaacaccgagagcagcaaccccgtgctgaagaagctggagaagctgaacaccgagaaggaggagagacagaagcagctgcagcagcagaacgagaaggagatgatggagcagatcagacagcagaccgacatcctggagaaggagagaaaggccttcaagaccatcgagaagcccagaatcggcgagtgcctggtggcccccagcagctaccagagcaagcagagagtggagagacccagcagcctgctgagcctgaacaccagcaacaagggcgagctgaacgtgctgggcagcctgagcctgaaggacgccgccctggcccagaaggacagcagcagcgcccacctgccccccaaggacagacccgtgaccgtgttcttcgagagaaagggcagcccctgccagagcagcaccgtgaaggagctgagcaagaccgacagaatgggcacccagctgaacgtggcctgcaagctgagcaacaacagaatcagcaagagagagcacttcagacccacccagagctacagccacaacagcgacgacctgagcagagagggcaacgccagacccatcttcttcacccccaaggacaacatgagcatccccctggtgagcaaggaggccctgaacagcaagaacccccagctgcacaaggaggacgagcccgcctggaagcccgtgaagctggccggccccggccagagagaggtggccagacccgcccacaagaagaaggccagaatggccagaaccagaagcgacttcctgaccagaggcaccttcgccgacggcgagggcgacaccgaggaggacgactacgacgacatcatcgagcccctgctgagcctggaccaggccagccactgcgagctgggccccgcccccagcctgggccaggccagccacagcgacagcgagatgaccagccagagattcagcagcgtggacgagcaggccaagctgcacaagaccatgagccagggcgagatcaccaagctggccgtgagacagaaggccagcgacagcgacatcagaccccagagagccaagatgagattctgggccaagggcaagcagggcgagaagaagaccaccagagtgaagcccaccacccagagcgaggtgagccccctgttcgccggcaccgacgtgatccccgcccaccagttccccgacgagctggccgcctaccaccccaccccccccctgagccccgagctgcccggcagctgcagaaaggagttcaaggagaacaaggagcccagccccaaggccaagagaaagagaagcgtgaagatcagcaacgtggccctggacagcatgcactggcagaacgacagcgtgcagatcatcgccagcgtgagcgacctgaagagcatggacgagttcctgctgaagaaggtgaacgacctggacaacgaggacagcaagaaggacaccctggtggacgtggtgttcaagaaggccctgaaggagttcagacagaacatcttcagcttctacagcagcgccctggccatggacgacggcaagagcatcagatacaaggacctgtacgccctgttcgagcagatcctggagaagaccatgagactggagcagagagacagcctgggcgagagccccgtgagagtgtgggtgaacaccttcaaggtgttcctggacgagtacatgaacgagttcaagaccagcgactgcaccgccaccaaggtgcccaagaccgagagaaagaagagaagaaagaaggagaccgacctggtggaggagcacaacggccacatcttcaaggccacccagtacagcatccccacctactgcgagtactgcagcagcctgatctggatcatggacagagccagcgtgtgcaagctgtgcaagtacgcctgccacaagaagtgctgcctgaagaccaccgccaagtgcagcaagaagtacgaccccgagctgagcagcagacagttcggcgtggagctgagcagactgaccagcgaggacagaaccgtgcccctggtggtggagaagctgatcaactacatcgagatgcacggcctgtacaccgagggcatctacagaaagagcggcagcaccaacaagatcaaggagctgagacagggcctggacaccgacgccgagagcgtgaacctggacgactacaacatccacgtgatcgccagcgtgttcaagcagtggctgagagacctgcccaaccccctgatgaccttcgagctgtacgaggagttcctgagagccatgggcctgcaggagagaaaggagaccatcagaggcgtgtacagcgtgatcgaccagctgagcagaacccacctgaacaccctggagagactgatcttccacctggtgagaatcgccctgcaggaggacaccaacagaatgagcgccaacgccctggccatcgtgttcgccccctgcatcctgagatgccccgacaccaccgaccccctgcagagcgtgcaggacatcagcaagaccaccacctgcgtggagctgatcgtggtggagcagatgaacaagtacaaggccagactgaaggacatcagcagcctggagttcgccgagaacaaggccaagaccagactgagcctgatcagaagaagcatgggcaagggcagaatcagaagaggcaactaccccggccccagcagccccgtggtggtgagactgcccagcgtgagcgacgtgagcgaggagaccctgaccagcgaggccgccatggagaccgacatcaccgagcagcagcaggccgccatgcagcaggaggagagagtgctgaccgagcagatcgagaacctgcagaaggagaaggaggagctgaccttcgagatgctggtgctggagcccagagccagcgacgacgagaccctggagagcgaggccagcatcggcaccgccgacagcagcgagaacctgaacatggagagcgagtacgccatcagcgagaagagcgagagaagcctggccctgagcagcctgaagaccgccggcaagagcgagcccagcagcaagctgagaaagcagctgaagaagcagcaggacagcctggacgtggtggacagcagcgtgagcagcctgtgcctgagcaacaccgccagcagccacggcaccagaaagctgttccagatctacagcaagagccccttctacagagccgccagcggcaacgaggccctgggcatggagggccccctgggccagaccaagttcctggaggacaagccccagttcatcagcagaggcaccttcaaccccgagaagggcaagcagaagctgaagaacgtgaagaacagcccccagaagaccaaggagacccccgagggcaccgtgatgagcggcagaagaaagaccgtggaccccgactgcaccagcaaccagcagctggccctgttcggcaacaacgagttcatggtgtag

SEQ ID NO: 293587 - protein, 137 aa, Artificial Sequence
  derived and/or modified sequence
MTRIPVIENPQYFRQGHNCHKPDTYVQHIKRRDIVLKRELGEGAFGKVFLAECYNLSPTKDKMLVAVKALKDPTLAARKDFQREAELLTNLQHEHIVKFYGVCGDGDPLIMVFEYMKHGDLNKFLSSISSPKSHQQG

SEQ ID NO: 293588 - DNA, 2287 bp, Artificial Sequence
  derived and/or modified sequence
attaagctgtccacattcataaggcacactccaggtctgcaggagggagcatgagggattcaggggacgcccttgtcccctgtacacacctaggggccggttcgactacagtagacacatagagaactggcgcagtcttcacacgctcaacgccgtggacatggagctctacaccggacttcaaaagctgaccatcaagaactcaggacttcggagcattcagcccagagcctttgccaagaacccccatttgcgttatataaacctgtcaagtaaccggctcaccacactctcgtggcagctcttccagacgctgagtcttcgggaattgcagttggagcagaactttttcaactgcagctgtgacatccgctggatgcagctctggcaggagcagggggaggccaagctcaacagccagaacctctactgcatcaacgctgatggctcccagcttcctctcttccgcatgaacatcagtcagtgtgaccttcctgagatcagcgtgagccacgtcaacctgaccgtacgagagggtgacaacgctgttatcacttgcaatggctctggatcaccccttcctgatgtggactggatagtcactgggctgcagtccatcaacactcaccagaccaatctgaactggaccaatgttcatgccatcaacttgacgctggtgaatgtgacgagtgaggacaatggcttcaccctgacgtgcattgcagagaacgtggtgggcatgagcaatgccagtgttgccctcactgtctactatcccccacgtgtggtgagcctggaggagcctgagctgcgcctggagcactgcatcgagtttgtggtgcgtggcaaccccccaccaacgctgcactggctgcacaatgggcagcctctgcgggagtccaagatcatccatgtggaatactaccaagagggagagatttccgagggctgcctgctcttcaacaagcccacccactacaacaatggcaactataccctcattgccaaaaacccactgggcacagccaaccagaccatcaatggccacttcctcaaggagccctttccagagagcacggataactttatcttgtttgacgaagtgagtcccacacctcctatcactgtgacccacaaaccagaagaagacacttttggggtatccatagcagttggacttgctgcttttgcctgtgtcctgttggtggttctcttcgtcatgatcaacaaatatggtcgacggtccaaatttggaatgaagggtcccgtggctgtcatcagtggtgaggaggactcagccagcccactgcaccacatcaaccacggcatcaccacgccctcgtcactggatgccgggcccgacactgtggtcattggcatgactcgcatccctgtcattgagaacccccagtacttccgtcagggacacaactgccacaagccggacacgtatgtgcagcacattaagaggagagacatcgtgctgaagcgagaactgggtgagggagcctttggaaaggtcttcctggccgagtgctacaacctcagcccgaccaaggacaagatgcttgtggctgtgaaggccctgaaggatcccaccctggctgcccggaaggatttccagagggaggccgagctgctcaccaacctgcagcatgagcacattgtcaagttctatggagtgtgcggcgatggggaccccctcatcatggtctttgaatacatgaagcatggagacctgaataagttcctcagggcccatgggccagatgcaatgatccttgtggatggacagccacgccaggccaagggtgagctggggctctcccaaatgctccacattgccagtcagatcgcctcgggtatggtgtacctggcctcccagcactttgtgcaccgagacctggccaccaggaactgcctggttggagcgaatctgctagtgaagattggggacttcggcatgtccagagatgtctacagcacggattattacagggttgtgcaggcatgaggactgatactggggaaaaaagacggggaagatgccccataagaaaattctgagacgttgaagcatgcttatattggattctgtcctcgggaaaggagaggaaaaggctgaaggagaccattgaatctggtgttgagtcattcacgtctctctactcctgtggagggcccttacggatgtgtcataacaggatctccttttccttcctcaagtgcaaaaggccttttttttttttttcctgagacaaactgaatatataacataaaaagatac

SEQ ID NO: 293589 - protein, 402 aa, Artificial Sequence
  derived and/or modified sequence
MIIPSLEELDSLKYSDLQNLAKSLGLRANLRATKLLKALKGYIKHEARKGNENQDESQTSASSCDETEIQISNQEEAERQPLGHVTKTRRRCKTVRVDPDSQQNHSEIKISNPTEFQNHEKQESQDLRATAKVPSPPDEHQEAENAVSSGNRDSKVPSEGKKSLYTDESSKPGKNKRTAITTPNFKKLHEAHFKEMESIDQYIERKKKHFEEHNSMNELKQQPINKGGVRTPVPPRGRLSVASTPISQRRSQGRSCGPASQSTLGLKGSLKRSAISAAKTGVRFSAATKDNEHKRSLTKTPARKSAHVTVSGGTPKGEAVLGTHKLKTITGNSAAGKLKPWGQSKENNYLNQHVNRINFYKKTYKQPHLQTKEEQRKKREQERKEKKAKVLGMRRGLILAED

SEQ ID NO: 293590 - DNA, 1209 bp, Artificial Sequence
  derived and/or modified sequence
atgatcattccttcgctggaggaactggattcactcaagtattccgacctccagaatctcgctaaaagcctcggactcagagccaatttaagagccacaaaactcttgaaggcactgaaggggtacatcaaacacgaggcgagaaaggggaatgaaaatcaggatgagtctcagacttccgcttcatcatgcgacgaaaccgaaatacaaatctcaaaccaggaggaggccgagagacagcctctggggcacgtgacaaaaactaggcgcaggtgcaagaccgtgagggtggacccagactcccagcagaaccattcagaaattaaaatcagcaaccccaccgagttccaaaatcacgaaaaacaggagtctcaggaccttcgggcgaccgccaaggtgccttccccccccgatgagcatcaagaagctgagaacgccgtgagtagcggaaacagggacagcaaggtacccagcgaaggtaaaaaatcactctacaccgatgaaagttctaaacccggcaagaataagaggaccgcgatcactacacctaactttaaaaaattgcacgaggcacacttcaaagagatggaatcaatagaccaatacatcgagaggaagaagaagcacttcgaggagcataattccatgaatgaactcaaacagcagccaattaacaagggtggcgttagaacacccgtccctcctcgaggtagactgagtgtcgcctctactccaatctcacagagacgcagccagggccggtcctgtggccctgcctctcagtcaaccctaggcctgaaggggtccctgaaaaggtcagccatttctgccgccaagacaggggtgaggttctccgccgccacaaaagataacgagcataagcgctcgctgacgaagacaccagcgcggaaatccgctcacgtgactgtcagtgggggtacacccaaaggggaagcagtcctagggactcacaagctcaagactatcacaggtaactcggctgctggcaagttgaagccttggggccagagtaaagagaataattatcttaaccagcacgtcaatcggattaacttctacaagaagacttataagcagccgcacctgcaaaccaaggaggagcagaggaaaaagagggagcaagagaggaaggaaaaaaaagctaaggttctgggcatgcgcagagggctaatattggcagaggactag

SEQ ID NO: 293591 - DNA, 1209 bp, Artificial Sequence
  derived and/or modified sequence
atgatcatccccagcctggaggagctggacagcctgaagtacagcgacctgcagaacctggccaagagcctgggcctgcgggccaacctgcgggccaccaagctgctgaaggccctgaagggctacatcaagcatgaggccaggaaaggaaatgaaaaccaggatgagagccagaccagcgccagcagctgtgatgaaacagagatccagatcagcaaccaggaggaggccgagcggcagcccctgggccacgtgaccaagacccggcggcgctgcaagacagtgcgggtggaccctgacagccagcagaaccacagcgagatcaagatcagcaaccccacagagttccagaaccacgagaagcaggagagccaggacctgcgggccacagccaaggtgcccagccccccagatgagcaccaggaggccgagaatgctgtgagcagcggcaacagagacagcaaggtgcccagcgagggcaagaagagcctgtacacagatgagagcagcaagccaggcaagaacaagaggacagccatcaccacccccaacttcaagaagctgcacgaggcccacttcaaggagatggagagcattgaccagtacattgaaaggaagaagaagcactttgaggagcacaacagcatgaatgagctgaagcagcagcccatcaacaagggcggcgtgaggacccctgtgcccccccggggccgcctgtctgtggccagcacccccatcagccagaggaggagccagggccgcagctgtggccctgccagccagagcaccctgggcctgaagggcagcctgaagaggtctgccatctctgctgccaagacaggagtgcgcttctctgctgccaccaaggacaatgagcacaagaggagcctgaccaagaccccagccaggaagagcgcccacgtgacagtgtctgggggcacccccaagggggaggccgtgctgggcacccacaagctgaagaccatcaccggcaacagcgctgctgggaagctgaagccctggggccagagcaaggagaacaactacctgaaccagcacgtgaaccgcatcaacttctacaagaagacctacaagcagccccacctgcagaccaaggaggagcagaggaagaagcgggagcaggagaggaaggagaagaaggccaaggtgctgggcatgaggcggggcctcatcctggctgaagattag

SEQ ID NO: 293592 - DNA, 1209 bp, Artificial Sequence
  derived and/or modified sequence
atgatcatccccagcctggaggagctggacagcctgaagtacagcgacttgcagaatctcgcaaaatccttgggcctccgcgcaaacctgcgcgctaccaagctacttaaagccctgaagggatatataaaacatgaggcccgaaagggcaatgagaaccaggatgaatctcagacatcagcctcttcatgtgatgaaaccgagatccagatctctaatcaagaagaagccgaaagacagcccctgggacacgttactaagacccgccggaggtgcaagaccgtgagagtggacccggactctcagcagaaccactctgagataaaaatcagcaacccgacagagttccagaaccatgagaaacaagagtcccaggacttaagggccacagcgaaagtgccctctcccccggacgaacatcaagaggccgagaatgcagttagttctggaaaccgggatagcaaggtgcctagtgaaggaaagaaatcactgtacaccgatgagagctctaagcctggaaagaacaagcgcacagcgatcactactcccaattttaagaagctgcacgaggcacacttcaaggagatggagagtatcgatcagtatatcgagcgcaagaaaaagcacttcgaggagcacaattctatgaacgaactgaaacaacagccaattaacaaagggggcgtgcgtacccccgtcccaccacgggggcgcttaagtgtcgccagtaccccaatctcccagagacgaagccaaggccgtagctgtgggcccgcctctcagtcaaccttggggctgaaaggatccctgaagaggtcggccatcagcgctgcaaagacgggcgtgaggtttagtgcagccaccaaagacaacgagcacaaacgctcactgacaaagacgcccgctaggaaatctgcccacgtgacggttagtggaggcacgccaaaaggcgaggccgtccttggcacgcacaaattgaaaacaataactggtaatagcgccgctggcaagttgaaaccttggggacagtctaaggaaaataactatctcaatcagcacgtgaaccgcatcaatttctacaaaaagacctataagcagcctcaccttcagaccaaagaagaacagcggaagaagcgcgagcaggaacgaaaagaaaagaaagcaaaggttctgggaatgaggaggggcttgattttagctgaggactag

SEQ ID NO: 293593 - DNA, 2300 bp, Artificial Sequence
  derived and/or modified sequence
aagtgtgaaaaaagcgcgcctctgttgggacgggaaatcagcctttctattggtcagggttagaaaccccgcctttgaggcattttcaaccaatggaagcgcggcattcttcatttaaactgtctataaatttctgcctagtcaaagttaagagtggcgccagggatttgaaccgcgctgacgaagtttggtgatccatcttccgagtatcgccgggatttcgaatcgcgatgatcatcccctctctagaggagctggactccctcaagtacagtgacctgcagaacttagccaagagtctgggtctccgggccaacctgagggcaaccaagttgttaaaagccttgaaaggctacattaaacatgaggcaagaaaaggaaatgagaatcaggatgaaagtcaaacttctgcatcctcttgtgatgagactgagatacagatcagcaaccaggaagaagctgagagacagccacttggccatgtcaccaaaacaaggagaaggtgcaagactgtccgtgtggaccctgactcacagcagaatcattcagagataaaaataagtaatcccactgaattccagaatcatgaaaagcaggaaagccaggatctcagagctactgcaaaagttccttctccaccagacgagcaccaagaagctgagaatgctgtttcctcaggtaacagagattcaaaggtaccttcagaaggaaagaaatctctctacacagatgagtcatccaaacctggaaaaaataaaagaactgcaatcactactccaaactttaagaagcttcatgaagctcattttaaggaaatggagtccattgatcaatatattgagagaaaaaagaaacattttgaagaacacaattccatgaatgaactgaagcagcagcccatcaataagggaggggtcaggactccagtacctccaagaggaagactctctgtggcttctactcccatcagccaacgacgctcgcaaggccggtcttgtggccctgcaagtcagagtaccttgggtctgaaggggtcactcaagcgctctgctatctctgcagctaaaacgggtgtcaggttttcagctgctactaaagataatgagcataagcgttcactgaccaagactccagccagaaagtctgcacatgtgaccgtgtctgggggcaccccaaaaggcgaggctgtgcttgggacacacaaattaaagaccatcacggggaattctgctgctggaaagctaaaaccatgggggcaatctaaagaaaataattatctaaatcaacatgtcaacagaattaacttctacaagaaaacttacaaacaaccccatctccagacaaaggaagagcaacggaagaaacgcgagcaagaacgaaaggagaagaaagcaaaggttttgggaatgcgaaggggcctcattttggctgaagattaataattttttaacatcttgtaaatattcctgtattctcaacttttttccttttgtaaattttttttttttgctgtcatccccactttagtcacgagatctttttctgctaactgttcatagtctgtgtagtgtccatgggttcttcatgtgctatgatctctgaaaagacgttatcaccttaaagctcaaattctttgggatggtttttacttaagtccattaacaattcaggtttctaacgagacccatcctaaaattctgtttctagatttttaatgtcaagttcccaagttccccctgctggttctaatattaacagaactgcagtcttctgctagccaatagcatttacctgatggcagctagttatgcaagcttcaggagaatttgaacaataacaagaatagggtaagctgggatagaaaggccacctcttcactctctatagaatatagtaacctttatgaaacggggccatatagtttggttatgacatcaatattttacctaggtgaaattgtttaggcttatgtaccttcgttcaaatatcctcatgtaattgccatctgtcactcactatattcacaaaaataaaactctacaactcattctaacattgcttacttaaaagctacatagccctatcgaaatgcgaggattaatgctttaatgcttttagagacagggtctcactgtgttgcccaggctggtctcaaactccaccaaatgtacttcttattcattttatggaaaagactaggctttgcttagtatcatgtccatgtttccttcacctcagtggagcttctgagttttatactgctcaagatcgtcataaataaaattttttctcattgtcat

SEQ ID NO: 293594 - DNA, 1209 bp, Artificial Sequence
  derived and/or modified sequence
atgattatccccagtctggaggaactggactctctgaagtatagcgaccttcagaatttggccaaatccttgggcttgagggcgaatctccgggctaccaagctcctcaaggctctcaagggctacataaagcacgaggccaggaaaggcaatgaaaatcaggacgaatcacagacatccgcttcatcatgcgatgagactgaaattcagatcagcaaccaggaggaagctgaaagacagccattgggtcatgtgacaaagacccggagaagatgcaagaccgtcagggtggaccctgattctcagcagaaccacagcgaaattaaaattagcaacccaaccgaattccagaatcacgaaaagcaggaaagccaggatttgcgggctactgctaaagtccccagccctcctgatgaacatcaggaggcagagaacgccgtgtcttcgggcaacagggactccaaagtgccttcagaaggcaagaagagtctctacaccgacgaaagtagtaaacctggcaaaaataagaggaccgcaattacaacgcctaattttaaaaaactgcacgaggcccactttaaggaaatggagagtatcgatcagtatatagagagaaaaaaaaaacatttcgaggaacacaactcaatgaatgaactcaagcagcagccaattaacaagggtggcgtccggactccagtcccgccaaggggtagactctccgtcgcgagcactccaatttcacagcgaaggtctcagggtcgcagttgcgggcctgcttcacagagcacccttgggctgaagggcagcctgaagaggtctgctatatccgctgctaagacgggcgtccgcttttcagctgctacaaaggataatgagcacaagaggtcactaaccaaaaccccagcaaggaagagcgctcatgtgaccgtgtcaggaggaacccccaaaggagaggccgtgctcggcacgcacaagttgaagacgatcacaggcaactctgcagctggaaagttaaagccttggggccagtccaaagagaataattatctgaaccaacatgtcaatcgcatcaatttctacaaaaagacttacaaacagccccacctccagacaaaggaggaacagagaaaaaagagggagcaggaacggaaagagaaaaaggcaaaggtgctcggaatgcggcgagggctgattctggccgaggactag

SEQ ID NO: 293595 - DNA, 1209 bp, Artificial Sequence
  derived and/or modified sequence
atgatcatccccagcctggaggagctggacagcctgaagtacagcgacctgcagaacctggccaagagcctgggcctgagagccaacctgagagccaccaagctgctgaaggccctgaagggctacatcaagcacgaggccagaaagggcaacgagaaccaggacgagagccagaccagcgccagcagctgcgacgagaccgagatccagatcagcaaccaggaggaggccgagagacagcccctgggccacgtgaccaagaccagaagaagatgcaagaccgtgagagtggaccccgacagccagcagaaccacagcgagatcaagatcagcaaccccaccgagttccagaaccacgagaagcaggagagccaggacctgagagccaccgccaaggtgcccagcccccccgacgagcaccaggaggccgagaacgccgtgagcagcggcaacagagacagcaaggtgcccagcgagggcaagaagagcctgtacaccgacgagagcagcaagcccggcaagaacaagagaaccgccatcaccacccccaacttcaagaagctgcacgaggcccacttcaaggagatggagagcatcgaccagtacatcgagagaaagaagaagcacttcgaggagcacaacagcatgaacgagctgaagcagcagcccatcaacaagggcggcgtgagaacccccgtgccccccagaggcagactgagcgtggccagcacccccatcagccagagaagaagccagggcagaagctgcggccccgccagccagagcaccctgggcctgaagggcagcctgaagagaagcgccatcagcgccgccaagaccggcgtgagattcagcgccgccaccaaggacaacgagcacaagagaagcctgaccaagacccccgccagaaagagcgcccacgtgaccgtgagcggcggcacccccaagggcgaggccgtgctgggcacccacaagctgaagaccatcaccggcaacagcgccgccggcaagctgaagccctggggccagagcaaggagaacaactacctgaaccagcacgtgaacagaatcaacttctacaagaagacctacaagcagccccacctgcagaccaaggaggagcagagaaagaagagagagcaggagagaaaggagaagaaggccaaggtgctgggcatgagaagaggcctgatcctggccgaggactag

SEQ ID NO: 293596 - protein, 1003 aa, Artificial Sequence
  derived and/or modified sequence
MSQWTPEYNELYTLKVDMKSEIPSDAPKTQESLKGILLHPEPIGAAKSFPAGVEMINSKVGNEFSHLCDDSQKQEKEMNGNQQEQEKSLVVRKKRKSQQAGPSYVQNCVKENQGILGLRQHLGTPSDEDNDSSFSDCLSSPSSSLHFGDSDTVTSDEDKEVSVRHSQTILNAKSRSHSARSHKWPRTETESVSGLLMKRPCLHGSSLRRLPCRKRFVKNNSSQRTQKQKERILMQRKKREVLARRKYALLPSSSSSSENDLSSESSSSSSTEGEEDLFVSASENHQNNPAVPSGSIDEDVVVIEASSTPQVTANEEINVTSTDSEVEIVTVGESYRSRSTLGHSRSHWSQGSSSHASRPQEPRNRSRISTVIQPLRQNAAEVVDLTVDEDEPTVVPTTSARMESQATSASINNSNPSTSEQASDTASAVTSSQPSTVSETSATLTSNSTTGTSIGDDSRRTTSSAVTETGPPAMPRLPSCCPQHSPCGGSSQNHHALGHPHTSCFQQHGHHFQHHHHHHHTPHPAVPVSPSFSDPACPVERPPQVQAPCGANSSSGTSYHEQQALPVDLSNSGIRSHGSGSFHGASAFDPCCPVSSSRAAIFGHQAAAAAPSQPLSSIDGYGSSMVAQPQPQPPPQPSLSSCRHYMPPPYASLTRPLHHQASACPHSHGNPPPQTQPPPQVDYVIPHPVHAFHSQISSHATSHPVAPPPPTHLASTAAPIPQHLPPTHQPISHHIPATAPPAQRLHPHEVMQRMEVQRRRMMQHPTGLFVFCVSRRAHERPPPHPHRMHPNYGHGHHIHVPQTMSSHPRQAPERSAWELGIEAGVTAATYTPGALHPHLAHYHAPPRLHHLQLGALPLMVPDMAGYPHIRYISSGLDGTSFRGPFRGNFEELIHLEERLGNVNRGASQGTIERCTYPHKYKKVTTDWFSQRKLHCKQDGEEGTEEDTEEKCTICLSILEEGEDVRRLPCMHLFHQVCVDQWLITNKKCPICRVDIEAQLPSES

SEQ ID NO: 293597 - DNA, 5913 bp, Artificial Sequence
  derived and/or modified sequence
agagccctagtgtcgtgctctcctcggtaggggaggaattggttaggcggcggcggcggcgaagcggcggcggcggctgtaggggagcagcggcagtggcggcgacggcgaggaggtgttcggtttgcgcagcgtagaaacgcccgcagcttcagagaaggagttcttgtgggaccaaattaggcattctgaacccacgccggcttagctgggccgagtccaggcgctgccgcacgtacagttttggtggcggtgacagacactgttcttgactctaggggcctattaggccgacgtctgaggcgcagatcgctggctctcgacgcattactctttacgccttacatttctgtcttccttcctgggtcagtgattcccggaccctggaagagaagagggtggctaatgattaaggctttccttaaagtttcccatgtctcaatggactcctgaatataacgagctctacaccttaaaagtggatatgaagagtgagattccttctgatgcaccaaagacacaggagagtctgaaagggatccttttgcatccagagcccattggggcagccaaaagttttcctgcaggagttgagatgattaatagtaaagtggggaatgaattctctcacctgtgtgatgattctcaaaagcaagagaaggaaatgaatggtaaccagcaagaacaagaaaaaagtctcgttgtgaggaaaaaacgcaaaagccagcaggctggcccttcgtatgtgcagaattgtgttaaagaaaaccagggaatattaggactgaggcaacacctagggacaccaagtgatgaagataatgattcctcttttagtgattgtctttcttctccttcatctagtctgcattttggagattctgatactgtgacttcagatgaggataaagaagtctctgtaagacattcccagaccattttgaatgctaaaagtagaagccatagtgcacggtctcataagtggcctcggactgagacagaatctgtatcgggattgttaatgaaaagaccctgtttacatggcagttcgttacggagacttccatgcagaaagagatttgtaaaaaataattcctcacagaggacacagaaacaaaaagagaggatattaatgcagaggaagaaacgagaagtgttagctcgaagaaaatatgccttgctacctagttctagtagttccagtgagaatgacctcagcagtgaatcctcttctagctcatcaactgaaggagaagaagatttgtttgtttctgccagtgaaaaccaccaaaacaatccagctgttccctcaggaagtattgatgaagatgttgtggtgatagaagcttcctccactccccaggttactgccaatgaagaaattaatgttacctcaactgacagtgaagtggagattgtaacagttggagaaagctatcggtctcgttcaacccttggacactccagatctcattggagccagggttccagttctcatgcaagtcggccacaggagccacggaaccgcagtaggatttctactgttatacagcccttgaggcagaatgcagcagaagttgtggaccttaccgttgatgaagatgaacctactgtagtaccaaccacttctgcaagaatggaatcacaagctactagcgcttccattaacaattcaaatccatctacctctgagcaggcctctgatactgcttcagctgtcaccagtagccaaccttccacagtgtcagagacttcagctactcttacaagcaatagtaccactggcacttctataggagatgactcaaggagaactacatctagtgctgtaacggaaactggccctcctgcaatgccaaggttaccttcctgctgtccccagcactcaccatgtggagggtcgtcacagaaccaccatgcattaggacatcctcatacaagttgctttcagcagcatggtcaccattttcaacatcatcaccaccaccaccatactccccacccagctgtcccagtttctccttcctttagtgatcctgcttgccctgtggaaagacctccacaagtacaagcaccttgtggagcaaatagtagttctggtaccagctatcatgaacagcaggcattgccagtggacctgagcaacagtggtatcagaagtcatggaagtggcagttttcatggagcatctgcatttgacccctgctgccctgtttcttcctcccgagctgcaatctttggccatcaggccgctgctgctgccccaagtcaacctttatcatcaatagatggctatggatcaagcatggttgcgcagccccagccccagccccctccacagccctctctctcatcatgtcgacattacatgccacccccttatgcctctttgacaaggccacttcatcatcaagcttctgcctgcccgcattctcatggaaacccccctcctcagactcagcctccgcctcaagtggattatgttattcctcatcctgtacatgctttccattctcaaatatcttctcatgcaacatctcatcctgtggcacccccaccaccaactcacttagccagtacagctgcaccaatccctcagcatcttcctcctacacaccagccaatttcgcaccatattccagccacagcacctccagcacagagactgcatcctcatgaagtgatgcagaggatggaagttcaaaggaggaggatgatgcagcatccaacgcgggcacatgaacgccccccaccccatccacataggatgcacccaaactatggtcatgggcatcatattcatgtgcctcagactatgtcctcacatcctcgacaggctccagagaggtctgcctgggaactgggaattgaagctggagtgactgcagctacttatacacctggtgcattgcatcctcacttggcccattatcacgcacctcctcgacttcatcacttacaattaggagctcttcctttaatggttcctgatatggcaggctatcctcacatccgttacatttcatcaggattggatggaacatcattcagaggtcctttcaggggcaattttgaggaactgattcatttggaagaaagattaggcaatgtcaatcgtggagcatcccaggggacaattgaaagatgtacatatccacataaatacaaaaagaggaaactgcactgcaaacaagatggggaagaagggactgaggaagacacagaggaaaaatgtactatctgtttgtctattttagaggaaggtgaagatgtgagacgtcttccatgtatgcaccttttccaccaagtgtgtgttgaccaatggttgattaccaataagaagtgccccatatgcagagtggacattgaggcccagctgccaagtgaaagttgacaccatgtttcagaactcttgccctccctctcattcccatccttcctggtactgcagtcaaccaaagatggcatgacttacctgcgcagatttggaagcattgaacttagagtgctggctctgctatatggtacaactaatgctagacctacagtttatgtatacagttgattttgatgtatttataaaagcttttttttctagatttgacatttttctgtatcattttactgtatttttgcatggttccttgtattgcatttctttgcacatattatgggcttgtgaccctaaacttgcaggcaaggttagctgctttagtaagtagaattttgtggtctttttgttttttacatagtaccaagccttgataattatgaattttttatccattactaacctttaatttaatcaatcatgtactttagtttaatgtataaagatcctctagaaaatgataatattgtgtattaagacattccttaattaggacaaaatggctgctgtatatttactatatggagttctgagttaaataccatccttaatactgggaacagaatacaacccatataaatcagatgcaggtggtagtcacatcaccagagtgatcagtataaattttcttggtgtatccttttcctttcaacacagtgcagataagagttgaatattgatatcatacatttagactgctgttctgattgcatttatctttttcctacatcatttagaattttatttccctgattcagtttttgctgctgtgaaacagctctgatgaacactaaatattaatttcaattagctagattgtacatacttgcagatttaacaaaattttagggaaattgaaaaagacatgtagaatttgttgtcttctgctaagcacgaaaagttaagatatctgcttacattgattttgtagacacattaagtcaagatttggaatttaagtcactggcaggtatctgtgcattcatagaacttataaaggtcccaggatcacttttaagggatttttattagtttaaaggtaaataaagtcagctgaatctacatgtctcttgttttatttctctctaaacttgaaaacagtaaatctgcagatactgtgaggcacaaattatactgtcaacctactgttgctatggttatatactcccacttcatacattaccaagagtcgatcactgatttaaaatttttaatttctatagttaagatttactgcataatatagaatataaagttaagttaacatactaacatttctcctttggaggaagttttaatctacttcaggatgcatattattatcaagatactttcatatacaggatagcctaattttatttgtttaaatatgcttaatatgccccagattgcaaatgcatccagtcagtaatatcactgtctgtatgtggaggacatgttcccatggatcatatgtgaagatgtcaataagcttgcattaagccacctgctttgtaagtggattgattaataaataacttatatttctattgtctttgtgtttcataattagtttttataaaaacagtttacattaaacatcttggaattcaacaatagtgatctcactcaaattgacatttgcataatttgacatttatattcattcagttatgactacttgcccttttcttcatattagtaaatgttacactgtagtagttgtcaatgttaacaggcttcaacatagtatgtgtgcagatggacgatggatttaaagagcataccttatgattaaaccgaggttatagaaggtcaggggagagtgaaggagtcagtgacctatgtctgccatcttactggggaaaagagcaagtagcctgtcttcctttaagtaagtagcctgtaatggatgtactactttgccactggaataccccgggtctgtgccaagggactgaagaagtgtaagatggggagaactgtatgtcatggagtcctcttgacgttcccccagatacaagtaaagcacaggtggatttctctatttttgaatactacatcagatttagatgcacgactacctgttgacttgttttataattgctactgatttttttaatgtaggcaaagctttgttactttgaaatttatttaataaaagtatttgtgacataaacctgaattgttaatataggagcttattaagctactgccattagttatcgaaaaatgtgataagtaatgaagaaagtaaggaagaaaatgactttgaacattttgactttttgtgctttgttttggtgtcttccatatcctgctgcatcttatatgtcaaaatgaacatttcagtggtagctgtccaaatacataaaaactaaaattcttttgttagcaagtccttatttttattgttgttaacatgcaagtgataaactgataatttgaaacatttttcttactctggtgactttcttttagctgctagcacacttcagcatttgaaccataacagttgtgataaactgatcgtttgaaacgtt

SEQ ID NO: 293598 - DNA, 5584 bp, Artificial Sequence
  derived and/or modified sequence
gtcgtgctctcctcggtaggggaggaattggttaggcggcggcggcggcgaagcggcggcggcggctgtaggggagcagcggcagtggcggcgacggcgaggaggtgttcggtttgcgcagcgtagaaacgcccgcagcttcagagaaggagttcttgtgggaccaaattaggcattctgaacccacgccggcttagctgggccgagtccaggcgctgccgcacgtacagttttggtggcggtgacagacactgttcttgactctaggggcctattaggccgacgtctgaggcgcagatcgctggctctcgacgcattactctttacgccttacatttctgtcttccttcctgggtcagtgattcccggaccctggaagagaagagggtggctaatgattaaggctttccttaaagtttcccatgtctcaatggactcctgaatataacgagctctacaccttaaaagtggatatgaagagtgagattccttctgatgcaccaaagacacaggagagtctgaaagggatccttttgcatccagagcccattggggcagccaaaagttttcctgcaggagttgagatgattaatagtaaagtggggaatgaattctctcacctgtgtgatgattctcaaaagcaagagaaggaaatgaatggtaaccagcaagaacaagaaaaaagtctcgttgtgaggaaaaaacgcaaaagccagcaggctggcccttcgtatgtgcagaattgtgttaaagaaaaccagggaatattaggactgaggcaacacctagggacaccaagtgatgaagataatgattcctcttttagtgattgtctttcttctccttcatctagtctgcattttggagattctgatactgtgacttcagatgaggataaagaagtctctgtaagacattcccagaccattttgaatgctaaaagtagaagccatagtgcacggtctcataagtggcctcggactgagacagaatctgtatcgggattgttaatgaaaagaccctgtttacatggcagttcgttacggagacttccatgcagaaagagatttgtaaaaaataattcctcacagaggacacagaaacaaaaagagaggatattaatgcagaggaagaaacgagaagtgttagctcgaagaaaatatgccttgctacctagttctagtagttccagtgagaatgacctcagcagtgaatcctcttctagctcatcaactgaaggagaagaagatttgtttgtttctgccagtgaaaaccaccaaaacaatccagctgttccctcaggaagtattgatgaagatgttgtggtgatagaagcttcctccactccccaggttactgccaatgaagaaattaatgttacctcaactgacagtgaagtggagattgtaacagttggagaaagctatcggtctcgttcaacccttggacactccagatctcattggagccagggttccagttctcatgcaagtcggccacaggagccacggaaccgcagtaggatttctactgttatacagcccttgaggcagaatgcagcagaagttgtggaccttaccgttgatgaagatgaacctactgtagtaccaaccacttctgcaagaatggaatcacaagctactagcgcttccattaacaattcaaatccatctacctctgagcaggcctctgatactgcttcagctgtcaccagtagccaaccttccacagtgtcagagacttcagctactcttacaagcaatagtaccactggcacttctataggagatgactcaaggagaactacatctagtgctgtaacggaaactggccctcctgcaatgccaaggttaccttcctgctgtccccagcactcaccatgtggagggtcgtcacagaaccaccatgcattaggacatcctcatacaagttgctttcagcagcatggtcaccattttcaacatcatcaccaccaccaccatactccccacccagctgtcccagtttctccttcctttagtgatcctgcttgccctgtggaaagacctccacaagtacaagcaccttgtggagcaaatagtagttctggtaccagctatcatgaacagcaggcattgccagtggacctgagcaacagtggtatcagaagtcatggaagtggcagttttcatggagcatctgcatttgacccctgctgccctgtttcttcctcccgagctgcaatctttggccatcaggccgctgctgctgccccaagtcaacctttatcatcaatagatggctatggatcaagcatggttgcgcagccccagccccagccccctccacagccctctctctcatcatgtcgacattacatgccacccccttatgcctctttgacaaggccacttcatcatcaagcttctgcctgcccgcattctcatggaaacccccctcctcagactcagcctccgcctcaagtggattatgttattcctcatcctgtacatgctttccattctcaaatatcttctcatgcaacatctcatcctgtggcacccccaccaccaactcacttagccagtacagctgcaccaatccctcagcatcttcctcctacacaccagccaatttcgcaccatattccagccacagcacctccagcacagagactgcatcctcatgaagtgatgcagaggatggaagttcaaaggaggaggatgatgcagcatccaactggtctttttgtgttctgtgtttccaggcgggcacatgaacgccccccaccccatccacataggatgcacccaaactatggtcatgggcatcatattcatgtgcctcagactatgtcctcacatcctcgacaggctccagagaggtctgcctgggaactgggaattgaagctggagtgactgcagctacttatacacctggtgcattgcatcctcacttggcccattatcacgcacctcctcgacttcatcacttacaattaggagctcttcctttaatggttcctgatatggcaggctatcctcacatccgttacatttcatcaggattggatggaacatcattcagaggtcctttcaggggcaattttgaggaactgattcatttggaagaaagattaggcaatgtcaatcgtggagcatcccaggggacaattgaaagatgtacatatccacataaatacaaaaaggtaacaactgattggttctcacagaggaaactgcactgcaaacaagatggggaagaagggactgaggaagacacagaggaaaaatgtactatctgtttgtctattttagaggaaggtgaagatgtgagacgtcttccatgtatgcaccttttccaccaagtgtgtgttgaccaatggttgattaccaataagaagtgccccatatgcagagtggacattgaggcccagctgccaagtgaaagttgacaccatgtttcagaactcttgccctccctctcattcccatccttcctggtactgcagtcaaccaaagatggcatgacttacctgcgcagatttggaagcattgaacttagagtgctggctctgctatatggtacaactaatgctagacctacagtttatgtatacagttgattttgatgtatttataaaagcttttttttctagatttgacatttttctgtatcattttactgtatttttgcatggttccttgtattgcatttctttgcacatattatgggcttgtgaccctaaacttgcaggcaaggttagctgctttagtaagtagaattttgtggtctttttgttttttacatagtaccaagccttgataattatgaattttttatccattactaacctttaatttaatcaatcatgtactttagtttaatgtataaagatcctctagaaaatgataatattgtgtattaagacattccttaattaggacaaaatggctgctgtatatttactatatggagttctgagttaaataccatccttaatactgggaacagaatacaacccatataaatcagatgcaggtggtagtcacatcaccagagtgatcagtataaattttcttggtgtatccttttcctttcaacacagtgcagataagagttgaatattgatatcatacatttagactgctgttctgattgcatttatctttttcctacatcatttagaattttatttccctgattcagtttttgctgctgtgaaacagctctgatgaacactaaatattaatttcaattagctagattgtacatacttgcagatttaacaaaattttagggaaattgaaaaagacatgtagaatttgttgtcttctgctaagcacgaaaagttaagatatctgcttacattgattttgtagacacattaagtcaagatttggaatttaagtcactggcaggtatctgtgcattcatagaacttataaaggtcccaggatcacttttaagggatttttattagtttaaaggtaaataaagtcagctgaatctacatgtctcttgttttatttctctctaaacttgaaaacagtaaatctgcagatactgtgaggcacaaattatactgtcaacctactgttgctatggttatatactcccacttcatacattaccaagagtcgatcactgatttaaaatttttaatttctatagttaagatttactgcataatatagaatataaagttaagttaacatactaacatttctcctttggaggaagttttaatctacttcaggatgcatattattatcaagatactttcatatacaggatagcctaattttatttgtttaaatatgcttaatatgccccagattgcaaatgcatccagtcagtaatatcactgtctgtatgtggaggacatgttcccatggatcatatgtgaagatgtcaataagcttgcattaagccacctgctttgtaagtggattgattaataaataacttatatttctattgtctttgtgtttcataattagtttttataaaaacagtttacattaaacatcttggaattcaacaatagtgatctcactcaaattgacatttgcataatttgacatttatattcattcagttatgactacttgcccttttcttcatattagtaaatgttacactgtagtagttgtcaatgttaacaggcttcaacatagtatgtgtgcagatggacgatggatttaaagagcataccttatgattaaaccgaggttatagaaggtcaggggagagtgaaggagtcagtgacctatgtctgccatcttactggggaaaagagcaagtagcctgtcttcctttaagtaagtagcctgtaatggatgtactactttgccactggaataccccgggtctgtgccaagggactgaagaagtgtaagatggggagaactgtatgtcatggagtcctcttgacgttcccccagatacaagtaaagcacaggtggatttctctatttttgaatactacatcagatttagatgcacgactacctgttgacttgttttataattgctactgatttttttaatgtaggcaaagctttgttactttgaaatttatttaataaaagtatttgtgac

SEQ ID NO: 293599 - DNA, 4803 bp, Artificial Sequence
  derived and/or modified sequence
tggaggggagaaagaggaagggctgcggccgcggaaggctggggtcggtgaccggccggttatctctggctcggtggtgacttagggtctgggtctccgcagacgatttgtgtttgggcaaggcattcgtctaccgacacacccacagcctacagtgagggagtgtgggtgaggggatttctctcccacttccgactctccctagagtctcaggatgggggctgaggaccgaggcgtgggagtgcgatttgacaatggagtgatgaaggctttccttaaagtttcccatgtctcaatggactcctgaatataacgagctctacaccttaaaagtggatatgaagagtgagattccttctgatgcaccaaagacacaggagagtctgaaagggatccttttgcatccagagcccattggggcagccaaaagttttcctgcaggagttgagatgattaatagtaaagtggggaatgaattctctcacctgtgtgatgattctcaaaagcaagagaaggaaatgaatggtaaccagcaagaacaagaaaaaagtctcgttgtgaggaaaaaacgcaaaagccagcaggctggcccttcgtatgtgcagaattgtgttaaagaaaaccagggaatattaggactgaggcaacacctagggacaccaagtgatgaagataatgattcctcttttagtgattgtctttcttctccttcatctagtctgcattttggagattctgatactgtgacttcagatgaggataaagaagtctctgtaagacattcccagaccattttgaatgctaaaagtagaagccatagtgcacggtctcataagtggcctcggactgagacagaatctgtatcgggattgttaatgaaaagaccctgtttacatggcagttcgttacggagacttccatgcagaaagagatttgtaaaaaataattcctcacagaggacacagaaacaaaaagagaggatattaatgcagaggaagaaacgagaagtgttagctcgaagaaaatatgccttgctacctagttctagtagttccagtgagaatgacctcagcagtgaatcctcttctagctcatcaactgaaggagaagaagatttgtttgtttctgccagtgaaaaccaccaaaacaatccagctgttccctcaggaagtattgatgaagatgttgtggtgatagaagcttcctccactccccaggttactgccaatgaagaaattaatgttacctcaactgacagtgaagtggagattgtaacagttggagaaagctatcggtctcgttcaacccttggacactccagatctcattggagccagggttccagttctcatgcaagtcggccacaggagccacggaaccgcagtaggatttctactgttatacagcccttgaggcagaatgcagcagaagttgtggaccttaccgttgatgaagatgaacctactgtagtaccaaccacttctgcaagaatggaatcacaagctactagcgcttccattaacaattcaaatccatctacctctgagcaggcctctgatactgcttcagctgtcaccagtagccaaccttccacagtgtcagagacttcagctactcttacaagcaatagtaccactggcacttctataggagatgactcaaggagaactacatctagtgctgtaacggaaactggccctcctgcaatgccaaggttaccttcctgctgtccccagcactcaccatgtggagggtcgtcacagaaccaccatgcattaggacatcctcatacaagttgctttcagcagcatggtcaccattttcaacatcatcaccaccaccaccatactccccacccagctgtcccagtttctccttcctttagtgatcctgcttgccctgtggaaagacctccacaagtacaagcaccttgtggagcaaatagtagttctggtaccagctatcatgaacagcaggcattgccagtggacctgagcaacagtggtatcagaagtcatggaagtggcagttttcatggagcatctgcatttgacccctgctgccctgtttcttcctcccgagctgcaatctttggccatcaggccgctgctgctgccccaagtcaacctttatcatcaatagatggctatggatcaagcatggttgcgcagccccagccccagccccctccacagccctctctctcatcatgtcgacattacatgccacccccttatgcctctttgacaaggccacttcatcatcaagcttctgcctgcccgcattctcatggaaacccccctcctcagactcagcctccgcctcaagtggattatgttattcctcatcctgtacatgctttccattctcaaatatcttctcatgcaacatctcatcctgtggcacccccaccaccaactcacttagccagtacagctgcaccaatccctcagcatcttcctcctacacaccagccaatttcgcaccatattccagccacagcacctccagcacagagactgcatcctcatgaagtgatgcagaggatggaagttcaaaggaggaggatgatgcagcatccaacgcgggcacatgaacgccccccaccccatccacataggatgcacccaaactatggtcatgggcatcatattcatgtgcctcagactatgtcctcacatcctcgacaggctccagagaggtctgcctgggaactgggaattgaagctggagtgactgcagctacttatacacctggtgcattgcatcctcacttggcccattatcacgcacctcctcgacttcatcacttacaattaggagctcttcctttaatggttcctgatatggcaggctatcctcacatccgttacatttcatcaggattggatggaacatcattcagaggtcctttcaggggcaattttgaggaactgattcatttggaagaaagattaggcaatgtcaatcgtggagcatcccaggggacaattgaaagatgtacatatccacataaatacaaaaaggtaacaactgattggttctcacagaggaaactgcactgcaaacaagatggggaagaagggactgaggaagacacagaggaaaaatgtactatctgtttgtctattttagaggaaggtgaagatgtgagacgtcttccatgtatgcaccttttccaccaagtgtgtgttgaccaatggttgattaccaataagaagtgccccatatgcagagtggacattgaggcccagctgccaagtgaaagttgacaccatgtttcagaactcttgccctccctctcattcccatccttcctggtactgcagtcaaccaaagatggcatgacttacctgcgcagatttggaagcattgaacttagagtgctggctctgctatatggtacaactaatgctagacctacagtttatgtatacagttgattttgatgtatttataaaagcttttttttctagatttgacatttttctgtatcattttactgtatttttgcatggttccttgtattgcatttctttgcacatattatgggcttgtgaccctaaacttgcaggcaaggttagctgctttagtaagtagaattttgtggtctttttgttttttacatagtaccaagccttgataattatgaattttttatccattactaacctttaatttaatcaatcatgtactttagtttaatgtataaagatcctctagaaaatgataatattgtgtattaagacattccttaattaggacaaaatggctgctgtatatttactatatggagttctgagttaaataccatccttaatactgggaacagaatacaacccatataaatcagatgcaggtggtagtcacatcaccagagtgatcagtataaattttcttggtgtatccttttcctttcaacacagtgcagataagagttgaatattgatatcatacatttagactgctgttctgattgcatttatctttttcctacatcatttagaattttatttccctgattcagtttttgctgctgtgaaacagctctgatgaacactaaatattaatttcaattagctagattgtacatacttgcagatttaacaaaattttagggaaattgaaaaagacatgtagaatttgttgtcttctgctaagcacgaaaagttaagatatctgcttacattgattttgtagacacattaagtcaagatttggaatttaagtcactggcaggtatctgtgcattcatagaacttataaaggtcccaggatcacttttaagggatttttattagtttaaaggtaaataaagtcagctgaatctacatgtctcttgttttatttctctctaaacttgaaaacagtaaatctgcagatactgtgaggcacaaattatactgtcaacctactgttgctatggttatatactcccacttcatacattaccaagagtcgatcactgatttaaaatttttaatttctatagttaagatttactgcataatatagaatataaagttaagttaacatactaacatttctcctttggaggaagttttaatctacttcaggatgcatattattatcaagatactttcatatacaggatagcctaattttatttgtttaaatatgcttaatatgccccagattgcaaatgcatccagtcagtaatatcactgtctgtatgtggaggacatgttcccatggatcatatgtgaagatgtcaataagcttgcattaagccacctgctttgtaagtggattgattaataaataacttatatttctattgtc

SEQ ID NO: 293600 - DNA, 5278 bp, Artificial Sequence
  derived and/or modified sequence
ctgaggcgcagatcgctggctctcgacgcattactctttacgccttacatttctgtcttccttcctgggtcagtgattcccggaccctggaagagaagagggtggctaatgattaaggctttccttaaagtttcccatgtctcaatggactcctgaatataacgagctctacaccttaaaagtggatatgaagagtgagattccttctgatgcaccaaagacacaggagagtctgaaagggatccttttgcatccagagcccattggggcagccaaaagttttcctgcaggagttgagatgattaatagtaaagtggggaatgaattctctcacctgtgtgatgattctcaaaagcaagagaaggaaatgaatggtaaccagcaagaacaagaaaaaagtctcgttgtgaggaaaaaacgcaaaagccagcaggctggcccttcgtatgtgcagaattgtgttaaagaaaaccagggaatattaggactgaggcaacacctagggacaccaagtgatgaagataatgattcctcttttagtgattgtctttcttctccttcatctagtctgcattttggagattctgatactgtgacttcagatgaggataaagaagtctctgtaagacattcccagaccattttgaatgctaaaagtagaagccatagtgcacggtctcataagtggcctcggactgagacagaatctgtatcgggattgttaatgaaaagaccctgtttacatggcagttcgttacggagacttccatgcagaaagagatttgtaaaaaataattcctcacagaggacacagaaacaaaaagagaggatattaatgcagaggaagaaacgagaagtgttagctcgaagaaaatatgccttgctacctagttctagtagttccagtgagaatgacctcagcagtgaatcctcttctagctcatcaactgaaggagaagaagatttgtttgtttctgccagtgaaaaccaccaaaacaatccagctgttccctcaggaagtattgatgaagatgttgtggtgatagaagcttcctccactccccaggttactgccaatgaagaaattaatgttacctcaactgacagtgaagtggagattgtaacagttggagaaagctatcggtctcgttcaacccttggacactccagatctcattggagccagggttccagttctcatgcaagtcggccacaggagccacggaaccgcagtaggatttctactgttatacagcccttgaggcagaatgcagcagaagttgtggaccttaccgttgatgaagatgaacctactgtagtaccaaccacttctgcaagaatggaatcacaagctactagcgcttccattaacaattcaaatccatctacctctgagcaggcctctgatactgcttcagctgtcaccagtagccaaccttccacagtgtcagagacttcagctactcttacaagcaatagtaccactggcacttctataggagatgactcaaggagaactacatctagtgctgtaacggaaactggccctcctgcaatgccaaggttaccttcctgctgtccccagcactcaccatgtggagggtcgtcacagaaccaccatgcattaggacatcctcatacaagttgctttcagcagcatggtcaccattttcaacatcatcaccaccaccaccatactccccacccagctgtcccagtttctccttcctttagtgatcctgcttgccctgtggaaagacctccacaagtacaagcaccttgtggagcaaatagtagttctggtaccagctatcatgaacagcaggcattgccagtggacctgagcaacagtggtatcagaagtcatggaagtggcagttttcatggagcatctgcatttgacccctgctgccctgtttcttcctcccgagctgcaatctttggccatcaggccgctgctgctgccccaagtcaacctttatcatcaatagatggctatggatcaagcatggttgcgcagccccagccccagccccctccacagccctctctctcatcatgtcgacattacatgccacccccttatgcctctttgacaaggccacttcatcatcaagcttctgcctgcccgcattctcatggaaacccccctcctcagactcagcctccgcctcaagtggattatgttattcctcatcctgtacatgctttccattctcaaatatcttctcatgcaacatctcatcctgtggcacccccaccaccaactcacttagccagtacagctgcaccaatccctcagcatcttcctcctacacaccagccaatttcgcaccatattccagccacagcacctccagcacagagactgcatcctcatgaagtgatgcagaggatggaagttcaaaggaggaggatgatgcagcatccaactggtctttttgtgttctgtgtttccaggcgggcacatgaacgccccccaccccatccacataggatgcacccaaactatggtcatgggcatcatattcatgtgcctcagactatgtcctcacatcctcgacaggctccagagaggtctgcctgggaactgggaattgaagctggagtgactgcagctacttatacacctggtgcattgcatcctcacttggcccattatcacgcacctcctcgacttcatcacttacaattaggagctcttcctttaatggttcctgatatggcaggctatcctcacatccgttacatttcatcaggattggatggaacatcattcagaggtcctttcaggggcaattttgaggaactgattcatttggaagaaagattaggcaatgtcaatcgtggagcatcccaggggacaattgaaagatgtacatatccacataaatacaaaaagaggaaactgcactgcaaacaagatggggaagaagggactgaggaagacacagaggaaaaatgtactatctgtttgtctattttagaggaaggtgaagatgtgagacgtcttccatgtatgcaccttttccaccaagtgtgtgttgaccaatggttgattaccaataagaagtgccccatatgcagagtggacattgaggcccagctgccaagtgaaagttgacaccatgtttcagaactcttgccctccctctcattcccatccttcctggtactgcagtcaaccaaagatggcatgacttacctgcgcagatttggaagcattgaacttagagtgctggctctgctatatggtacaactaatgctagacctacagtttatgtatacagttgattttgatgtatttataaaagcttttttttctagatttgacatttttctgtatcattttactgtatttttgcatggttccttgtattgcatttctttgcacatattatgggcttgtgaccctaaacttgcaggcaaggttagctgctttagtaagtagaattttgtggtctttttgttttttacatagtaccaagccttgataattatgaattttttatccattactaacctttaatttaatcaatcatgtactttagtttaatgtataaagatcctctagaaaatgataatattgtgtattaagacattccttaattaggacaaaatggctgctgtatatttactatatggagttctgagttaaataccatccttaatactgggaacagaatacaacccatataaatcagatgcaggtggtagtcacatcaccagagtgatcagtataaattttcttggtgtatccttttcctttcaacacagtgcagataagagttgaatattgatatcatacatttagactgctgttctgattgcatttatctttttcctacatcatttagaattttatttccctgattcagtttttgctgctgtgaaacagctctgatgaacactaaatattaatttcaattagctagattgtacatacttgcagatttaacaaaattttagggaaattgaaaaagacatgtagaatttgttgtcttctgctaagcacgaaaagttaagatatctgcttacattgattttgtagacacattaagtcaagatttggaatttaagtcactggcaggtatctgtgcattcatagaacttataaaggtcccaggatcacttttaagggatttttattagtttaaaggtaaataaagtcagctgaatctacatgtctcttgttttatttctctctaaacttgaaaacagtaaatctgcagatactgtgaggcacaaattatactgtcaacctactgttgctatggttatatactcccacttcatacattaccaagagtcgatcactgatttaaaatttttaatttctatagttaagatttactgcataatatagaatataaagttaagttaacatactaacatttctcctttggaggaagttttaatctacttcaggatgcatattattatcaagatactttcatatacaggatagcctaattttatttgtttaaatatgcttaatatgccccagattgcaaatgcatccagtcagtaatatcactgtctgtatgtggaggacatgttcccatggatcatatgtgaagatgtcaataagcttgcattaagccacctgctttgtaagtggattgattaataaataacttatatttctattgtctttgtgtttcataattagtttttataaaaacagtttacattaaacatcttggaattcaacaatagtgatctcactcaaattgacatttgcataatttgacatttatattcattcagttatgactacttgcccttttcttcatattagtaaatgttacactgtagtagttgtcaatgttaacaggcttcaacatagtatgtgtgcagatggacgatggatttaaagagcataccttatgattaaaccgaggttatagaaggtcaggggagagtgaaggagtcagtgacctatgtctgccatcttactggggaaaagagcaagtagcctgtcttcctttaagtaagtagcctgtaatggatgtactactttgccactggaataccccgggtctgtgccaagggactgaagaagtgtaagatggggagaactgtatgtcatggagtcctcttgacgttcccccagatacaagtaaagcacaggtggatttctctatttttgaatactacatcagatttagatgcacgactacctgttgacttgttttataattgctactgatttttttaatgtaggcaaagctttgttactttgaaatttatttaataaaagtatttgtgacataa

SEQ ID NO: 293601 - DNA, 541 bp, Artificial Sequence
  derived and/or modified sequence
agcagatgctggagctgctggtgctggagcagtttctgagcgcgctgccagccgacacgcaggcctgggtgtgcagccgtcagccgctaagctgggaggaggcggtggccctgctggaagagttctgggctttccttaaagtttcccatgtctcaatggactcctgaatataacgagctctacaccttaaaagtggatatgaagagtgagattccttctgatgcaccaaagacacaggagagtctgaaagggatccttttgcatccagagcccattggggcagccaaaagttttcctgcaggagttgagatgattaatagtaaagtggggaatgaattctctcacctgtgtgatgattctcaaaagcaagagaaggaaatgaatggtaaccagcaagaacaagaaaaaagtctcgttgtgaggaaaaaacgcaaaagccagcaggctggcccttcgtatgtgcagaattgtgttaaagaaaaccagggaatattaggactgaggcaacacctagggacaccaagtgatgaagataatgatt

SEQ ID NO: 293602 - DNA, 3012 bp, Artificial Sequence
  derived and/or modified sequence
atgagccagtggacccccgagtacaacgagctgtacaccctgaaggtggacatgaagagcgagatccccagcgacgcccccaagacccaggagagcctgaagggcatcctgctgcaccccgagcccatcggcgccgccaagagcttccccgccggcgtggagatgatcaacagcaaggtgggcaacgagttcagccacctgtgcgacgacagccagaagcaggagaaggagatgaacggcaaccagcaggagcaggagaagagcctggtggtgagaaagaagagaaagagccagcaggccggccccagctacgtgcagaactgcgtgaaggagaaccagggcatcctgggcctgagacagcacctgggcacccccagcgacgaggacaacgacagcagcttcagcgactgcctgagcagccccagcagcagcctgcacttcggcgacagcgacaccgtgaccagcgacgaggacaaggaggtgagcgtgagacacagccagaccatcctgaacgccaagagcagaagccacagcgccagaagccacaagtggcccagaaccgagaccgagagcgtgagcggcctgctgatgaagagaccctgcctgcacggcagcagcctgagaagactgccctgcagaaagagattcgtgaagaacaacagcagccagagaacccagaagcagaaggagagaatcctgatgcagagaaagaagagagaggtgctggccagaagaaagtacgccctgctgcccagcagcagcagcagcagcgagaacgacctgagcagcgagagcagcagcagcagcagcaccgagggcgaggaggacctgttcgtgagcgccagcgagaaccaccagaacaaccccgccgtgcccagcggcagcatcgacgaggacgtggtggtgatcgaggccagcagcaccccccaggtgaccgccaacgaggagatcaacgtgaccagcaccgacagcgaggtggagatcgtgaccgtgggcgagagctacagaagcagaagcaccctgggccacagcagaagccactggagccagggcagcagcagccacgccagcagaccccaggagcccagaaacagaagcagaatcagcaccgtgatccagcccctgagacagaacgccgccgaggtggtggacctgaccgtggacgaggacgagcccaccgtggtgcccaccaccagcgccagaatggagagccaggccaccagcgccagcatcaacaacagcaaccccagcaccagcgagcaggccagcgacaccgccagcgccgtgaccagcagccagcccagcaccgtgagcgagaccagcgccaccctgaccagcaacagcaccaccggcaccagcatcggcgacgacagcagaagaaccaccagcagcgccgtgaccgagaccggcccccccgccatgcccagactgcccagctgctgcccccagcacagcccctgcggcggcagcagccagaaccaccacgccctgggccacccccacaccagctgcttccagcagcacggccaccacttccagcaccaccaccaccaccaccacaccccccaccccgccgtgcccgtgagccccagcttcagcgaccccgcctgccccgtggagagacccccccaggtgcaggccccctgcggcgccaacagcagcagcggcaccagctaccacgagcagcaggccctgcccgtggacctgagcaacagcggcatcagaagccacggcagcggcagcttccacggcgccagcgccttcgacccctgctgccccgtgagcagcagcagagccgccatcttcggccaccaggccgccgccgccgcccccagccagcccctgagcagcatcgacggctacggcagcagcatggtggcccagccccagccccagccccccccccagcccagcctgagcagctgcagacactacatgccccccccctacgccagcctgaccagacccctgcaccaccaggccagcgcctgcccccacagccacggcaacccccccccccagacccagccccccccccaggtggactacgtgatcccccaccccgtgcacgccttccacagccagatcagcagccacgccaccagccaccccgtggccccccccccccccacccacctggccagcaccgccgcccccatcccccagcacctgccccccacccaccagcccatcagccaccacatccccgccaccgccccccccgcccagagactgcacccccacgaggtgatgcagagaatggaggtgcagagaagaagaatgatgcagcaccccaccggcctgttcgtgttctgcgtgagcagaagagcccacgagagaccccccccccacccccacagaatgcaccccaactacggccacggccaccacatccacgtgccccagaccatgagcagccaccccagacaggcccccgagagaagcgcctgggagctgggcatcgaggccggcgtgaccgccgccacctacacccccggcgccctgcacccccacctggcccactaccacgccccccccagactgcaccacctgcagctgggcgccctgcccctgatggtgcccgacatggccggctacccccacatcagatacatcagcagcggcctggacggcaccagcttcagaggccccttcagaggcaacttcgaggagctgatccacctggaggagagactgggcaacgtgaacagaggcgccagccagggcaccatcgagagatgcacctacccccacaagtacaagaaggtgaccaccgactggttcagccagagaaagctgcactgcaagcaggacggcgaggagggcaccgaggaggacaccgaggagaagtgcaccatctgcctgagcatcctggaggagggcgaggacgtgagaagactgccctgcatgcacctgttccaccaggtgtgcgtggaccagtggctgatcaccaacaagaagtgccccatctgcagagtggacatcgaggcccagctgcccagcgagagctag

SEQ ID NO: 293603 - DNA, 3012 bp, Artificial Sequence
  derived and/or modified sequence
atgtctcagtggacgcctgagtacaatgagttgtatacccttaaggttgacatgaaaagcgaaatcccatcggacgctccaaagacccaggagagcttgaagggaattcttcttcaccccgagcctataggcgctgcaaagagcttcccagctggtgtggaaatgatcaatagcaaagtgggtaatgagttcagtcacctctgtgacgattcgcagaaacaggagaaagaaatgaacggaaaccagcaggagcaagagaagtccctggtcgtgaggaagaagaggaagagccaacaggctggcccctcttatgtgcagaattgcgttaaagagaaccaagggattctgggactgagacaacacttagggacaccttctgacgaagataacgactcgtctttctctgactgtctgagtagccccagctctagcctgcatttcggggattctgataccgtaacctcagacgaggacaaggaagtgtcagtaaggcactctcagacaatccttaacgcaaagtcacgatcgcacagtgccagatctcataaatggcccagaacagagactgaaagcgtgtctggactcttaatgaagcgcccatgcttgcacgggtccagcctgagacgattgccttgccggaaaaggtttgtgaaaaataattcttcacagcggactcagaagcagaaggaaagaattctgatgcagagaaaaaaacgtgaggtactagccagacgcaaatacgccctgctcccctcgtcatcttctagttccgaaaatgatctcagcagtgaatcatcctcatccagcagcaccgaaggcgaagaggacctgtttgtatcagcttctgaaaatcatcagaacaatcccgccgtcccttccggttcaatagatgaagacgtggtagtgatcgaagcaagttccaccccacaagtgacagctaatgaggagattaatgtgacatcaacagactccgaggtcgagatcgttacagtgggtgaatcctaccgcagccggagcaccttggggcattcgaggtcacactggagccaggggagttcctctcacgcctcacgcccacaggaacctcgcaatcggagccggatcagcacagtaatccagcctttgcgtcagaatgccgctgaggtcgtcgacctgacagtcgacgaagacgagccgaccgtcgtcccgactaccagcgcacgcatggaaagtcaagccacttctgcctctatcaataacagtaacccgagcaccagcgaacaggcaagtgacacggcttcggccgtgacgagtagccaacccagcacagtgagcgaaacctccgccactctgacatccaacagtaccactggaaccagcatcggcgatgattcccgacgcaccacttcatccgccgttaccgaaaccggccctcccgcgatgcccaggttaccaagctgttgtccacaacatagcccttgcggcggttcctctcagaatcaccacgctctcggccatcctcatactagttgcttccagcagcacggacatcattttcaacatcaccaccatcaccatcataccccccatcctgctgtccctgtttcaccttccttctctgaccctgcctgtcctgtcgagcgacctcctcaggtccaggccccttgcggcgccaacagcagctcggggacctcatatcatgagcagcaggcgctgcctgtggatctatcaaattcaggcatccgtagtcacggcagtggctccttccacggagcctctgcattcgacccatgctgtcccgtgagttcaagtcgggccgcaatctttgggcatcaggccgccgctgctgcaccatcccaacctttgagctcaattgatggctacggttcctcgatggtggcacagccgcaaccacaaccaccccctcagccaagtctgtcctcatgtcgccactatatgccacctccctacgcttccctcaccagacccctgcaccaccaggcttctgcttgtccccattcccacgggaaccctcctccccagacacagccgccgccgcaggtggactacgtgatcccacaccctgtgcacgcatttcatagccagatctccagccacgccacgagtcatcccgttgctcctcctccacccacacatctggcctcaacagccgcgcccatccctcaacatctgccaccaacgcaccagcccatttcccatcacatccccgccaccgcccccccggctcagaggcttcatcctcatgaggtcatgcagcggatggaagtgcagaggcgcagaatgatgcagcatcccaccggcctctttgtcttctgtgttagcagacgtgctcatgaacgacccccaccgcatccccaccggatgcaccctaactacggccacggccaccacatacatgtacctcagactatgtcctcacaccccaggcaggcacctgaacgttcggcatgggagctgggcatcgaggcgggtgtaactgctgcaacctacacacctggtgctctccacccccatctggctcactaccatgcccctccccgactccatcatctccagctgggagccttgccactgatggttcccgatatggctggctacccgcacattcgctatatctctagtggcctggatggtacttccttccgaggcccattcagaggaaatttcgaggaactgatccacctggaagagaggcttgggaatgtcaatcgtggagcgtcacagggcacgatcgaacgttgtacgtaccctcacaagtataagaaagttaccacagattggtttagccagagaaaactgcactgcaaacaggacggcgaagagggaacggaggaggacactgaggaaaagtgtacaatttgcctgagcattttggaagaaggggaggatgtgcgcagattgccgtgcatgcacttgttccatcaggtgtgcgtggaccagtggctgatcactaacaagaaatgccccatatgtagagttgacatcgaggcacagctgccctcagagtcatag

SEQ ID NO: 293604 - DNA, 3012 bp, Artificial Sequence
  derived and/or modified sequence
atgtcgcagtggacgcccgagtacaatgagctgtacaccctcaaggtggatatgaaaagcgaaatcccctccgatgcccccaagacgcaagagagtttaaaaggcattttactacatcctgaacctatcggcgctgcgaaatccttccccgccggcgtggaaatgataaattccaaggttggcaatgagttctcccacttgtgcgatgactcccagaaacaagaaaaggagatgaacggcaaccaacaggaacaggagaagtcactcgtggtgcgcaagaagaggaagagccagcaagctggaccgagttatgtacaaaattgcgtcaaggagaaccaggggatcctgggacttcggcaacacctggggaccccaagcgatgaggataacgacagttccttttctgactgtttatcatcccccagttccagtctgcattttggcgattctgataccgtcactagcgatgaggacaaggaggtgagtgtacggcactcccaaaccattttgaacgctaagtcaaggtctcacagcgccaggtcacacaagtggccccgcaccgaaactgagtcagtatctggcctactgatgaaaaggccgtgcctgcacggatcttcactccggcggctaccttgccgaaagcggtttgtgaaaaacaattccagccagagaacacaaaagcagaaggagcgtattttaatgcaaaggaaaaaaagagaagtgctcgcacgacgcaagtacgcactgctgccatcctcttcatcttccagcgagaacgacctgtccagtgagtcctctagttcaagctcgaccgagggtgaggaggatctgtttgtgagcgccagcgaaaaccaccaaaacaatcctgccgtcccttcaggttcgatcgacgaagacgtggtcgtcatagaggccagcagcactccgcaagtcacggctaacgaagagattaacgtgacctcaacagactctgaagtcgagatcgtcacggtgggcgagtcctatcgaagtcgttctacactcggtcactctcgaagccactggtcacaagggtcttcttcacacgcatctcggccccaggaaccccgtaatagatcccgcatatcaacggtgatccagccactgcgacagaatgcggccgaggtggttgatctcacagtcgatgaggacgagcccaccgtagtaccgacaacttccgcccggatggagagccaggcaacctcggcctccataaacaacagtaacccgtctacttccgaacaggcaagcgacaccgcatccgccgtgactagtagccagccttccacagtaagcgaaacttcagcaacactaacgtctaattctacaacaggcacatcaatcggtgacgacagtagacgcacaaccagcagcgcagtaaccgaaactggccctcctgccatgccccggctgccttcttgctgcccccagcattccccctgcggaggaagtagtcaaaatcatcacgcactgggccatccccacaccagctgctttcaacagcatgggcaccacttccaacatcatcaccatcatcatcacacaccacaccctgcagtccctgtgagcccgtccttcagcgaccccgcatgcccggtagaacgcccaccccaggtacaggcaccttgtggagccaatagctcatccgggacttcataccacgagcagcaggcactcccagtggatctaagcaactctggcatccgatctcatgggagcgggagcttccatggagcatctgccttcgatccttgctgtccagttagttcctccagggctgctattttcgggcaccaggcagccgctgccgcgccaagtcagccgttgtcttctattgatggatacggatctagcatggtggcacaacctcagccccagcccccaccgcagccttccctgagttcctgcagacactatatgcctcccccgtatgccagcttgacaaggcccttgcaccaccaggcctccgcctgcccacattcacatggaaaccctcctccacaaacacagccccctccgcaggtcgattacgtgatcccccacccagtccatgcattccactcacagattagctctcacgccaccagtcacccggttgcgcctcctcctcctacccacctggcgtccacagcggccccgattccccagcacctgccaccaacccaccagccaatttctcatcatatcccagccaccgcacctccagctcagagacttcatccacacgaggttatgcaaagaatggaggtccagcgcagacggatgatgcagcaccccacaggactcttcgttttttgcgtatctcgacgggcccatgaaagacccccgcctcacccacacaggatgcaccctaattatgggcatggacaccatatacacgttccccagaccatgagctcacaccctagacaggcccccgaacgtagtgcttgggagcttgggatcgaggccggcgtgaccgcagctacatacactcccggagcgctgcatcctcatctggcgcactaccacgcacccccaagactccaccatctgcaacttggagcgttgccactcatggttccggacatggcagggtacccccacattcgctatatttctagcgggctggatggcacctctttccgcggcccttttaggggtaattttgaggaattgattcaccttgaggagcgtctcggcaatgtgaatcgtggggcatcccaaggaaccattgagaggtgtacttacccccacaaatacaagaaggtcaccaccgactggttctctcaaaggaagctgcattgcaagcaggatggtgaagagggtactgaggaggacaccgaagagaaatgcacaatttgtttgagcatcttggaggaaggcgaggacgtgaggcggttaccatgcatgcacctgtttcaccaggtgtgcgtggatcaatggctgattacgaacaagaaatgtcccatctgtagggtcgacatcgaggcccagctaccaagtgagtcctag

SEQ ID NO: 293605 - DNA, 3012 bp, Artificial Sequence
  derived and/or modified sequence
atgagccagtggaccccagagtacaatgagctgtacaccctgaaggtggacatgaagtctgagatccccagtgatgcccccaagacccaggagagcctgaagggcatcctgctgcaccctgagcccatcggggccgccaagagcttccctgctggggtggagatgatcaacagcaaggtgggcaatgagttcagccacctgtgtgatgacagccagaagcaggagaaggagatgaatggaaaccagcaggagcaggagaagagcctggtggtgaggaagaagaggaagagccagcaggccggccccagctatgtgcagaactgtgtgaaggagaaccagggcatcctgggcctgcggcagcacctgggcacccccagtgatgaggacaatgacagcagcttcagtgactgcctgagcagccccagcagcagcctgcactttggagacagcgacacagtgaccagtgatgaggacaaggaggtgtctgtgcgccacagccagaccatcctgaatgccaagagccgcagccacagcgcccggagccacaagtggcccaggacagaaacagaatctgtgtctggcctgctgatgaagaggccctgcctgcacggcagcagcctgcggcggctgccctgcaggaagagatttgtgaagaacaacagcagccagaggacccagaagcagaaggagcgcatcctgatgcagaggaagaagcgggaggtgctggcccggaggaaatatgccctgctgcccagcagcagcagcagcagtgaaaatgacctgagcagcgagagcagcagcagcagcagcacagaaggagaggaggacctgtttgtgtctgccagcgagaaccaccagaacaacccagctgtgcccagcggcagcattgatgaagatgtggtggtgattgaggccagcagcaccccccaggtgacagccaatgaggagatcaacgtgaccagcacagacagcgaggtggagatcgtgacagtgggggagagctaccgcagccgcagcaccctgggccacagccgcagccactggagccagggcagcagcagccacgccagccggccccaggagcccaggaacagaagccgcatcagcaccgtcatccagcccctgcggcagaatgctgctgaggtggtggacctgactgtggatgaagatgagcccaccgtggtgcccaccaccagcgccaggatggagagccaggccaccagcgccagcatcaacaacagcaaccccagcaccagcgagcaggccagtgacacagccagcgctgtgaccagcagccagcccagcacagtgtctgagaccagcgccaccctgaccagcaacagcaccaccggcaccagcattggagatgacagcaggaggaccaccagcagcgctgtgacagaaacaggccccccagccatgccccggctgcccagctgctgcccccagcacagcccctgtggcggcagcagccagaaccaccacgccctgggccacccccacaccagctgcttccagcagcacggccaccacttccagcaccaccaccaccaccaccacaccccccaccctgctgtgcctgtgagccccagcttcagtgaccctgcctgccctgtggagcggcccccccaggtgcaggccccctgtggggccaacagcagcagcggcaccagctaccacgagcagcaggccctgcctgtggacctgagcaacagcggcatccgcagccacggcagcggcagcttccatggagccagcgcctttgacccctgctgccctgtgagcagcagcagagctgccatcttcggccaccaggccgctgctgctgcccccagccagcccctgagcagcattgatggctacggcagctccatggtggcccagccccagccccagcccccaccccagcccagcctgagcagctgccgccactacatgcccccaccctatgccagcctgacccggcccctgcaccaccaggccagcgcctgcccccacagccacggcaaccccccaccccagacccagcccccaccccaggtggactatgtgatcccccaccctgtgcacgccttccacagccagatcagcagccacgccaccagccaccctgtggcccctcctccacccacccacctggccagcacagctgcccccatcccccagcacctgccccccacccaccagcccatcagccaccacatcccagccacagcccccccagcccagaggctgcacccccatgaggtgatgcagaggatggaggtgcagaggaggaggatgatgcagcaccccaccggcctgtttgtgttctgtgtgtccagaagagcccacgagcggcccccaccccacccccacaggatgcaccccaactacggccacggccaccacatccacgtgccccagaccatgagcagccacccccggcaggcccctgagaggtctgcctgggagctgggcattgaagctggggtgacagctgccacctacacccctggggccctgcacccccacctggcccactaccacgccccaccccggctgcaccacctgcagctgggcgccctgcccctgatggtgcctgacatggccggctacccccacatccgctacatcagcagcggcctggatggcaccagcttccggggccccttccggggcaactttgaggagctgatccacctggaggagcggctgggcaatgtgaacagaggagccagccagggcaccatcgagcgctgcacctacccccacaagtacaagaaggtgaccacagactggttcagccagaggaagctgcactgcaagcaggatggagaggagggcacagaggaggacacagaggagaagtgcaccatctgcctgagcatcctggaggagggggaggatgtgcggcggctgccctgcatgcacctgttccaccaggtgtgtgtggaccagtggctgatcaccaacaagaagtgccccatctgccgggtggacatcgaggcccagctgcccagcgagagctag

SEQ ID NO: 293606 - DNA, 3012 bp, Artificial Sequence
  derived and/or modified sequence
atgagccagtggacccccgagtacaacgagctgtacaccctgaaggtcgacatgaaaagtgagatcccctcagacgcacccaaaacacaggaatctctgaaaggcatcctgcttcacccagagcctatcggcgctgctaaaagttttccggccggggtcgaaatgatcaattctaaggtcggcaacgagttcagccatctttgcgacgacagccagaaacaagaaaaagaaatgaatgggaatcagcaggagcaggagaagtcattagtggtgcggaagaaaaggaaaagtcagcaggcggggcctagctacgtccaaaactgtgtaaaggagaaccagggcatactgggcctgagacagcacttgggcacaccttccgacgaggataacgattcctccttcagcgactgccttagttccccgtcaagcagtctccatttcggagattccgataccgtgacttccgacgaggacaaagaggtgtccgtacggcattcccagaccattctcaacgccaagtcaaggtctcacagcgctaggtcacataaatggccccggaccgaaaccgagtccgtgtccggtctgcttatgaagagaccttgcctgcacggatcgtcgctgaggcggttgccatgccgcaagcggtttgtcaaaaataatagttcccagaggactcagaaacagaaagagcgcatcctaatgcagagaaagaagcgagaagtgctggctagaagaaaatacgctctgttgccctccagctcctcctcaagtgagaacgacctgtccagcgagagctcgtcctcatcctcgacagagggagaagaggacttgtttgtctcggcatccgagaaccaccagaataatccagcagtcccttctgggagtatagacgaggacgtggtggtcatcgaggcctcttcaactccacaggtaacagcgaacgaggaaatcaatgtgacgagcaccgatagtgaggttgaaatcgtgacggtcggggaatcgtaccggtctcgatctacactggggcactctcgttcccattggagccagggctcgagtagccatgcctctcggccccaggaaccccgcaacagaagccgaatatcgactgtcattcagcctttacgacagaacgcggccgaggtcgttgatctgaccgttgacgaagacgagcctacggttgtccctactacgtcagcccggatggaatcacaagccacgagcgcctccattaacaatagtaatccctccaccagtgagcaagcttccgataccgcgagcgccgtgacaagctcccaaccaagtactgtgagtgagacgtccgcaacccttacctccaatagcactaccggtacctccattggggatgactctcgacggacaaccagtagtgcggttaccgaaacagggcctccagctatgccaaggctccccagttgttgtcctcagcacagtccttgtggcgggtccagtcagaatcatcatgctctcggccacccccacacctcttgtttccagcagcatggccaccacttccagcatcatcaccatcatcaccacacaccacaccctgccgttccagtctctcccagtttttctgacccggcatgccccgtggagcgccccccacaggtccaggcgccatgcggtgctaatagctcgtctggcacctcctaccacgaacagcaggctctgcccgtggacttatccaattctggcatacgttcccatggttcaggcagcttccacggggccagcgcattcgatccctgttgtcccgtcagcagtagccgcgcagccatctttgggcaccaggctgctgcggctgcccccagtcagcccttgagcagcattgacgggtacggcagttccatggtggcgcagccccagccacagcccccaccacagccaagcctgtctagctgtcgacattacatgccccctccctacgcaagtttgacccgcccactgcatcaccaggcctccgcctgccctcactcacatgggaacccgccccctcagacccagcctcctccccaggtggactacgtgatcccccatcccgtgcatgccttccactctcagatctcgtcacatgccacgtctcatccagttgcccccccacctcctactcacctcgcctccacagcagcaccaatccctcagcacctgccgcccacccaccaaccaatttcccaccacattcccgctaccgccccacctgcacagcgacttcacccccacgaagttatgcagaggatggaggtccaaagaagacggatgatgcagcaccctacaggtctcttcgtgttttgtgtgagcagacgggcacacgaaagaccccctccacacccgcaccggatgcaccctaattatggacacggacatcacattcacgtgcctcagacaatgtcaagccacccccgccaagcacccgagagatccgcatgggaactgggtatagaggccggagtgacagccgcaacatatacccccggggcccttcacccgcatctggctcattatcatgcgccccccagactgcaccatctgcagctgggggccctccccctgatggtgccggatatggctggttacccccacattaggtacatttcctctggtctcgatggtacctcgttcagaggtcccttccgcggaaacttcgaggaactcatacacttagaggagcgactgggcaacgtaaacaggggggcgtctcaggggacaattgaaaggtgcacctacccacacaaatataagaaggtgactactgactggtttagtcaacgaaaactgcactgtaaacaagacggcgaggaggggaccgaggaggatacagaggaaaaatgcacaatctgtctgtcaattctggaagaaggtgaggacgtgaggcggcttccttgtatgcatctgttccaccaggtctgtgtcgaccagtggctaatcacgaataaaaagtgtccaatatgccgcgttgacatcgaggcccagttgccatctgagtcttag

SEQ ID NO: 293607 - DNA, 3012 bp, Artificial Sequence
  derived and/or modified sequence
atgagccagtggacccccgagtacaacgagctgtacaccctgaaggtagatatgaagtcagagataccttcagacgctcccaagactcaggagagtttaaaaggcatcctgctgcatccagaacccatcggggcagcgaaatcttttccagctggagtggagatgataaactctaaggtgggcaacgagtttagccatctgtgtgacgattcccagaagcaggaaaaggagatgaatggcaaccagcaagagcaggagaagagccttgtcgttaggaagaaaagaaagtcccagcaggccggaccatcctacgtacaaaactgtgtgaaggagaaccagggcattctaggcctgcggcagcaccttggcaccccttccgacgaggacaatgattccagttttagtgactgcctgtcttcacccagctccagcctgcactttggcgactccgacactgtgaccagcgatgaagacaaggaagtatcagtccgccattcacagaccatcctcaacgcaaagtcacggtcacatagcgctcgctcccacaagtggcctagaaccgagacagagtccgtgtccgggctgctgatgaaacggccatgtctgcatggatcaagtctgcgacgcctgccatgcagaaaacggttcgtcaagaacaatagctcccagaggacccagaaacagaaagagaggattctgatgcagcggaagaaacgtgaggttctggcacggagaaaatacgcattactcccatctagttcatccagttctgagaatgacctgagctcagagtcgtcttcatccagcagcaccgaaggtgaggaagatctttttgttagcgcctccgaaaatcatcaaaataatccggcagtgcccagcggcagcatagatgaggatgtggtcgtgattgaagccagctcgactcctcaggtgacggctaatgaggagatcaatgttacttcgacagacagcgaagtagagattgtaacagtaggcgagagttataggtcgaggtctactcttggccacagccggtcacactggtcccaaggatcgtcttcccatgcgagccgccctcaggagccaaggaacaggtcgcgaatcagtacggtgatccagccattgcggcagaatgccgctgaagtcgtcgacttgactgtagacgaggacgagccaacagttgttccgaccaccagcgcaaggatggaaagccaggccacttctgcgagcatcaacaactcaaacccatcaacaagtgagcaggcctctgataccgccagtgcggttactagctctcagccttccactgtctccgaaacaagcgcaaccctgacatcaaactcaacgactgggacatccatcggcgatgattccaggcgcacgacctcatcagcagtaactgagaccggcccccccgctatgccccgactgccttcttgttgtcctcagcattccccctgcggaggtagttcacaaaaccaccatgcattgggacatcctcacacttcgtgtttccaacagcatggacatcacttccagcaccatcatcatcatcatcatacgccacaccccgctgtacctgtttcgccttctttttccgatcccgcatgtcctgtcgagagacctccccaggtgcaggcgccatgcggcgcgaacagttcatcaggcacaagctaccacgaacagcaagcactgccagtggatctctccaattcaggtatccgatcacacggctccggtagcttccatggcgcttcagccttcgatccatgttgtccagtttcatctagtagggccgcaatcttcggacatcaagcagccgctgccgccccatcacagccactgtcttctatcgacggctatgggtcgagtatggtggctcagccccaacctcagcccccccctcaaccgagcttatcttcttgcagacactacatgcctcctccctatgccagcctgacacggcctctccatcaccaggcttctgcttgcccccactctcatggcaaccctccccctcagactcagcctcccccccaagttgactacgttattccgcatcccgtccacgccttccattcacagattagctcgcatgccacaagccaccccgtcgctccgccgccgccaacgcatctcgcatccaccgccgcccccattcctcagcacctgccgccaactcaccaacccatatcgcaccatatacccgcaactgcacccccggctcaacgcctgcatcctcacgaggtcatgcaacgaatggaggtacagcgacggcgaatgatgcagcaccccacaggcctgttcgtattttgcgtgagcagaagagctcacgagcgtccccccccgcatccccaccgcatgcatcccaattatgggcatggccaccatatacatgtgccccagaccatgagctcccaccctcgccaagcccctgagagatctgcgtgggagctgggtatagaagctggagtgaccgccgctacatacacgcctggtgctctgcacccccacctagcccactaccacgcaccaccccgcttgcaccacttgcagttgggcgccctgcctctcatggtcccagacatggccgggtatcctcacatccggtacattagttctgggttggatggaacatcattcagaggacccttccggggaaattttgaagagctcatccacttagaggaacgactgggcaacgtgaatcgtggagcttctcaaggcacaatcgagcgttgcacctatccacataagtataagaaggtgacaacagactggttctcacaacggaagctgcattgtaaacaggatggcgaggagggaactgaggaggatacggaggagaaatgtaccatttgtctgagtatcctggaggagggggaagacgttaggcgcctcccatgcatgcatctgttccaccaagtctgtgtggatcagtggctcatcacaaacaagaaatgtcctatctgtagggtcgacatagaagcacagctcccatccgaatcctag

SEQ ID NO: 293608 - DNA, 3012 bp, Artificial Sequence
  derived and/or modified sequence
atgtcacagtggactccagagtataacgagctctacacattgaaggtcgatatgaagtccgagattccatccgacgcccctaaaactcaggaatcactgaagggcattctcctccatcctgagccgattggcgctgccaagtccttcccagcaggggttgaaatgataaattcaaaagttggcaatgaattctcccacctctgcgatgactctcagaaacaagagaaagagatgaatggcaatcagcaggagcaggaaaagtctttggtggtgagaaagaaacgcaagtcgcaacaggccggaccaagctatgtgcagaactgtgtgaaagaaaatcaaggcatcttgggtctccgacagcacttgggcaccccgtctgatgaggataacgactcctctttcagtgactgccttagctctccatctagttccctccattttggagattctgataccgtcacatccgatgaggataaagaagtgagcgtgagacatagtcagactatactgaatgccaaatcacgatcacactccgcacgcagccacaagtggccgcgaacagagactgaatcggtgtctgggcttctgatgaagcgaccatgcctacacggcagcagcctgagacgcctgccatgcagaaagaggttcgtaaagaataactctagtcagcgcacccaaaaacagaaagagcgaattctaatgcagcgcaaaaaacgagaagtcctggccagaagaaaatatgccctgttgcccagttcttccagctcctctgagaatgacttgtcttctgaatcgagtagctcctcatctacggagggcgaagaagatctcttcgttagcgcttccgaaaatcatcagaataatcccgctgttccatccggcagcatcgatgaggacgtggtggtcattgaggccagcagtacaccgcaggtgaccgcaaatgaagagattaacgtgacttccacagattctgaggtggaaatagtgactgtaggagaatcttatagatcaagatctactctgggacacagtcggagccattggagccagggtagctccagtcatgcatcgcgcccacaagagccgaggaatagaagcaggatcagtacagtgatccagcccttaaggcaaaacgcggctgaggtcgtagacctcaccgtggatgaggacgaaccaactgtggtgcccactactagtgcccgaatggaatctcaggccactagcgctagtatcaacaacagtaatcccagcactagtgagcaggccagcgacacagccagcgcagttacctcatcccagcctagtaccgtgtccgaaacatccgctacattgacgtcaaacagcaccactggaaccagcatcggagacgattcaagacgtacaacctcttctgccgtgacagaaaccggacccccagccatgccgcgattgccatcatgttgtccgcagcactctccctgcggagggtcctcacaaaaccatcatgcgttaggacacccgcacacaagttgcttccaacagcacggtcaccactttcaacaccatcatcaccaccaccatacccctcacccagctgtgccagtgtcgccttccttctccgaccccgcatgccctgtcgagaggccccctcaggtccaggccccatgcggggcaaactcttcttcaggaactagctaccacgaacagcaagctctacccgtagatctgagtaattcgggtattaggtcccacggttctggatcgttccatggcgcatctgccttcgacccatgctgccccgtgtcaagttcgcgggctgctatcttcggacaccaggcagctgcagccgcaccctcgcagcccctgagtagcatcgacgggtatggctcatccatggtagctcagcctcagccccaacccccacctcagccctccctgtctagttgtcggcattatatgcccccaccttacgccagcctgaccagacccctgcaccaccaggcctccgcgtgcccccattcccatggcaatcctccccctcagacccaacccccacctcaagtcgactacgttataccgcaccctgtgcacgcgttccactctcagataagtagtcacgccacaagtcaccctgtggcccctccaccccctactcatctggcctcaactgctgcaccaattcctcagcatctcccacccacccaccaacccatttctcaccatattcctgctactgctccgccagctcaacggttgcatcctcacgaagtcatgcagagaatggaggtccagagaaggcgaatgatgcagcacccaaccgggctgttcgtgttctgcgtgagccgcagggcgcatgaacggcctccaccgcaccctcacaggatgcaccccaattacggacatggtcaccatattcacgtcccacaaaccatgtcctcccaccctagacaggccccagagaggtcagcctgggagctggggattgaggccggtgtaactgccgctacctacacccctggcgcactccacccccatctcgcccactaccacgctccgccacggttgcaccatctgcagctcggcgctctgcctctcatggtgccagatatggccggatatccacacatcagatacataagctccggactggatgggacgtccttcagagggccttttcggggtaactttgaggagttaattcacctggaagagcgcctgggaaacgtcaatagaggagccagtcaggggaccatcgagaggtgtacgtatccacacaaatacaagaaagtcaccactgattggttcagccagcgaaaactgcattgtaaacaggatggggaggaggggactgaggaggacacagaagagaaatgtacaatttgtctgtccatccttgaggagggtgaagacgtccgcaggttgccttgtatgcacctattccatcaggtttgtgtggaccagtggctgatcacaaataaaaagtgcccaatttgtagagtggacattgaagctcagctgccctcagaatcttag

SEQ ID NO: 293609 - DNA, 3012 bp, Artificial Sequence
  derived and/or modified sequence
atgtcacagtggacccccgagtataatgagctttatactctgaaggtcgatatgaaatccgaaatccccagcgacgcgcctaagacccaagagtctctgaaaggcattctgctgcaccccgagccgattggcgctgccaaatctttcccagccggagtcgaaatgattaactccaaagtaggcaatgagttttcgcacctgtgtgacgacagccaaaaacaggagaaggagatgaacgggaaccaacaggagcaggagaaaagcctggtagtgcgtaagaaacgcaaatcccagcaggccggaccgtcctatgtccagaactgcgtaaaggaaaaccagggcatcctcggccttcggcagcatctaggcactccttccgacgaggacaatgattctagcttctccgactgcctctcttcgcctagctcttcacttcattttggagattcagacacagtgacaagtgacgaggacaaggaagtgtctgtgcgacattcccagactatcctgaacgccaaatcccgatcacactctgccaggtcccacaaatggccaaggactgaaacagagagtgtttcaggcctcctgatgaaacgaccatgcctgcacggaagcagtctgcggagactgccttgcaggaagcggttcgtgaaaaacaatagctcacaacgcacccagaaacagaaagagagaattcttatgcagcgtaagaaaagagaagttcttgcgcgaagaaaatatgcacttctacctagctccagtagctctagtgagaacgatctatctagcgagtcttccagttctagctctactgagggggaggaagacctgttcgtgtccgcaagcgaaaatcaccagaacaaccctgccgtgccttccggctccatcgatgaagacgttgttgtcattgaggcttccagcactccgcaggtgaccgccaatgaggagatcaacgtgacaagcaccgactctgaagtcgagattgtcacagttggggagtcctaccggtctcggtcgactttaggacatagtaggagccactggtcacagggctcaagcagtcacgccagccgtcctcaggagccccgtaatcgatctaggatctcaacagtcattcagcctctcaggcagaacgccgctgaggtcgtggatcttaccgtcgacgaagacgaacccacagtcgtgcccacgaccagcgcgagaatggagtcgcaggcaaccagcgcaagcatcaacaattcaaacccctcaacgagcgaacaggccagcgacacagcgtccgcagtgacgtcttcacaaccaagtaccgtcagcgaaacgagcgccaccttaacctcaaacagcaccacggggacctctatcggcgacgatagccgccgaactacatcgtctgccgtgaccgagaccggcccaccggcaatgccgagactcccaagctgctgtccacagcatagcccctgtggaggctcgagccagaaccatcatgcgttgggacaccctcatacatcatgtttccagcagcatggtcatcatttccagcaccatcatcaccaccatcacacccctcaccccgctgtccctgtgtccccgtctttttctgaccccgcttgccctgtagaaaggcccccacaggtgcaagccccttgtggcgcaaacagctctagtggcacctcttatcatgagcaacaggcgctgccagtcgatcttagtaacagtggcatccgcagccatggctctggctcattccacggtgcatctgcttttgacccatgctgcccagtgtcctcaagtcgcgcagcaatcttcggtcaccaggctgctgccgctgcccctagccagcccctaagcagcatcgatggctatggcagttctatggttgcgcaacctcagccacagcctccccctcagccttcgctgagctcttgcaggcactacatgccaccaccctacgcaagtctcacaagacccctgcaccaccaggcaagcgcatgtcctcattcccatgggaacccgccaccgcagacacagcctccacctcaagtggattacgtcattcctcacccagtccacgcctttcacagtcagatttcaagccatgccacttcgcaccctgtcgcccctccaccccctacacatctggccagcactgcagcaccgatcccccagcatttgccgcctacacaccagcctatcagtcatcatatccctgccacagctcccccagcacagaggctgcatcctcacgaggtaatgcagcgcatggaagtccagaggcgtaggatgatgcagcaccccacaggccttttcgtcttctgcgtctcaaggcgagctcatgaacgtccaccccctcatccgcacagaatgcatccaaactacggacatggccaccatattcacgtcccacaaactatgtcttcccatcctcgccaggccccagaacggagcgcctgggaactgggtattgaggccggagtgaccgcagcgacatacactccaggggctttgcaccctcaccttgctcactaccacgcgccaccccgtctgcaccacctccagctcggggctctccctctcatggtaccggatatggctggctacccacatatcagatatatcagcagcggcctggacggaaccagcttccgcggaccctttcgcggtaacttcgaggagctgattcacttggaagaacgcctcggtaatgtgaatagaggtgccagtcagggcactattgaacgctgtacataccctcacaaatacaagaaagtgacaacggactggtttagtcaacgcaaattgcattgtaagcaggacggcgaagagggaaccgaagaagatacggaagagaagtgcaccatctgtctatcaattttggaggaaggagaggatgtacgtcgcctgccttgtatgcacctgttccatcaagtgtgcgtagaccagtggctcattacaaacaagaagtgtcctatttgtagggtcgacatagaggcccagctcccaagtgagagttag

SEQ ID NO: 293610 - DNA, 4536 bp, Artificial Sequence
  derived and/or modified sequence
atgtctcaatggactcctgaatataacgagctctacaccttaaaagtggatatgaagagtgagattccttctgatgcaccaaagacacaggagagtctgaaagggatccttttgcatccagagcccattggggcagccaaaagttttcctgcaggagttgagatgattaatagtaaagtggggaatgaattctctcacctgtgtgatgattctcaaaagcaagagaaggaaatgaatggtaaccagcaagaacaagaaaaaagtctcgttgtgaggaaaaaacgcaaaagccagcaggctggcccttcgtatgtgcagaattgtgttaaagaaaaccagggaatattaggactgaggcaacacctagggacaccaagtgatgaagataatgattcctcttttagtgattgtctttcttctccttcatctagtctgcattttggagattctgatactgtgacttcagatgaggataaagaagtctctgtaagacattcccagaccattttgaatgctaaaagtagaagccatagtgcacggtctcataagtggcctcggactgagacagaatctgtatcgggattgttaatgaaaagaccctgtttacatggcagttcgttacggagacttccatgcagaaagagatttgtaaaaaataattcctcacagaggacacagaaacaaaaagagaggatattaatgcagaggaagaaacgagaagtgttagctcgaagaaaatatgccttgctacctagttctagtagttccagtgagaatgacctcagcagtgaatcctcttctagctcatcaactgaaggagaagaagatttgtttgtttctgccagtgaaaaccaccaaaacaatccagctgttccctcaggaagtattgatgaagatgttgtggtgatagaagcttcctccactccccaggttactgccaatgaagaaattaatgttacctcaactgacagtgaagtggagattgtaacagttggagaaagctatcggtctcgttcaacccttggacactccagatctcattggagccagggttccagttctcatgcaagtcggccacaggagccacggaaccgcagtaggatttctactgttatacagcccttgaggcagaatgcagcagaagttgtggaccttaccgttgatgaagatgaacctactgtagtaccaaccacttctgcaagaatggaatcacaagctactagcgcttccattaacaattcaaatccatctacctctgagcaggcctctgatactgcttcagctgtcaccagtagccaaccttccacagtgtcagagacttcagctactcttacaagcaatagtaccactggcacttctataggagatgactcaaggagaactacatctagtgctgtaacggaaactggccctcctgcaatgccaaggttaccttcctgctgtccccagcactcaccatgtggagggtcgtcacagaaccaccatgcattaggacatcctcatacaagttgctttcagcagcatggtcaccattttcaacatcatcaccaccaccaccatactccccacccagctgtcccagtttctccttcctttagtgatcctgcttgccctgtggaaagacctccacaagtacaagcaccttgtggagcaaatagtagttctggtaccagctatcatgaacagcaggcattgccagtggacctgagcaacagtggtatcagaagtcatggaagtggcagttttcatggagcatctgcatttgacccctgctgccctgtttcttcctcccgagctgcaatctttggccatcaggccgctgctgctgccccaagtcaacctttatcatcaatagatggctatggatcaagcatggttgcgcagccccagccccagccccctccacagccctctctctcatcatgtcgacattacatgccacccccttatgcctctttgacaaggccacttcatcatcaagcttctgcctgcccgcattctcatggaaacccccctcctcagactcagcctccgcctcaagtggattatgttattcctcatcctgtacatgctttccattctcaaatatcttctcatgcaacatctcatcctgtggcacccccaccaccaactcacttagccagtacagctgcaccaatccctcagcatcttcctcctacacaccagccaatttcgcaccatattccagccacagcacctccagcacagagactgcatcctcatgaagtgatgcagaggatggaagttcaaaggaggaggatgatgcagcatccaactggtctttttgtgttctgtgtttccaggcgggcacatgaacgccccccaccccatccacataggatgcacccaaactatggtcatgggcatcatattcatgtgcctcagactatgtcctcacatcctcgacaggctccagagaggtctgcctgggaactgggaattgaagctggagtgactgcagctacttatacacctggtgcattgcatcctcacttggcccattatcacgcacctcctcgacttcatcacttacaattaggagctcttcctttaatggttcctgatatggcaggctatcctcacatccgttacatttcatcaggattggatggaacatcattcagaggtcctttcaggggcaattttgaggaactgattcatttggaagaaagattaggcaatgtcaatcgtggagcatcccaggggacaattgaaagatgtacatatccacataaatacaaaaaggtaacaactgattggttctcacagaggaaactgcactgcaaacaagatggggaagaagggactgaggaagacacagaggaaaaatgtactatctgtttgtctattttagaggaaggtgaagatgtgagacgtcttccatgtatgcaccttttccaccaagtgtgtgttgaccaatggttgattaccaataagaagtgccccatatgcagagtggacattgaggcccagctgccaagtgaaagttgacaccatgtttcagaactcttgccctccctctcattcccatccttcctggtactgcagtcaaccaaagatggcatgacttacctgcgcagatttggaagcattgaacttagagtgctggctctgctatatggtacaactaatgctagacctacagtttatgtatacagttgattttgatgtatttataaaagcttttttttctagatttgacatttttctgtatcattttactgtatttttgcatggttccttgtattgcatttctttgcacatattatgggcttgtgaccctaaacttgcaggcaaggttagctgctttagtaagtagaattttgtggtctttttgttttttacatagtaccaagccttgataattatgaattttttatccattactaacctttaatttaatcaatcatgtactttagtttaatgtataaagatcctctagaaaatgataatattgtgtattaagacattccttaattaggacaaaatggctgctgtatatttactatatggagttctgagttaaataccatccttaatactgggaacagaatacaacccatataaatcagatgcaggtggtagtcacatcaccagagtgatcagtataaattttcttggtgtatccttttcctttcaacacagtgcagataagagttgaatattgatatcatacatttagactgctgttctgattgcatttatctttttcctacatcatttagaattttatttccctgattcagtttttgctgctgtgaaacagctctgatgaacactaaatattaatttcaattagctagattgtacatacttgcagatttaacaaaattttagggaaattgaaaaagacatgtagaatttgttgtcttctgctaagcacgaaaagttaagatatctgcttacattgattttgtagacacattaagtcaagatttggaatttaagtcactggcaggtatctgtgcattcatagaacttataaaggtcccaggatcacttttaagggatttttattagtttaaaggtaaataaagtcagctgaatctacatgtctcttgttttatttctctctaaacttgaaaacagtaaatctgcagatactgtgaggcacaaattatactgtcaacctactgttgctatggttatatactcccacttcatacattaccaagagtcgatcactgatttaaaatttttaatttctatagttaagatttactgcataatatagaatataaagttaagttaacatactaacatttctcctttggaggaagttttaatctacttcaggatgcatattattatcaagatactttcatatacaggatagcctaattttatttgtttaaatatgcttaatatgccccagattgcaaatgcatccagtcagtaatatcactgtctgtatgtggaggacatgttcccatggatcatatgtgaagatgtcaataagcttgcattaagccacctgctttgtaagtggattgattaataaataacttatatttc

SEQ ID NO: 293611 - DNA, 1560 bp, Artificial Sequence
  derived and/or modified sequence
atgaatatgctgcgccagaagtttccatcagtacctgttatggcattgactgcaaccgccaacccccgggttcagaaagacatcctcacccagctgaaaatcctgcggccccaggttttcagcatgagctttaaccgtcacaacctgaagtactatgtgctgcccaaaaagcccaaaaaggtcgcattcgactgcctggaatggatcagaaaacaccacccatacgattccggcatcatctattgcctgagccggcgggagtgtgacaccatggctgatactcttcaaagagacggattggctgcactggcttaccatgccggtttgtccgactctgcccgggacgaggttcagcagaagtggattaatcaggacggttgtcaggtcatctgtgctaccatagccttcggaatggggattgacaagcctgacgttcggtttgtgattcatgcgagcctgccaaagtctgtcgaagggtactatcaagagagcggaagggctggaagggatggagagatttcccactgcctgctcttttatacttatcacgacgtgactcggctcaaacgtttgatcatgatggagaaggacggcaaccaccacacaagagaaactcattttaacaatctctattccatggttcattactgcgaaaatattacagagtgccggcgcattcagttgctcgcgtacttcggcgagaacggctttaacccagacttttgtaagaaacatcctgatgtttcgtgtgacaattgttgtaaaacaaaagactataagactagagatgtgaccgacgacgtgaagagcattgttaggtttgtgcaggagcatagcagctcccaaggcatgcgcaacatcaagcatgtgggtcctagcggacgcttcaccatgaatatgctcgtggatatttttctcggctcaaagtctgcaaagattcaatcagggatttttggaaaaggttctgcgtactctagacataatgccgaaaggctgttcaaaaaattgatcctcgataagattctggatgaggacctctacatcaatgccaatgaccaagcaatagcatacgtaatgctgggaaacaaggctcaaaccgtgctgaatggtaatctcaaagtggacttcatggaaaccgaaaacagctctagtgtgaaaaagcagaaggcactggtcgccaaggtgtcccaacgcgaagagatggtgaaaaagtgcttgggggaactgaccgaagtttgtaaatctctgggtaaagtgtttggtgtgcactatttcaatatttttaacacggtgaccttgaaaaaactcgctgaatctctgtcctctgatcccgaggttctactgcagattgatggtgtcaccgaggataagcttgaaaagtatggcgcggaagtaattagtgtgctgcagaagtacagtgagtggacaagccctgcggaggatagctctcctggaatcagcctgagcagctctcgtgggcccggcagaagtgccgccgaggaattggacgaagagatccccgtcagctcccattatttcgcgagcaagacgagaaactag

SEQ ID NO: 293612 - DNA, 1560 bp, Artificial Sequence
  derived and/or modified sequence
atgaacatgctgcggcagaagttccccagcgtgcctgtgatggccctgacagccacagccaacccccgggtgcagaaggacatcctgacccagctgaagatcctgcggccccaggtgttctccatgtccttcaacagacacaacctgaagtactacgtgctgcccaagaagcccaagaaggtggcctttgactgcctggagtggatcaggaagcaccacccctatgattctggcatcatctactgcctgagcagaagagaatgtgacaccatggctgacaccctgcagagagatggcctggccgccctggcctaccacgccggcctgagtgacagcgccagagatgaggtgcagcagaagtggatcaaccaggacggctgccaggtgatctgtgccaccatcgccttcggcatgggcatcgacaagccagatgtgcgctttgtgatccacgccagcctgcccaagtctgtggagggctactaccaggagagcggccgggccggcagagatggagagatcagccactgcctgctcttctacacctaccatgatgtgacccggctgaagaggctcatcatgatggagaaggatggcaaccaccacacccgggagacccacttcaacaacctgtacagcatggtgcactactgtgagaacatcacagagtgccgccgcatccagctgctggcctactttggagaaaatggcttcaacccagacttctgcaagaagcacccagatgtgtcctgtgacaactgctgcaagaccaaggactacaagaccagagatgtgacagatgatgtgaagagcatcgtgcgctttgtgcaggagcacagcagcagccagggcatgaggaacatcaagcacgtgggccccagcggccgcttcaccatgaacatgctggtggacatcttcctgggcagcaagagcgccaagatccagagcggcatctttgggaagggcagcgcctacagccgccacaatgctgagcggctcttcaagaagctgatcctggacaagatcctggatgaggacctgtacatcaatgccaatgaccaggccatcgcctacgtgatgctgggcaacaaggcccagacagtgctgaatggaaacctgaaggtggacttcatggagacagagaacagcagctctgtgaagaagcagaaggccctggtggccaaggtgtcccagcgggaggagatggtgaagaagtgcctgggggagctgacagaggtgtgcaagagcctgggcaaggtgtttggagtgcactacttcaacatcttcaacacagtgaccctgaagaagctggccgagagcctgagcagtgaccctgaggtgctgctgcagattgatggagtgacagaggacaagctggagaagtatggagctgaggtgatctctgtgctgcagaagtacagcgagtggaccagccctgctgaggacagcagccctggcatcagcctgagcagcagccggggccctggccgctctgctgctgaggagctggatgaggagatccctgtgagcagccactactttgccagcaagaccaggaactag

SEQ ID NO: 293613 - DNA, 1560 bp, Artificial Sequence
  derived and/or modified sequence
atgaacatgctgcggcagaagttccccagcgtgcccgtgatggccctcaccgctacagctaacccccgcgttcagaaggacattctcacgcagttgaagatcctccgacctcaggtgttcagcatgtcttttaataggcataatctgaaatattacgtgttgccaaaaaaacctaagaaggtcgcctttgattgtctggaatggataaggaagcatcacccttacgacagtgggattatatactgtctgagcaggagagagtgcgacacaatggctgatactttgcagagggatggcttggcagccctagcttatcatgccgggctgtcagactccgcaagggacgaggtgcagcagaagtggatcaatcaggatggttgccaggtaatttgcgctactattgcctttggtatgggtattgacaagccagatgtcagattcgtcatacacgccagtcttcctaagagcgtggaagggtactatcaagagtcagggagggcaggtagagacggggagatttctcattgcctgctgttctacacatatcacgacgtcacccgactgaagaggctgatcatgatggaaaaagatggcaatcatcatactagagagacgcacttcaacaatctgtattctatggtgcactactgtgagaatatcacagaatgcaggaggatccagttactggcctacttcggggagaacggattcaatcccgatttttgtaagaaacatcccgatgtgtcatgtgacaactgttgtaagaccaaggattacaaaacacgggacgtgaccgacgatgtgaagtccatcgttagattcgtgcaagagcattcttcctcacaaggcatgcggaatataaaacatgtgggaccctccggccgcttcacaatgaatatgcttgtggacatcttcttggggagcaaatctgctaagatccaatccggtatcttcggtaagggctccgcttactcccggcacaacgctgagcggttatttaagaagttgattttggataaaatcctggacgaggatctctatatcaatgctaatgatcaggccattgcttatgtcatgcttggaaacaaagcccagactgtgcttaatggcaacctgaaagtggacttcatggagaccgagaacagctcctctgtcaagaagcagaaggccctcgtggccaaggtctcgcaacgggaagaaatggtgaagaaatgtctcggcgagctcaccgaggtgtgtaaaagtctagggaaggttttcggtgttcattactttaacatctttaatacagtgacgctgaaaaaattggctgagagcttgtcgtcggatcccgaggtcctgctgcagattgacggagtcaccgaagataaactcgagaaatacggcgccgaggttatcagtgttttgcagaaatattctgaatggacttcacctgcagaggattcctcaccaggcatatcactctcttcctcacgaggccctgggcggagcgctgccgaagaactggacgaagaaatcccagtttccagccactacttcgccagcaaaactcgaaactag

SEQ ID NO: 293614 - DNA, 1560 bp, Artificial Sequence
  derived and/or modified sequence
atgaatatgctccgccagaaattcccatcagttccggttatggcactgactgccaccgcaaaccctagggttcaaaaggacatccttacccagctgaagatccttcgtccgcaggtcttttccatgtcctttaaccgacataatcttaaatattatgtgctaccgaaaaagcccaagaaggttgcatttgactgccttgaatggattagaaagcaccatccatacgattcaggtattatctattgtttgagccgccgtgagtgtgataccatggccgacacactgcagcgcgatgggctcgctgctctggcctatcacgctgggttaagcgacagcgcaagggacgaagtgcaacagaaatggatcaaccaggatggctgtcaggtgatctgcgctacaatcgcatttgggatgggcatcgacaaacccgacgtgcgtttcgtaatacatgcgtctctcccaaagtctgtagaagggtattatcaggagagcggaagagctggacgtgacggtgagatcagtcactgccttctgttttatacataccatgatgtgacccgcttgaagcgcctgattatgatggagaaagatggcaaccaccacacacgggagacccacttcaataatctatatagtatggtgcactattgtgagaatataacggagtgccggaggatccagctgcttgcatatttcggggaaaacgggtttaatcccgacttctgcaagaaacaccctgatgtcagttgtgacaactgttgcaagaccaaggattataagactagggatgtaaccgacgatgtaaaatcaattgtgaggtttgtccaggagcattcttcctcgcaggggatgcgaaacatcaagcacgtaggaccaagcggcagatttacgatgaacatgctcgtggatatctttctcggatccaagtcagccaagattcaaagtgggattttcggcaagggttcagcatattcccggcacaatgccgagaggctgttcaagaaactgatcctcgacaaaatcttggacgaggatctatatattaacgctaatgaccaggccattgcttacgttatgctcgggaacaaagcccagactgtcctgaacggcaatctcaaggtagacttcatggaaaccgagaattcaagcagcgtgaaaaagcagaaagcccttgtcgcaaaggtttcgcagagagaagagatggttaaaaagtgcctgggggagctcaccgaggtgtgcaagagtctcggtaaggtgttcggcgtgcactatttcaacattttcaacacagttacactaaagaagttggctgaatctttgtcatctgacccagaggttctgcttcagatcgacggggtgacggaagacaaattagagaagtacggcgcagaggttattagtgtgctgcagaaatactcggagtggacatctcctgccgaggatagttctcccggaatcagcttgagcagtagccgtgggccaggccgttctgcggcagaggaactggacgaggagatcccggtcagctcccactatttcgctagcaagactcgtaattag

SEQ ID NO: 293615 - DNA, 2011 bp, Artificial Sequence
  derived and/or modified sequence
ttattttcctagacaagtcagcacaaaatttagcatccagaaatctgaaacatgagcgtttccaaagtcttagttttcctcatacaaaggaaatgatgaagatttttcataaaaaatttggcctgcataattttagaactaatcagctagaggcgatcaatgctgcactgcttggtgaagactgttttatcctgatgccgactgtagattccagctacatatctgacaggtgataagactgactcagaagctacaaatatttacctccagttatcaaaaaaagacccaatcataaaacttctatatgtcactccagaaaagatctgtgcaagtaacagactcatttctactctggagaatctctatgagaggaagctcttggcacgttttgttattgatgaagcacattgtgtcagtcagtggggacatgattttcgtcaagattacaaaagaatgaatatgcttcgccagaagtttccttctgttccggtgatggctcttacggccacagctaatcccagggtacagaaggacatcctgactcagctgaagattctcagacctcaggtgtttagcatgagctttaacagacataatctgaaatactatgtattaccgaaaaagcctaaaaaggtggcatttgattgcctagaatggatcagaaagcaccacccatatgattcagggataatttactgcctctccaggcgagaatgtgacaccatggctgacacgttacagagagatgggctcgctgctcttgcttaccatgctggcctcagtgattctgccagagatgaagtgcagcagaagtggattaatcaggatggctgtcaggttatctgtgctacaattgcatttggaatggggattgacaaaccggacgtgcgatttgtgattcatgcatctctccctaaatctgtggagggttactaccaagaatctggcagagctggaagagatggggaaatatctcactgcctgcttttctatacctatcatgatgtgaccagactgaaaagacttataatgatggaaaaagatggaaaccatcatacaagagaaactcacttcaataatttgtatagcatggtacattactgtgaaaatataacggaatgcaggagaatacagcttttggcctactttggtgaaaatggatttaatcctgatttttgtaagaaacacccagatgtttcttgtgataattgctgtaaaacaaaggattataaaacaagagatgtgactgacgatgtgaaaagtattgtaagatttgttcaagaacatagttcatcacaaggaatgagaaatataaaacatgtaggtccttctggaagatttactatgaatatgctggtcgacattttcttggggagtaagagtgcaaaaatccagtcaggtatatttggaaaaggatctgcttattcacgacacaatgccgaaagactttttaaaaagctgatacttgacaagattttggatgaagacttatatatcaatgccaatgaccaggcgatcgcttatgtgatgctcggaaataaagcccaaactgtactaaatggcaatttaaaggtagactttatggaaacagaaaattccagcagtgtgaaaaaacaaaaagcgttagtagcaaaagtgtctcagagggaagagatggttaaaaaatgtcttggagaacttacagaagtctgcaaatctctggggaaagtttttggtgtccattacttcaatatttttaataccgtcactctcaagaagcttgcagaatctttatcttctgatcctgaggttttgcttcaaattgatggtgttactgaagacaaactggaaaaatatggtgcggaagtgatttcagtattacagaaatactctgaatggacatcgccagctgaagacagttccccagggataagcctgtccagcagcagaggccccggaagaagtgccgctgaggagctcgacgaggaaatacccgtatcttcccactactttgcaagtaaaaccagaaatg

SEQ ID NO: 293616 - DNA, 1560 bp, Artificial Sequence
  derived and/or modified sequence
atgaacatgctgagacagaagttccccagcgtgcccgtgatggccctgaccgccaccgccaaccccagagtgcagaaggacatcctgacccagctgaagatcctgagaccccaggtgttcagcatgagcttcaacagacacaacctgaagtactacgtgctgcccaagaagcccaagaaggtggccttcgactgcctggagtggatcagaaagcaccacccctacgacagcggcatcatctactgcctgagcagaagagagtgcgacaccatggccgacaccctgcagagagacggcctggccgccctggcctaccacgccggcctgagcgacagcgccagagacgaggtgcagcagaagtggatcaaccaggacggctgccaggtgatctgcgccaccatcgccttcggcatgggcatcgacaagcccgacgtgagattcgtgatccacgccagcctgcccaagagcgtggagggctactaccaggagagcggcagagccggcagagacggcgagatcagccactgcctgctgttctacacctaccacgacgtgaccagactgaagagactgatcatgatggagaaggacggcaaccaccacaccagagagacccacttcaacaacctgtacagcatggtgcactactgcgagaacatcaccgagtgcagaagaatccagctgctggcctacttcggcgagaacggcttcaaccccgacttctgcaagaagcaccccgacgtgagctgcgacaactgctgcaagaccaaggactacaagaccagagacgtgaccgacgacgtgaagagcatcgtgagattcgtgcaggagcacagcagcagccagggcatgagaaacatcaagcacgtgggccccagcggcagattcaccatgaacatgctggtggacatcttcctgggcagcaagagcgccaagatccagagcggcatcttcggcaagggcagcgcctacagcagacacaacgccgagagactgttcaagaagctgatcctggacaagatcctggacgaggacctgtacatcaacgccaacgaccaggccatcgcctacgtgatgctgggcaacaaggcccagaccgtgctgaacggcaacctgaaggtggacttcatggagaccgagaacagcagcagcgtgaagaagcagaaggccctggtggccaaggtgagccagagagaggagatggtgaagaagtgcctgggcgagctgaccgaggtgtgcaagagcctgggcaaggtgttcggcgtgcactacttcaacatcttcaacaccgtgaccctgaagaagctggccgagagcctgagcagcgaccccgaggtgctgctgcagatcgacggcgtgaccgaggacaagctggagaagtacggcgccgaggtgatcagcgtgctgcagaagtacagcgagtggaccagccccgccgaggacagcagccccggcatcagcctgagcagcagcagaggccccggcagaagcgccgccgaggagctggacgaggagatccccgtgagcagccactacttcgccagcaagaccagaaactag

SEQ ID NO: 293617 - DNA, 540 bp, Artificial Sequence
  derived and/or modified sequence
atgagaacaatgcgagcagtacagctgcaaatgactatcctgacacaccatatcatgaagaaaccccttctaggcatgaaactccggaaggatagcgagtcggcattgggcttaggaatccgtagtgcgatgacaataagttctaagcaagcactgtcatacgtgtcagccttggataacgctctcgagctgaccaccgttgaggaccacgtgaagaatttcagaccccaatgtattgtcttgacgggagggcccatgactaggcccgccctgctggacattacccacgccttcaccaagaattccggactgtgcatttgttgtgaggtcttcgtgggtcctcgcaagctgtgtgtgaaggagatgaactctgggatggccaaaaaacaagcttggttaatcaagaataagatcaaagctttctacgctgccgttgcggctgattgtttcagggatggcgtaagaagcttgttacaggcctccgggctgggtaggatgaagcctaacaccttggtgatcggatacaagaagaactggtag

SEQ ID NO: 293618 - DNA, 540 bp, Artificial Sequence
  derived and/or modified sequence
atgaggaccatgagagctgtgcagctgcagatgaccatcctgacccaccacatcatgaagaagcccctgctgggcatgaagctgaggaaggacagcgagagcgccctgggcctgggcatccgcagcgccatgaccatcagcagcaagcaggccctgtcctatgtgtctgccctggacaatgccctggagctgaccaccgtggaggaccacgtgaagaacttccggccccagtgcatcgtgctgaccggcggccccatgaccaggcctgccctgctggacatcacccacgccttcaccaagaacagcggcctgtgcatctgctgtgaggtgtttgtgggccccaggaagctgtgtgtgaaggagatgaacagcggcatggccaagaagcaggcctggctgatcaagaacaagatcaaggccttctatgctgctgtggccgctgactgcttcagagatggagtgcgcagcctgctgcaggccagcggcctgggccgcatgaagcccaacaccctggtgattggctacaagaagaactggtag

SEQ ID NO: 293619 - DNA, 540 bp, Artificial Sequence
  derived and/or modified sequence
atgcggaccatgcgggccgtgcagctgcagatgaccatcctgacccatcatattatgaaaaagcccctgcttggcatgaaactgcggaaggatagcgagagtgcactgggtctggggattcgttctgctatgaccattagcagcaagcaggccctgtcgtatgtgtctgcattagacaatgctttagagcttacaacggttgaggatcacgttaagaatttccgcccacaatgcatagtccttacgggtggacccatgacaaggcccgctctgttagatatcactcacgctttcacaaagaactcaggtctgtgcatctgctgtgaagtgtttgtggggccacggaagctttgtgtcaaagagatgaactcagggatggcgaagaagcaggcatggctaattaagaataaaatcaaagctttttacgctgcagtcgcagccgattgctttcgtgacggcgtgcgcagtctcctgcaggcctccggtttaggaagaatgaagccaaacaccctcgtgatcggttataaaaaaaattggtag

SEQ ID NO: 293620 - DNA, 540 bp, Artificial Sequence
  derived and/or modified sequence
atgaggacaatgcgagctgttcagctgcagatgactatcctgacacaccacatcatgaagaaacccctgttgggaatgaagctgaggaaagacagtgaatccgccctggggcttgggatccggtctgcgatgacaatcagcagcaaacaggctctaagttatgtgtctgcgctggacaacgccttggagctgactactgtggaagaccatgtaaagaacttccgtccccagtgtatcgtattaacaggaggccctatgacccgcccagcactgctagatatcacccatgcttttaccaagaactcaggtctgtgcatatgttgcgaagtgtttgtgggcccaagaaaattgtgcgtcaaagaaatgaatagcggcatggccaagaagcaggcctggcttatcaaaaataagattaaagcgttctacgcagccgtagcggcagattgtttcagagatggcgtccggtcacttttacaagcttctggcctggggagaatgaagccaaacaccttggttataggctacaaaaagaattggtag

SEQ ID NO: 293621 - DNA, 540 bp, Artificial Sequence
  derived and/or modified sequence
atgagaaccatgagagccgtgcagctgcagatgaccatcctgacccaccacatcatgaagaagcccctgctgggcatgaagctgagaaaggacagcgagagcgccctgggcctgggcatcagaagcgccatgaccatcagcagcaagcaggccctgagctacgtgagcgccctggacaacgccctggagctgaccaccgtggaggaccacgtgaagaacttcagaccccagtgcatcgtgctgaccggcggccccatgaccagacccgccctgctggacatcacccacgccttcaccaagaacagcggcctgtgcatctgctgcgaggtgttcgtgggccccagaaagctgtgcgtgaaggagatgaacagcggcatggccaagaagcaggcctggctgatcaagaacaagatcaaggccttctacgccgccgtggccgccgactgcttcagagacggcgtgagaagcctgctgcaggccagcggcctgggcagaatgaagcccaacaccctggtgatcggctacaagaagaactggtag

SEQ ID NO: 293622 - protein, 529 aa, Artificial Sequence
  derived and/or modified sequence
MAPARTMARARLAPAGIPAVALWLLCTLGLQGTQAGPPPAPPGLPAGADCLNSFTAGVPGFVLDTNASVSNGATFLESPTVRRGWDCVRACCTTQNCNLALVELQPDRGEDAIAACFLINCLYEQNFVCKFAPREGFINYLTREVYRSYRQLRTQGFGGSGIPKAWAGIDLKVQPQEPLVLKDVENTDWRLLRGDTDVRVERKDPNQVELWGLKEGTYLFQLTVTSSDHPEDTANVTVTVLSTKQTEDYCLASNKVGRCRGSFPRWYYDPTEQICKSFVYGGCLGNKNNYLREEECILACRGVQGGPLRGSSGAQATFPQGPSMERRHPVCSGTCQPTQFRCSNGCCIDSFLECDDTPNCPDASDEAACEKYTSGFDELQRIHFPSDKGHCVDLPDTGLCKESIPRWYYNPFSEHCARFTYGGCYGNKNNFEEEQQCLESCRGISKKDVFGLRREIPIPSTGSVEMAVAVFLVICIVVVVAILGYCFFKNQRKDFHGHHHHPPPTPASSTVSTTEDTEHLVYNHTTRPL

SEQ ID NO: 293623 - protein, 496 aa, Artificial Sequence
  derived and/or modified sequence
MAPARTMARARLAPADCLNSFTAGVPGFVLDTNASVSNGATFLESPTVRRGWDCVRACCTTQNCNLALVELQPDRGEDAIAACFLINCLYEQNFVCKFAPREGFINYLTREVYRSYRQLRTQGFGGSGIPKAWAGIDLKVQPQEPLVLKDVENTDWRLLRGDTDVRVERKDPNQVELWGLKEGTYLFQLTVTSSDHPEDTANVTVTVLSTKQTEDYCLASNKVGRCRGSFPRWYYDPTEQICKSFVYGGCLGNKNNYLREEECILACRGVQGGPLRGSSGAQATFPQGPSMERRHPVCSGTCQPTQFRCSNGCCIDSFLECDDTPNCPDASDEAACEKYTSGFDELQRIHFPSDKGHCVDLPDTGLCKESIPRWYYNPFSEHCARFTYGGCYGNKNNFEEEQQCLESCRGISKKDVFGLRREIPIPSTGSVEMAVAVFLVICIVVVVAILGYCFFKNQRKDFHGHHHHPPPTPASSTVSTTEDTEHLVYNHTTRPL

SEQ ID NO: 293624 - DNA, 1590 bp, Artificial Sequence
  derived and/or modified sequence
atggctccagccagaaccatggctcgagccagactggcacctgctggcataccggctgtggctctctggctgctatgtacgcttgggttgcaggggacacaagctgggccaccacccgctcctccaggccttcccgcaggagcagactgcctgaatagttttaccgctggcgtccctggttttgtcctagataccaatgcctctgtgagtaatggggcaacatttctggagtccccaacagtacgccgaggctgggactgcgtccgagcatgctgtaccactcaaaattgtaacctggctctggtggagctgcaacccgatagaggagaagacgccatagcagcctgtttcctgatcaattgcctgtacgaacaaaactttgtgtgcaagttcgccccacgggagggcttcattaactacttaacccgtgaggtgtataggtcataccgccaactccgaacacagggcttcggcggttccggtattcccaaggcctgggctggtatagaccttaaagttcagccccaggagccgctggtactgaaggacgttgaaaacaccgattggaggctgctccgaggcgatactgacgttagggttgaaaggaaggatccaaaccaggtggagttgtggggactcaaagagggcacgtatctgtttcaattgactgtcacatccagtgatcaccctgaagacactgctaacgtcaccgtcaccgtcctgtccaccaagcagaccgaggactactgcctagcaagcaacaaggtgggcaggtgtagaggctcattccccagatggtactatgaccccaccgagcagatttgcaagagtttcgtgtacggcggatgtttaggtaataagaataattatctgcgtgaggaggaatgtatcctcgcttgccgcggtgttcagggcggacccctgcgcggtagttcaggggcacaggctactttccctcaaggcccttctatggagcgacggcatccagtttgtagtggcacatgccagcccactcagttcaggtgttcaaatggttgttgcattgacagcttcctggagtgtgacgatactcctaattgcccagatgcttcggatgaggcagcctgtgaaaagtatacttcgggtttcgacgaattacagagaatccattttccttcggacaaagggcactgcgtggacctgccggacacaggactctgtaaggaatctattccacgatggtattataatcccttttccgaacattgcgccagattcacctatgggggttgctatggaaacaaaaataatttcgaagaggagcagcaatgtctcgagtcctgtagagggattagcaaaaaggacgtgttcggtcttagaagggaaatccccatcccatctactggaagtgtggagatggctgtggcagtctttctagtgatctgtatcgtcgtggtggtcgccatactgggttattgcttcttcaagaaccaacggaaggacttccacggccaccaccaccatccccctccaactcccgcaagtagcaccgtgtccacaacagaggacaccgaacacctcgtctacaatcatacaacgcgaccactatag

SEQ ID NO: 293625 - DNA, 1491 bp, Artificial Sequence
  derived and/or modified sequence
atggccccagcaagaactatggcacgggctcgcctggcgccagcagattgcttaaattcttttaccgccggagttccaggattcgtgcttgacacaaatgcttcggtgtccaacggcgcaactttcttggagagtcccaccgtaaggaggggctgggactgcgtcagagcgtgctgtaccactcagaactgcaacctggccctggtggaactgcagccggaccgcggagaggatgccatagctgcctgcttcctgattaattgtctctatgagcagaatttcgtgtgcaagtttgctcctagggaggggttcatcaattatctgacacgtgaggtgtatcgaagctaccgccaactccggactcaaggattcggaggttctggaataccaaaagcgtgggccggaatagaccttaaagtccagccgcaagagcctctcgttctgaaggacgtcgaaaataccgattggcgtctgctgaggggcgacaccgacgtgcgtgtcgagcggaaggacccgaaccaggtggagttgtggggacttaaagagggcacctatctatttcagctgaccgtcacatcttcggaccatcctgaggacaccgcaaatgtgaccgtcactgttctgagcacaaagcagactgaggattactgcctcgcgtcgaataaggtgggcagatgcagaggttcatttcctcgctggtactatgatccgaccgagcaaatctgcaaatctttcgtttatgggggatgccttggtaacaagaataactacctgagggaagaggagtgtattttagcatgtagaggagtccagggcggacccctgcgaggtagtagcggcgctcaggctaccttcccccaaggcccaagtatggaaaggagacaccctgtgtgctccggcacttgtcagccgactcagtttaggtgctctaatggatgctgcatcgatagctttttagagtgcgacgacactccaaactgtcccgatgccagcgacgaggccgcttgtgaaaagtatacgtccggcttcgatgagctgcagcgaatacacttccccagtgacaagggccattgcgtcgacttgcccgacacagggctctgcaaagaatccatccctcgttggtactataaccccttcagcgaacactgtgcgaggttcacgtatggaggatgctatggcaacaagaataatttcgaagaggagcaacagtgtctggagagctgccgtggcattagtaaaaaggacgttttcggcttgcgcagagagatcccgatcccgagcaccggatccgtggaaatggcagtagcggtgtttttggtcatctgcatcgttgtggtagtggccatcctcggttattgcttttttaaaaatcagaggaaagactttcatgggcatcatcaccatccacccccaacccccgctagcagtaccgtgtctaccaccgaagacacagaacacctggtctacaatcacacaacacgacccctgtag

SEQ ID NO: 293626 - DNA, 1590 bp, Artificial Sequence
  derived and/or modified sequence
atggcaccagcaagaactatggctcgggcccgactggctcccgccggcattcctgcggtggcattgtggcttctttgtaccctgggacttcaaggcacccaagcaggccctcctcctgctccgccaggcttaccagcaggcgctgattgtctcaattcttttacagcaggagtccctggattcgtgctggatacaaacgcttctgtctcaaatggagctacctttctcgaatctcccactgttagacgtggctgggactgcgtccgggcatgctgtaccacacagaattgcaacctggcacttgtggagttgcagccagaccgtggggaggatgcaatcgccgcctgtttccttattaactgcctctatgagcagaacttcgtttgcaagttcgcccctagagaaggttttattaattacctgacgagggaagtctacagatcttatcgtcagctgagaactcagggttttggagggagcggaatacccaaggcgtgggccggtatcgatctgaaagtgcagccccaagaacctctggtgctgaaggacgtggagaacactgactggagactgctgagaggtgacacggatgtgcgcgtggaacggaaagatcccaaccaagttgagctctggggcctgaaggagggtacttacctgttccagttaacagttacttcatccgatcatccagaggacaccgcaaatgtgaccgtcaccgtgctgtctacaaagcagacagaagactattgtcttgcctccaataaagtcggccgctgccggggcagcttccctagatggtattatgatcctacagaacagatttgcaagtcattcgtatatggcggctgcctcggaaataaaaacaactatctgagagaagaagaatgtatcctggcctgtagaggtgtgcaaggcggacccctgagaggtagttcgggggctcaggctacttttccccaaggcccatccatggaacggcggcatccagtttgctccgggacgtgtcagcctacccaattccgctgttccaacgggtgttgcatagattcatttcttgagtgcgatgatacgcccaattgccctgatgccagcgatgaggctgcctgtgaaaagtatacatcagggtttgacgagttgcagagaatccatttccccagcgacaaaggacactgcgttgacctgcccgacaccggactttgtaaggagtcgattccgagatggtactacaaccccttcagcgaacattgcgcccggtttacttacggggggtgctacgggaataagaacaactttgaagaggagcaacagtgcctggaatcctgccgagggatctctaaaaaggacgttttcggacttcgacgagagatccccatcccttccactggctccgtcgagatggccgtcgctgtgtttctcgtgatatgcattgtagtggtagtggccattctgggctactgtttctttaagaatcagcgaaaggattttcatgggcatcatcatcatcccccgccgacccctgcttccagcacagtgtcaaccacggaggacacagaacacttagtgtacaaccacacaacgcggccactctag

SEQ ID NO: 293627 - DNA, 1491 bp, Artificial Sequence
  derived and/or modified sequence
atggcacccgctaggacaatggctagagcacggctggcccccgcagattgtctgaatagttttaccgccggagtaccgggctttgtgctggacacaaatgccagcgtctcaaacggagccactttcctcgaatcaccaaccgttcgaagaggttgggattgtgtgcgcgcatgttgtacaacacagaactgtaatttagctctggtggagctccaacctgatcgaggtgaggatgccattgccgcctgtttccttatcaattgcttgtacgaacagaactttgtgtgcaagtttgccccacgagaaggcttcatcaactacttaactagagaggtctacagatcttatagacagctgcgcactcagggattcgggggctcagggatccctaaggcatgggccggaatcgacctgaaggtccagccacaggaacccctggttttaaaagatgtcgaaaacactgattggcgcctattaagaggggacaccgatgtgcgagtggagcgaaaggacccgaaccaggtagagctgtggggactaaaagagggcacttaccttttccagctgaccgtcaccagttccgatcatccagaggacactgcgaatgtcaccgtgactgtgttatctacaaaacagacagaagattattgcctggcatcaaataaagtgggacgctgccgcggcagctttccacggtggtactacgaccctaccgaacagatttgcaaatcattcgtttacggaggatgtcttggcaacaaaaataactatttgagagaagaagagtgcattctggcttgtcgcggggtgcagggtggacccctgcggggctcaagcggagctcaagccacctttccccagggcccgtccatggagcggaggcatcctgtttgttccgggacctgccagcctacccagtttcgctgttccaacggctgctgtattgattccttcctagaatgtgacgacactcctaactgtccggatgctagcgacgaagcagcctgtgagaaatacacttctggctttgacgaactccagcgaatccacttcccctccgacaaaggccattgtgtagatctgccggacacaggactgtgcaaggagtctattccgcgctggtactataatccttttagtgaacattgtgcaagattcacctacgggggatgttacggcaacaagaataacttcgaggaggagcagcagtgcctcgaatcctgtcgaggtatctccaagaaggacgttttcggattgcggcgagagattcctattccgagtacgggatctgttgaaatggcagtggctgtgttcttggtaatctgtatcgtggtggttgttgccatccttggatactgtttctttaaaaatcagcgtaaggattttcacgggcaccatcatcaccccccacctacacccgcatcaagcaccgtttccactaccgaggatactgagcacctggtgtataatcatacaactaggcccctctag

SEQ ID NO: 293628 - DNA, 1590 bp, Artificial Sequence
  derived and/or modified sequence
atggctcctgctcggacaatggcccgcgctcgtctggctcccgccggtattcctgcagtggccctgtggctcttgtgcacacttgggcttcaggggacccaagccggccctccccccgccccccctggtctgcctgccggagctgactgcctgaattcttttacagcaggggtccctgggttcgtcttggatacaaacgcttctgtttcaaatggcgccacctttttagagtcaccaacagtgagacgtggatgggattgtgtaagagcttgctgcacaacccagaactgtaaccttgccctggtggaattacagccagaccggggggaggatgctattgctgcctgctttctcattaattgtctctacgagcagaacttcgtatgcaagtttgcccccagagaaggctttatcaactatctcacccgcgaggtgtatcggagctacagacaactaaggacacaaggattcggaggcagtggaataccaaaagcttgggcagggatagatctaaaagtgcaacctcaggaacctttggttctaaaggacgtggaaaataccgactggagacttctcagaggggatacagatgtaagggtggaacggaaagatcccaaccaagttgagctctggggcctgaaggagggtacttacctgttccagttaacagttacttcatccgatcatccagaggacaccgcaaatgtgaccgtcaccgtgctgtctacaaagcagacagaagactattgtcttgcctccaataaagtcggccgctgccggggcagcttccctagatggtattatgatcctacagaacagatttgcaagtcattcgtatatggcggctgcctcggaaataaaaacaactatctgagagaagaagaatgtatcctggcctgtagaggagttcagggcggtccactgcgagggagctccggcgcacaggcgaccttcccccagggtccctccatggagcggcgtcaccccgtgtgttcgggaacctgtcagccaacccagtttcgatgttccaacggatgttgtatcgattcatttttagaatgcgacgataccccgaattgcccagacgcttccgatgaagctgcttgtgagaaatacacatcaggatttgacgagttgcagagaatacacttcccatccgataaaggccattgtgttgatctgcccgatactgggctgtgcaaggagtctatccctagatggtattacaatcccttctctgaacactgtgccaggttcacctatggaggatgctatgggaataagaataattttgaggaggagcagcaatgtctggaaagttgtagaggaatctcaaagaaggatgtttttggattaagacgcgagataccaatacctagcaccggatccgttgagatggcagtcgctgtgtttctggtaatttgtattgtggtggttgtggccattctgggctattgtttttttaagaaccaaagaaaagattttcacggccaccatcatcaccccccacctacacccgccagcagtactgtttcgacgacagaggatacagaacatcttgtatacaatcacacaaccagaccactttag

SEQ ID NO: 293629 - DNA, 1491 bp, Artificial Sequence
  derived and/or modified sequence
atggcccctgctaggactatggccagagcccgactggccccggcagattgtttgaattcctttaccgcaggtgtccctggcttcgtcttagataccaacgccagcgtgtcaaacggcgctacattcttggaatcccccaccgttagaagaggctgggactgcgtaagagcctgttgcacaacccagaattgcaatcttgctctcgtcgagctacaacccgatagaggagaggatgccatcgctgcctgtttcctgattaactgtctgtacgagcagaattttgtatgcaaattcgcaccccgagagggctttattaactacctcaccagagaggtctaccggtcttatagacagcttcgaacacagggttttggaggatctggcatacccaaggcatgggctgggatagacctgaaagtgcaaccacaggagccacttgtattgaaggacgttgagaacacggactggcggttacttcggggagacacagacgtaagagttgagcgcaaggacccaaaccaggtcgaactatggggactgaaagagggcacatacctgttccaactcacagtgacttccagcgaccaccccgaggataccgccaatgtgacagttacagttctgtccacgaaacagaccgaggattattgcctggcatcaaacaaggtcggcaggtgccgcgggtccttccctagatggtactatgatcccacagagcaaatttgcaaatcatttgtatatggaggctgtctcgggaataaaaataattatcttagagaagaggagtgcattctggcttgtcgtggcgttcaggggggccccctgcgggggagctccggtgcccaggcaacattcccccaaggacctagtatggaaagaagacatcccgtgtgctccggcacatgccaaccaactcagttccgatgctctaatggctgctgcatagatagtttcctagagtgcgatgatacacccaactgtccggatgcttctgacgaagcggcctgcgaaaagtacacctccggctttgatgaactgcagaggattcactttcctagcgataagggtcactgcgtcgatttgcccgatacagggttgtgtaaagagtctatccctagatggtattacaatccgttctccgagcattgcgcgagattcacatacgggggctgttatgggaataaaaacaacttcgaggaagaacagcaatgccttgaaagctgtagggggatttctaaaaaagacgtcttcggattgcggagagaaatcccgataccatcaaccggatcagtcgaaatggcagtcgcagtttttctggttatctgcattgtagtagttgtagccattctgggctactgcttttttaagaaccagagaaaggattttcacggtcaccatcatcatccacctccaacaccagccagctcaacagtcagcactacagaagatactgagcacctcgtttacaaccataccacacggccactctag

SEQ ID NO: 293630 - DNA, 1891 bp, Artificial Sequence
  derived and/or modified sequence
agtttcaccagaaaccagggggagaaggcggccgagccccagctctccgagcaccgggtcggaagccgcgacccgagccgcgcaggaagctgggaccggaacctcggcggacccggccccacccaactcacctgcgcaggtcaccagcaccctcggaacccagaggcccgcgctctgaaggtgacccccctggggaggaaggcgatggcccctgcgaggacgatggcccgcgcccgcctcgccccggccgactgcctgaacagctttaccgccggggtgcctggcttcgtgctggacaccaacgcctcggtcagcaacggagctaccttcctggagtcccccaccgtgcgccggggctgggactgcgtgcgcgcctgctgcaccacccagaactgcaacttggcgctagtggagctgcagcccgaccgcggggaggacgccatcgccgcctgcttcctcatcaactgcctctacgagcagaacttcgtgtgcaagttcgcgcccagggagggcttcatcaactacctcacgagggaagtgtaccgctcctaccgccagctgcggacccagggctttggagggtctgggatccccaaggcctgggcaggcatagacttgaaggtacaaccccaggaacccctggtgctgaaggatgtggaaaacacagattggcgcctactgcggggtgacacggatgtcagggtagagaggaaagacccaaaccaggtggaactgtggggactcaaggaaggcacctacctgttccagctgacagtgactagctcagaccacccagaggacacggccaacgtcacagtcactgtgctgtccaccaagcagacagaagactactgcctcgcatccaacaaggtgggtcgctgccggggctctttcccacgctggtactatgaccccacggagcagatctgcaagagtttcgtttatggaggctgcttgggcaacaagaacaactaccttcgggaagaagagtgcattctagcctgtcggggtgtgcaaggtgggcctttgagaggcagctctggggctcaggcgactttcccccagggcccctccatggaaaggcgccatccagtgtgctctggcacctgtcagcccacccagttccgctgcagcaatggctgctgcatcgacagtttcctggagtgtgacgacacccccaactgccccgacgcctccgacgaggctgcctgtgaaaaatacacgagtggctttgacgagctccagcgcatccatttccccagtgacaaagggcactgcgtggacctgccagacacaggactctgcaaggagagcatcccgcgctggtactacaaccccttcagcgaacactgcgcccgctttacctatggtggttgttacggcaacaagaacaactttgaggaagagcagcagtgcctcgagtcttgtcgcggcatctccaagaaggatgtgtttggcctgaggcgggaaatccccattcccagcacaggctctgtggagatggctgtcgcagtgttcctggtcatctgcattgtggtggtggtagccatcttgggttactgcttcttcaagaaccagagaaaggacttccacggacaccaccaccacccaccacccacccctgccagctccactgtctccactaccgaggacacggagcacctggtctataaccacaccacgcggcccctctgagcctgggtctcaccggctctcacctggccctgcttcctgcttgccaaggcagaggcctgggctgggaaaaactttggaaccagactcttgcctgtttcccaggcccactgtgcctcagagaccagggctccagcccctcttggagaagtctcagctaagctcacgtcctgagaaagctcaaaggtttggaaggagc

SEQ ID NO: 293631 - DNA, 1590 bp, Artificial Sequence
  derived and/or modified sequence
atggcccccgccagaaccatggccagagccagactggcccccgccggcatccccgccgtggccctgtggctgctgtgcaccctgggcctgcagggcacccaggccggccccccccccgccccccccggcctgcccgccggcgccgactgcctgaacagcttcaccgccggcgtgcccggcttcgtgctggacaccaacgccagcgtgagcaacggcgccaccttcctggagagccccaccgtgagaagaggctgggactgcgtgagagcctgctgcaccacccagaactgcaacctggccctggtggagctgcagcccgacagaggcgaggacgccatcgccgcctgcttcctgatcaactgcctgtacgagcagaacttcgtgtgcaagttcgcccccagagagggcttcatcaactacctgaccagagaggtgtacagaagctacagacagctgagaacccagggcttcggcggcagcggcatccccaaggcctgggccggcatcgacctgaaggtgcagccccaggagcccctggtgctgaaggacgtggagaacaccgactggagactgctgagaggcgacaccgacgtgagagtggagagaaaggaccccaaccaggtggagctgtggggcctgaaggagggcacctacctgttccagctgaccgtgaccagcagcgaccaccccgaggacaccgccaacgtgaccgtgaccgtgctgagcaccaagcagaccgaggactactgcctggccagcaacaaggtgggcagatgcagaggcagcttccccagatggtactacgaccccaccgagcagatctgcaagagcttcgtgtacggcggctgcctgggcaacaagaacaactacctgagagaggaggagtgcatcctggcctgcagaggcgtgcagggcggccccctgagaggcagcagcggcgcccaggccaccttcccccagggccccagcatggagagaagacaccccgtgtgcagcggcacctgccagcccacccagttcagatgcagcaacggctgctgcatcgacagcttcctggagtgcgacgacacccccaactgccccgacgccagcgacgaggccgcctgcgagaagtacaccagcggcttcgacgagctgcagagaatccacttccccagcgacaagggccactgcgtggacctgcccgacaccggcctgtgcaaggagagcatccccagatggtactacaaccccttcagcgagcactgcgccagattcacctacggcggctgctacggcaacaagaacaacttcgaggaggagcagcagtgcctggagagctgcagaggcatcagcaagaaggacgtgttcggcctgagaagagagatccccatccccagcaccggcagcgtggagatggccgtggccgtgttcctggtgatctgcatcgtggtggtggtggccatcctgggctactgcttcttcaagaaccagagaaaggacttccacggccaccaccaccaccccccccccacccccgccagcagcaccgtgagcaccaccgaggacaccgagcacctggtgtacaaccacaccaccagacccctgtag

SEQ ID NO: 293632 - DNA, 1491 bp, Artificial Sequence
  derived and/or modified sequence
atggcccccgccagaaccatggccagagccagactggcccccgccgactgcctgaacagcttcaccgccggcgtgcccggcttcgtgctggacaccaacgccagcgtgagcaacggcgccaccttcctggagagccccaccgtgagaagaggctgggactgcgtgagagcctgctgcaccacccagaactgcaacctggccctggtggagctgcagcccgacagaggcgaggacgccatcgccgcctgcttcctgatcaactgcctgtacgagcagaacttcgtgtgcaagttcgcccccagagagggcttcatcaactacctgaccagagaggtgtacagaagctacagacagctgagaacccagggcttcggcggcagcggcatccccaaggcctgggccggcatcgacctgaaggtgcagccccaggagcccctggtgctgaaggacgtggagaacaccgactggagactgctgagaggcgacaccgacgtgagagtggagagaaaggaccccaaccaggtggagctgtggggcctgaaggagggcacctacctgttccagctgaccgtgaccagcagcgaccaccccgaggacaccgccaacgtgaccgtgaccgtgctgagcaccaagcagaccgaggactactgcctggccagcaacaaggtgggcagatgcagaggcagcttccccagatggtactacgaccccaccgagcagatctgcaagagcttcgtgtacggcggctgcctgggcaacaagaacaactacctgagagaggaggagtgcatcctggcctgcagaggcgtgcagggcggccccctgagaggcagcagcggcgcccaggccaccttcccccagggccccagcatggagagaagacaccccgtgtgcagcggcacctgccagcccacccagttcagatgcagcaacggctgctgcatcgacagcttcctggagtgcgacgacacccccaactgccccgacgccagcgacgaggccgcctgcgagaagtacaccagcggcttcgacgagctgcagagaatccacttccccagcgacaagggccactgcgtggacctgcccgacaccggcctgtgcaaggagagcatccccagatggtactacaaccccttcagcgagcactgcgccagattcacctacggcggctgctacggcaacaagaacaacttcgaggaggagcagcagtgcctggagagctgcagaggcatcagcaagaaggacgtgttcggcctgagaagagagatccccatccccagcaccggcagcgtggagatggccgtggccgtgttcctggtgatctgcatcgtggtggtggtggccatcctgggctactgcttcttcaagaaccagagaaaggacttccacggccaccaccaccaccccccccccacccccgccagcagcaccgtgagcaccaccgaggacaccgagcacctggtgtacaaccacaccaccagacccctgtag

SEQ ID NO: 293633 - DNA, 1590 bp, Artificial Sequence
  derived and/or modified sequence
atggctccagccagaactatggcgagggcccggcttgcacccgctgggatccccgcggttgccctgtggctgctttgcactcttgggctccaaggtacccaggctgggccccctcctgctcctccaggacttcctgctggcgctgattgcctgaacagtttcaccgccggagttcccggattcgtcctggacacaaatgcatccgtctccaacggagcaaccttccttgaaagcccaacagtgcggcgtggatgggactgcgtcagggcctgctgcacaacacagaattgcaatcttgctctcgtggagctgcagccagatcgtggcgaagacgcgatagccgcctgctttctgatcaactgtctgtacgagcagaatttcgtctgcaaattcgcacccagagaggggtttatcaactatttaacccgcgaggtttatcggtcatatcgccagttgcgcacacagggatttggaggatcagggataccaaaggcatgggctgggatcgacctgaaagtgcagcctcaggagccgctggtgctcaaggatgtagagaacactgattggaggctgctgagaggtgacactgacgtacgagtcgaaaggaaagatcccaaccaggtggaactgtggggcctcaaggaaggcacgtatctatttcagcttacagttaccagctcggaccaccccgaggacactgccaacgtcaccgtaacagtgctttctacaaagcagacagaagactattgtctcgcttccaacaaggtaggaagatgtcggggatccttccctcgatggtactatgacccaaccgagcagatttgcaagtcctttgtgtatgggggctgcctgggcaataaaaataactacctaagagaagaggagtgcatccttgcctgcagaggagtccaggggggccccttgaggggctcatccggagcccaggcaaccttccctcaaggtccatccatggagaggagacatccagtgtgctctggaacctgccaacctactcagtttcggtgctcgaacggatgctgcatagacagctttctcgagtgcgacgacactcctaactgccctgatgcctccgacgaggccgcctgtgagaaatatacttccggattcgacgaactccagcgcatacattttccgagcgataagggccattgcgtcgacctgcccgacaccgggctctgtaaggagtctataccgaggtggtattataaccctttctctgaacactgtgccaggttcacttacggcggatgctacggcaacaagaacaattttgaagaagaacagcagtgtctggagagttgtaggggaatcagcaaaaaggatgtgttcggcctgaggagagagatcccgatcccctccaccggaagtgttgaaatggctgtagccgtatttctggttatctgcatagtcgtcgttgtagccattctggggtactgcttttttaaaaaccagcgtaaggacttccatgggcatcaccaccaccctccccccacccctgcttcatccaccgtctcgacaactgaagataccgagcacttagtttacaaccacacaacccgcccactctag

SEQ ID NO: 293634 - DNA, 3031 bp, Artificial Sequence
  derived and/or modified sequence
gactcagtttcaccagaaaccagggggagaaggcggccgagccccagctctccgagcaccgggtcggaagccgcgacccgagccgcgcaggaagctgggaccggaacctcggcggacccggccccacccaactcacctgcgcaggtcaccagcaccctcggaacccagaggcccgcgctctgaaggtgacccccctggggaggaaggcgatggcccctgcgaggacgatggcccgcgcccgcctcgccccggccggcatccctgccgtcgccttgtggcttctgtgcacgctcggcctccagggcacccaggccgggccaccgcccgcgccccctgggctgcccgcgggagccgactgcctgaacagctttaccgccggggtgcctggcttcgtgctggacaccaacgcctcggtcagcaacggagctaccttcctggagtcccccaccgtgcgccggggctgggactgcgtgcgcgcctgctgcaccacccagaactgcaacttggcgctagtggagctgcagcccgaccgcggggaggacgccatcgccgcctgcttcctcatcaactgcctctacgagcagaacttcgtgtgcaagttcgcgcccagggagggcttcatcaactacctcacgagggaagtgtaccgctcctaccgccagctgcggacccagggctttggagggtctgggatccccaaggcctgggcaggcatagacttgaaggtacaaccccaggaacccctggtgctgaaggatgtggaaaacacagattggcgcctactgcggggtgacacggatgtcagggtagagaggaaagacccaaaccaggtggaactgtggggactcaaggaaggcacctacctgttccagctgacagtgactagctcagaccacccagaggacacggccaacgtcacagtcactgtgctgtccaccaagcagacagaagactactgcctcgcatccaacaaggtgggtcgctgccggggctctttcccacgctggtactatgaccccacggagcagatctgcaagagtttcgtttatggaggctgcttgggcaacaagaacaactaccttcgggaagaagagtgcattctagcctgtcggggtgtgcaaggtgggcctttgagaggcagctctggggctcaggcgactttcccccagggcccctccatggaaaggcgccatccagtgtgctctggcacctgtcagcccacccagttccgctgcagcaatggctgctgcatcgacagtttcctggagtgtgacgacacccccaactgccccgacgcctccgacgaggctgcctgtgaaaaatacacgagtggctttgacgagctccagcgcatccatttccccagtgacaaagggcactgcgtggacctgccagacacaggactctgcaaggagagcatcccgcgctggtactacaaccccttcagcgaacactgcgcccgctttacctatggtggttgttacggcaacaagaacaactttgaggaagagcagcagtgcctcgagtcttgtcgcggcatctccaagaaggatgtgtttggcctgaggcgggaaatccccattcccagcacaggctctgtggagatggctgtcgcagtgttcctggtcatctgcattgtggtggtggtagccatcttgggttactgcttcttcaagaaccagagaaaggacttccacggacaccaccaccacccaccacccacccctgccagctccactgtctccactaccgaggacacggagcacctggtctataaccacaccacgcggcccctctgagcctgggtctcaccggctctcacctggccctgcttcctgcttgccaaggcagaggcctgggctgggaaaaactttggaaccagactcttgcctgtttcccaggcccactgtgcctcagagaccagggctccagcccctcttggagaagtctcagctaagctcacgtcctgagaaagctcaaaggtttggaaggagcagaaaacccttgggccagaagtaccagactagatggacctgcctgcataggagtttggaggaagttggagttttgtttcctctgttcaaagctgcctgtccctaccccatggtgctaggaagaggagtggggtggtgtcagaccctggaggccccaaccctgtcctcccgagctcctcttccatgctgtgcgcccagggctgggaggaaggacttccctgtgtagtttgtgctgtaaagagttgctttttgtttatttaatgctgtggcatgggtgaagaggaggggaagaggcctgtttggcctctctatcctctcttcctcttcccccaagattgagctctctgcccttgatcagccccaccctggcctagaccagcagacagagccaggagaagctcagctgcattccgcagcccccacccccaaggttctccaacatcacagcccagcccgcccactgggtaataaaagtggtttgtggagtttctggctctgttctgtgggccaggagagggactaggttgctggggggtgatgggaccgtcctgttcagctggttcaggcttcagccaccctgttgagcaggttttcccatcgtctctctcgaaactggcctggcccctgactttggagagcagtgccatgtttgaccaccagaggggaggagtgagcgggccacgggagccacgagtgtggggaggctgcagtgctgctgtgtagcatttcttcctggtgtgagcctctccacaagcctgttgagtggttgagctctccacaattctgctcatttggaggttggggttaggggtgcacaggcaccttggctcctacctccatgttagggcccaggtgactagctgtctccctcccaacagaagccctggcttctgcgctggagtgcagcacccccaaccaggctctgagctccttcccaggagcctttagtagagacacgccactccaacccacacccctgcatttgttcaagctacctcccggtgccaaaaaaaaaaaaaaatcatactttgagctca

SEQ ID NO: 293635 - DNA, 1491 bp, Artificial Sequence
  derived and/or modified sequence
atggctccggccaggactatggccagggctagactggcaccagccgattgtttgaacagctttaccgcaggggttccggggtttgtcctcgatacaaacgcgagcgtcagcaacggcgctaccttcctcgagagcccaacagtacgcaggggatgggattgtgtcagggcgtgctgtaccacgcaaaactgtaatttggccctggttgaattgcagccagaccgaggcgaagatgccatcgccgcctgcttcttgattaattgcctttacgagcagaatttcgtatgcaaattcgcaccacgagaggggttcattaactacctgacgcgcgaagtgtatagatcctaccgccagctcagaacgcagggatttggcggctctggcatacccaaagcatgggccggcatcgacctgaaagtgcaaccacaagaaccacttgtcctcaaagatgtagagaatactgactggagactgctgcgaggcgatacagatgtgagagtcgaaagaaaggaccctaaccaggtcgaactatgggggttaaaggagggtacatatctctttcaattaactgtgacttcaagcgaccaccctgaggacactgcaaacgtgacagttaccgttctgtcaaccaagcaaaccgaagattactgcctggcaagcaacaaagtggggaggtgtcgaggctccttcccacggtggtattatgatccaaccgaacagatctgtaaaagcttcgtgtatggtgggtgccttggcaacaaaaacaattacctaagggaagaagagtgcatcctggcttgtagaggggtgcagggaggtcctcttagaggctctagtggtgcccaggcaacatttccacagggaccatccatggaacgccgtcacccagtgtgttctgggacttgtcagcccacccaatttcggtgcagcaacggctgttgcattgatagtttcctggaatgcgatgatacccccaattgcccagatgcctcggacgaagccgcctgcgaaaagtacacctccgggtttgatgagctgcaacgcatacacttccccagcgataaagggcattgcgttgatctgcctgatacgggtctctgcaaggaatctattccccgttggtactacaacccgttcagcgaacattgtgcacgcttcacatatgggggttgttatggcaataagaacaattttgaggaagaacagcagtgtttggaatcctgtagagggattagcaagaaggacgttttcggattgcgcagggaaattcccataccctccaccgggagcgttgagatggccgtggcagtattcctggtcatctgcattgttgtggtcgtggcgattctgggctactgtttctttaaaaatcaaaggaaggactttcatggccatcaccaccatcctcctccgaccccagcatcttccaccgttagcaccacagaggatactgagcatttagtgtacaaccatacaaccaggcctttgtag

SEQ ID NO: 293636 - DNA, 1590 bp, Artificial Sequence
  derived and/or modified sequence
atggccccagcccggaccatggcccgggcccggctggccccagctggcatcccagctgtggccctgtggctgctgtgcaccctgggcctgcagggcacccaggccggccccccaccagcccctcctggcctgcctgctggagctgactgcctgaacagcttcaccgctggggtgcccggctttgtgctggacaccaatgcctctgtgtccaatggagccaccttcctggagagccccaccgtgcggcggggctgggactgtgtgcgggcctgctgcaccacccagaactgcaacctggccctggtggagctgcagcctgacagaggagaagatgccatcgccgcctgcttcctgatcaactgcctgtatgagcagaactttgtgtgcaagtttgccccccgggagggcttcatcaactacctgacccgggaggtgtaccgcagctaccggcagctgcggacccagggctttggaggcagcggcatccccaaggcctgggccggcatcgacctgaaggtgcagccccaggagcccctggtgctgaaggatgtggagaacacagactggaggctgctgcggggggacacagatgtgcgggtggagaggaaggaccccaaccaggtggagctgtggggcctgaaggagggcacctacctgttccagctgactgtgaccagcagtgaccaccctgaggacacagccaacgtgacagtgacagtgctgagcaccaagcagacagaggactactgcctggccagcaacaaggtgggccgctgccggggcagcttcccccgctggtactatgaccccacagagcagatctgcaagagctttgtgtatggaggctgcctgggcaacaagaacaactacctgcgggaggaggagtgcatcctggcctgccggggcgtgcagggcggccccctgcggggcagcagcggggcccaggccaccttcccccagggccccagcatggagcggcggcaccctgtgtgcagcggcacctgccagcccacccagttccgctgcagcaatggctgctgcatcgacagcttcctggagtgtgatgacacccccaactgcccagatgccagtgatgaagctgcctgtgagaagtacaccagcggctttgatgagctgcagaggatccacttccccagcgacaagggccactgtgtggacctgcctgacaccggcctgtgcaaggagagcatcccccgctggtactacaaccccttcagcgagcactgtgcccgcttcacctatggaggctgctacggcaacaagaacaactttgaggaggagcagcagtgcctggagagctgccggggcatcagcaagaaggatgtgtttggcctgcggcgggagatccccatccccagcactggatctgtggagatggctgtggccgtgttcctggtgatctgcatcgtggtggtggtggccatcctgggctactgcttcttcaagaaccagaggaaggacttccacggccaccaccaccaccccccacccaccccagccagcagcacagtgtccaccacagaggacacagagcacctggtgtacaaccacaccacccggcccctgtag

SEQ ID NO: 293637 - DNA, 1491 bp, Artificial Sequence
  derived and/or modified sequence
atggccccagcccggaccatggcccgggcccggctggccccagctgactgcctgaacagcttcaccgctggggtgcccggctttgtgctggacaccaatgcctctgtgtccaatggagccaccttcctggagagccccaccgtgagaagaggctgggactgtgtgcgggcctgctgcaccacccagaactgcaacctggccctggtggagctgcagcctgacagaggagaagatgccatcgccgcctgcttcctgatcaactgcctgtatgagcagaactttgtgtgcaagtttgccccccgggagggcttcatcaactacctgacccgggaggtgtaccgcagctaccggcagctgcggacccagggctttggaggcagcggcatccccaaggcctgggccggcatcgacctgaaggtgcagccccaggagcccctggtgctgaaggatgtggagaacacagactggaggctgctgcggggggacacagatgtgcgggtggagaggaaggaccccaaccaggtggagctgtggggcctgaaggagggcacctacctgttccagctgactgtgaccagcagtgaccaccctgaggacacagccaacgtgacagtgacagtgctgagcaccaagcagacagaggactactgcctggccagcaacaaggtgggccgctgccggggcagcttcccccgctggtactatgaccccacagagcagatctgcaagagctttgtgtatggaggctgcctgggcaacaagaacaactacctgcgggaggaggagtgcatcctggcctgccggggcgtgcagggcggccccctgcggggcagcagcggggcccaggccaccttcccccagggccccagcatggagaggaggcaccctgtgtgcagcggcacctgccagcccacccagttccgctgcagcaatggctgctgcatcgacagcttcctggagtgtgatgacacccccaactgcccagatgccagtgatgaggccgcctgtgagaagtacaccagcggctttgatgagctgcagaggatccacttccccagcgacaagggccactgtgtggacctgcctgacaccggcctgtgcaaggagagcatcccccgctggtactacaaccccttcagcgagcactgtgcccgcttcacctacggcggctgctacggcaacaagaacaactttgaggaggagcagcagtgcctggagagctgccggggcatcagcaagaaggatgtgtttggcctgcggcgggagatccccatccccagcacaggctctgtggagatggctgtggccgtgttcctggtgatctgcatcgtggtggtggtggccatcctgggctactgcttcttcaagaaccagaggaaggacttccacggccaccaccaccaccccccacccaccccagccagcagcacagtgtccaccacagaggacacagagcacctggtgtacaaccacaccacccggcccctgtag

SEQ ID NO: 293638 - DNA, 1590 bp, Artificial Sequence
  derived and/or modified sequence
atggcccccgcccggaccatggcccgggcccggctggcccccgccggaatacctgcggtggctctctggctactttgcactctcgggctgcagggcacccaggcgggtcctcctccagcacctcccggcctgccagccggcgcggactgcttgaatagcttcacggccggagtgcccggcttcgtgttggataccaatgcaagcgtcagcaatggggccacattcctggaaagtcccaccgtgcgaaggggttgggactgcgtccgggcgtgttgtacaacacaaaattgtaatctagccttggttgaacttcagcccgatcgcggagaagacgcaattgctgcttgttttctaataaactgcctctacgagcagaatttcgtgtgtaagttcgctcctcgggaaggtttcatcaactatctcacgcgtgaggtgtacagatcttaccggcagctgcgtactcagggcttcggagggtccggcatcccaaaggcttgggcgggcatcgaccttaaagtccagcctcaggaacctttggtactgaaggacgtcgagaatactgactggcgtctcctgaggggggacaccgacgtccgagttgagaggaaagaccccaaccaggtcgagttgtggggtctgaaggaggggacttacctgttccagctgaccgtgacgagcagtgaccacccagaagacacagcgaatgtgacagtgacggttttaagcactaagcagacggaggactactgtctggcgtcaaataaagtcggacgatgccgaggttcttttccccggtggtactacgatccaacagagcagatttgtaaaagttttgtttatggcggttgcctcggtaataaaaacaactatcttcgggaagaggagtgcattctggcatgtcgaggcgtccagggcggtccactgagagggagctctggagctcaggcaacctttcctcagggaccatcaatggagaggcgccatccagtctgttcaggaacatgtcaacccacccaatttcggtgtagcaacggctgttgcatcgattctttccttgaatgcgatgacacccctaactgtcccgacgcgtcagacgaagctgcctgtgaaaaatatacctcagggtttgacgagctgcagcgcattcattttccatctgataaaggccactgtgttgatctccctgatacgggattatgtaaagagtcgatacctcgctggtactataatcccttctccgagcattgcgcgaggttcacgtacggcggctgttacggaaataagaacaacttcgaggaggaacagcagtgtctcgagtcatgcagagggatatcaaaaaaggacgtgttcgggttgcggcgggagattccgatcccaagcaccggttccgtcgaaatggccgtggctgtattcctggtgatctgtatcgtcgtagtggtcgccattttgggatactgcttcttcaagaaccaaaggaaagactttcacggccatcatcaccaccctccgccaactccagcctctagcacagtgtcaaccactgaggacaccgagcacctggtctacaaccacaccaccagaccattatag

SEQ ID NO: 293639 - DNA, 1491 bp, Artificial Sequence
  derived and/or modified sequence
atggcccccgcccggaccatggcccgggcccggctggcccccgccgactgtctgaattcattcactgccggggtacctggttttgtgctggataccaacgcaagcgtgtcaaacggtgctacgtttctggaaagccccacagtgcgcagaggatgggattgcgtgagagcttgttgtacgacacagaactgcaatctggctctggttgagctgcagcccgatcgcggagaggacgccattgccgcttgtttcctgatcaattgtctgtatgaacaaaattttgtctgtaagtttgctcctcgcgaggggtttattaactacctgactagagaggtgtaccgaagttatcgacaactcagaacccaaggttttggcggctcgggtattcctaaagcatgggctggcattgatctgaaagtccagcctcaggaacctctcgtccttaaagacgtagagaacacagactggaggcttcttagaggagacactgatgtgagggtagagcgaaaagaccccaaccaggtggaactctggggcttgaaggagggtacttacctgttccaattaaccgttaccagctcagaccatccagaggatactgctaacgttaccgtgacagtattgtctaccaaacagacggaggattactgtctagcctccaataaagtcggacgatgccggggctcttttccacggtggtactacgatcccacagaacagatttgcaaatcttttgtctacggaggctgtctcggtaataaaaataattatcttagggaggaagaatgcattctcgcttgtaggggcgttcaaggggggcccctgcggggatcctcaggggctcaggccaccttcccgcagggcccatctatggaaaggagacacccagtctgtagtgggacctgtcagccgacgcagttcagatgcagtaacgggtgttgcatcgattcgttcctcgagtgtgatgataccccaaattgcccggatgcatcagatgaagccgcatgtgaaaaatatactagtggtttcgatgaactgcaacgaatccattttccgtctgacaagggccactgtgttgaccttcctgacaccggcttgtgcaaagagtctataccacggtggtattataacccgttcagcgagcactgtgcacgctttacctacggtggatgctacggaaataagaacaatttcgaggaggagcagcagtgtctggaatcttgcagaggaatttctaagaaggacgtgttcggtctgcgccgcgagatccccatccctagtacggggtcagtggagatggcagttgccgtatttctggtaatatgcatcgtggtggttgttgcaatactaggctactgcttttttaagaaccaacgaaaagactttcacggccaccatcatcatccaccccccactccggcatcttccactgtttcaactacagaagacaccgagcacctcgtgtacaaccacacaactagacccttatag

SEQ ID NO: 293640 - RNA, 1590 nt, Artificial Sequence
  derived and/or modified sequence
auggcaccagcaagaacuauggcucgggcccgacuggcucccgccggcauuccugcgguggcauuguggcuucuuuguacccugggacuucaaggcacccaagcaggcccuccuccugcuccgccaggcuuaccagcaggcgcugauugucucaauucuuuuacagcaggagucccuggauucgugcuggauacaaacgcuucugucucaaauggagcuaccuuucucgaaucucccacuguuagacguggcugggacugcguccgggcaugcuguaccacacagaauugcaaccuggcacuuguggaguugcagccagaccguggggaggaugcaaucgccgccuguuuccuuauuaacugccucuaugagcagaacuucguuugcaaguucgccccuagagaagguuuuauuaauuaccugacgagggaagucuacagaucuuaucgucagcugagaacucaggguuuuggagggagcggaauacccaaggcgugggccgguaucgaucugaaagugcagccccaagaaccucuggugcugaaggacguggagaacacugacuggagacugcugagaggugacacggaugugcgcguggaacggaaagaucccaaccaaguugagcucuggggccugaaggaggguacuuaccuguuccaguuaacaguuacuucauccgaucauccagaggacaccgcaaaugugaccgucaccgugcugucuacaaagcagacagaagacuauugucuugccuccaauaaagucggccgcugccggggcagcuucccuagaugguauuaugauccuacagaacagauuugcaagucauucguauauggcggcugccucggaaauaaaaacaacuaucugagagaagaagaauguauccuggccuguagaggugugcaaggcggaccccugagagguaguucgggggcucaggcuacuuuuccccaaggcccauccauggaacggcggcauccaguuugcuccgggacgugucagccuacccaauuccgcuguuccaacggguguugcauagauucauuucuugagugcgaugauacgcccaauugcccugaugccagcgaugaggcugccugugaaaaguauacaucaggguuugacgaguugcagagaauccauuuccccagcgacaaaggacacugcguugaccugcccgacaccggacuuuguaaggagucgauuccgagaugguacuacaaccccuucagcgaacauugcgcccgguuuacuuacggggggugcuacgggaauaagaacaacuuugaagaggagcaacagugccuggaauccugccgagggaucucuaaaaaggacguuuucggacuucgacgagagauccccaucccuuccacuggcuccgucgagauggccgucgcuguguuucucgugauaugcauuguagugguaguggccauucugggcuacuguuucuuuaagaaucagcgaaaggauuuucaugggcaucaucaucaucccccgccgaccccugcuuccagcacagugucaaccacggaggacacagaacacuuaguguacaaccacacaacgcggccacucuag

SEQ ID NO: 293641 - RNA, 1491 nt, Artificial Sequence
  derived and/or modified sequence
auggcacccgcuaggacaauggcuagagcacggcuggcccccgcagauugucugaauaguuuuaccgccggaguaccgggcuuugugcuggacacaaaugccagcgucucaaacggagccacuuuccucgaaucaccaaccguucgaagagguugggauugugugcgcgcauguuguacaacacagaacuguaauuuagcucugguggagcuccaaccugaucgaggugaggaugccauugccgccuguuuccuuaucaauugcuuguacgaacagaacuuugugugcaaguuugccccacgagaaggcuucaucaacuacuuaacuagagaggucuacagaucuuauagacagcugcgcacucagggauucgggggcucagggaucccuaaggcaugggccggaaucgaccugaagguccagccacaggaaccccugguuuuaaaagaugucgaaaacacugauuggcgccuauuaagaggggacaccgaugugcgaguggagcgaaaggacccgaaccagguagagcuguggggacuaaaagagggcacuuaccuuuuccagcugaccgucaccaguuccgaucauccagaggacacugcgaaugucaccgugacuguguuaucuacaaaacagacagaagauuauugccuggcaucaaauaaagugggacgcugccgcggcagcuuuccacggugguacuacgacccuaccgaacagauuugcaaaucauucguuuacggaggaugucuuggcaacaaaaauaacuauuugagagaagaagagugcauucuggcuugucgcggggugcaggguggaccccugcggggcucaagcggagcucaagccaccuuuccccagggcccguccauggagcggaggcauccuguuuguuccgggaccugccagccuacccaguuucgcuguuccaacggcugcuguauugauuccuuccuagaaugugacgacacuccuaacuguccggaugcuagcgacgaagcagccugugagaaauacacuucuggcuuugacgaacuccagcgaauccacuuccccuccgacaaaggccauuguguagaucugccggacacaggacugugcaaggagucuauuccgcgcugguacuauaauccuuuuagugaacauugugcaagauucaccuacgggggauguuacggcaacaagaauaacuucgaggaggagcagcagugccucgaauccugucgagguaucuccaagaaggacguuuucggauugcggcgagagauuccuauuccgaguacgggaucuguugaaauggcaguggcuguguucuugguaaucuguaucguggugguuguugccauccuuggauacuguuucuuuaaaaaucagcguaaggauuuucacgggcaccaucaucaccccccaccuacacccgcaucaagcaccguuuccacuaccgaggauacugagcaccugguguauaaucauacaacuaggccccucuag

SEQ ID NO: 293642 - RNA, 1590 nt, Artificial Sequence
  derived and/or modified sequence
auggcuccugcucggacaauggcccgcgcucgucuggcucccgccgguauuccugcaguggcccuguggcucuugugcacacuugggcuucaggggacccaagccggcccuccccccgcccccccuggucugccugccggagcugacugccugaauucuuuuacagcaggggucccuggguucgucuuggauacaaacgcuucuguuucaaauggcgccaccuuuuuagagucaccaacagugagacguggaugggauuguguaagagcuugcugcacaacccagaacuguaaccuugcccugguggaauuacagccagaccggggggaggaugcuauugcugccugcuuucucauuaauugucucuacgagcagaacuucguaugcaaguuugcccccagagaaggcuuuaucaacuaucucacccgcgagguguaucggagcuacagacaacuaaggacacaaggauucggaggcaguggaauaccaaaagcuugggcagggauagaucuaaaagugcaaccucaggaaccuuugguucuaaaggacguggaaaauaccgacuggagacuucucagaggggauacagauguaaggguggaacggaaagaucccaaccaaguugagcucuggggccugaaggaggguacuuaccuguuccaguuaacaguuacuucauccgaucauccagaggacaccgcaaaugugaccgucaccgugcugucuacaaagcagacagaagacuauugucuugccuccaauaaagucggccgcugccggggcagcuucccuagaugguauuaugauccuacagaacagauuugcaagucauucguauauggcggcugccucggaaauaaaaacaacuaucugagagaagaagaauguauccuggccuguagaggaguucagggcgguccacugcgagggagcuccggcgcacaggcgaccuucccccagggucccuccauggagcggcgucaccccguguguucgggaaccugucagccaacccaguuucgauguuccaacggauguuguaucgauucauuuuuagaaugcgacgauaccccgaauugcccagacgcuuccgaugaagcugcuugugagaaauacacaucaggauuugacgaguugcagagaauacacuucccauccgauaaaggccauuguguugaucugcccgauacugggcugugcaaggagucuaucccuagaugguauuacaaucccuucucugaacacugugccagguucaccuauggaggaugcuaugggaauaagaauaauuuugaggaggagcagcaaugucuggaaaguuguagaggaaucucaaagaaggauguuuuuggauuaagacgcgagauaccaauaccuagcaccggauccguugagauggcagucgcuguguuucugguaauuuguauuguggugguuguggccauucugggcuauuguuuuuuuaagaaccaaagaaaagauuuucacggccaccaucaucaccccccaccuacacccgccagcaguacuguuucgacgacagaggauacagaacaucuuguauacaaucacacaaccagaccacuuuag

SEQ ID NO: 293643 - RNA, 1491 nt, Artificial Sequence
  derived and/or modified sequence
auggccccugcuaggacuauggccagagcccgacuggccccggcagauuguuugaauuccuuuaccgcaggugucccuggcuucgucuuagauaccaacgccagcgugucaaacggcgcuacauucuuggaaucccccaccguuagaagaggcugggacugcguaagagccuguugcacaacccagaauugcaaucuugcucucgucgagcuacaacccgauagaggagaggaugccaucgcugccuguuuccugauuaacugucuguacgagcagaauuuuguaugcaaauucgcaccccgagagggcuuuauuaacuaccucaccagagaggucuaccggucuuauagacagcuucgaacacaggguuuuggaggaucuggcauacccaaggcaugggcugggauagaccugaaagugcaaccacaggagccacuuguauugaaggacguugagaacacggacuggcgguuacuucggggagacacagacguaagaguugagcgcaaggacccaaaccaggucgaacuauggggacugaaagagggcacauaccuguuccaacucacagugacuuccagcgaccaccccgaggauaccgccaaugugacaguuacaguucuguccacgaaacagaccgaggauuauugccuggcaucaaacaaggucggcaggugccgcggguccuucccuagaugguacuaugaucccacagagcaaauuugcaaaucauuuguauauggaggcugucucgggaauaaaaauaauuaucuuagagaagaggagugcauucuggcuugucguggcguucaggggggcccccugcgggggagcuccggugcccaggcaacauucccccaaggaccuaguauggaaagaagacaucccgugugcuccggcacaugccaaccaacucaguuccgaugcucuaauggcugcugcauagauaguuuccuagagugcgaugauacacccaacuguccggaugcuucugacgaagcggccugcgaaaaguacaccuccggcuuugaugaacugcagaggauucacuuuccuagcgauaagggucacugcgucgauuugcccgauacaggguuguguaaagagucuaucccuagaugguauuacaauccguucuccgagcauugcgcgagauucacauacgggggcuguuaugggaauaaaaacaacuucgaggaagaacagcaaugccuugaaagcuguagggggauuucuaaaaaagacgucuucggauugcggagagaaaucccgauaccaucaaccggaucagucgaaauggcagucgcaguuuuucugguuaucugcauuguaguaguuguagccauucugggcuacugcuuuuuuaagaaccagagaaaggauuuucacggucaccaucaucauccaccuccaacaccagccagcucaacagucagcacuacagaagauacugagcaccucguuuacaaccauaccacacggccacucuag

SEQ ID NO: 293644 - protein, 872 aa, Artificial Sequence
  derived and/or modified sequence
MATACKRSGEPQSDDIEASRMKRAAAKHLIERYYHQLTEGCGNEACTNEFCASCPTFLRMDNNAAAIKALELYKINAKLCDPHPSKKGASSAYLENSKGAPNNSCSEIKMNKKGARIDFKDVTYLTEEKVYEILELCREREDYSPLIRVIGRVFSSAEALVQSFRKVKQHTKEELKSLQAKDEDKDEDEKEKAACSAAAMEEDSEASSSRIGDSSQGDNNLQKLGPDDVSVDIDAIRRVYTRLLSNEKIETAFLNALVYLSPNVECDLTYHNVYSRDPNYLNLFIIVMENRNLHSPEYLEMALPLFCKAMSKLPLAAQGKLIRLWSKYNADQIRRMMETFQQLITYKVISNEFNSRNLVNDDDAIVAASKCLKMVYYANVVGGEVDTNHNEEDDEEPIPESSELTLQELLGEERRNKKGPRVDPLETELGVKTLDCRKPLIPFEEFINEPLNEVLEMDKDYTFFKVETENKFSFMTCPFILNAVTKNLGLYYDNRIRMYSERRITVLYSLVQGQQLNPYLRLKVRRDHIIDDALVRLEMIAMENPADLKKQLYVEFEGEQGVDEGGVSKEFFQLVVEEIFNPDIGMFTYDESTKLFWFNPSSFETEGQFTLIGIVLGLAIYNNCILDVHFPMVVYRKLMGKKGTFRDLGDSHPVLYQSLKDLLEYEGNVEDDMMITFQISQTDLFGNPMMYDLKENGDKIPITNENRKEFVNLYSDYILNKSVEKQFKAFRRGFHMVTNESPLKYLFRPEEIELLICGSRNLDFQALEETTEYDGGYTRDSVLIREFWEIVHSFTDEQKRLFLQFTTGTDRAPVGGLGKLKMIIAKNGPDTERLPTSHTCFNVLLLPEYSSKEKLKERLLKAITYAKGFGML

SEQ ID NO: 293645 - protein, 872 aa, Artificial Sequence
  derived and/or modified sequence
MRSVCHRSGEPQSDDIEASRMKRAAAKHLIERYYHQLTEGCGNEACTNEFCASCPTFLRMDNNAAAIKALELYKINAKLCDPHPSKKGASSAYLENSKGAPNNSCSEIKMNKKGARIDFKDVTYLTEEKVYEILELCREREDYSPLIRVIGRVFSSAEALVQSFRKVKQHTKEELKSLQAKDEDKDEDEKEKAACSAAAMEEDSEASSSRIGDSSQGDNNLQKLGPDDVSVDIDAIRRVYTRLLSNEKIETAFLNALVYLSPNVECDLTYHNVYSRDPNYLNLFIIVMENRNLHSPEYLEMALPLFCKAMSKLPLAAQGKLIRLWSKYNADQIRRMMETFQQLITYKVISNEFNSRNLVNDDDAIVAASKCLKMVYYANVVGGEVDTNHNEEDDEEPIPESSELTLQELLGEERRNKKGPRVDPLETELGVKTLDCRKPLIPFEEFINEPLNEVLEMDKDYTFFKVETENKFSFMTCPFILNAVTKNLGLYYDNRIRMYSERRITVLYSLVQGQQLNPYLRLKVRRDHIIDDALVRLEMIAMENPADLKKQLYVEFEGEQGVDEGGVSKEFFQLVVEEIFNPDIGMFTYDESTKLFWFNPSSFETEGQFTLIGIVLGLAIYNNCILDVHFPMVVYRKLMGKKGTFRDLGDSHPVLYQSLKDLLEYEGNVEDDMMITFQISQTDLFGNPMMYDLKENGDKIPITNENRKEFVNLYSDYILNKSVEKQFKAFRRGFHMVTNESPLKYLFRPEEIELLICGSRNLDFQALEETTEYDGGYTRDSVLIREFWEIVHSFTDEQKRLFLQFTTGTDRAPVGGLGKLKMIIAKNGPDTERLPTSHTCFNVLLLPEYSSKEKLKERLLKAITYAKGFGML

SEQ ID NO: 293646 - DNA, 2619 bp, Artificial Sequence
  derived and/or modified sequence
atgagaagcgtgtgccacagaagcggcgagccccagagcgacgacatcgaggccagcagaatgaagagagccgccgccaagcacctgatcgagagatactaccaccagctgaccgagggctgcggcaacgaggcctgcaccaacgagttctgcgccagctgccccaccttcctgagaatggacaacaacgccgccgccatcaaggccctggagctgtacaagatcaacgccaagctgtgcgacccccaccccagcaagaagggcgccagcagcgcctacctggagaacagcaagggcgcccccaacaacagctgcagcgagatcaagatgaacaagaagggcgccagaatcgacttcaaggacgtgacctacctgaccgaggagaaggtgtacgagatcctggagctgtgcagagagagagaggactacagccccctgatcagagtgatcggcagagtgttcagcagcgccgaggccctggtgcagagcttcagaaaggtgaagcagcacaccaaggaggagctgaagagcctgcaggccaaggacgaggacaaggacgaggacgagaaggagaaggccgcctgcagcgccgccgccatggaggaggacagcgaggccagcagcagcagaatcggcgacagcagccagggcgacaacaacctgcagaagctgggccccgacgacgtgagcgtggacatcgacgccatcagaagagtgtacaccagactgctgagcaacgagaagatcgagaccgccttcctgaacgccctggtgtacctgagccccaacgtggagtgcgacctgacctaccacaacgtgtacagcagagaccccaactacctgaacctgttcatcatcgtgatggagaacagaaacctgcacagccccgagtacctggagatggccctgcccctgttctgcaaggccatgagcaagctgcccctggccgcccagggcaagctgatcagactgtggagcaagtacaacgccgaccagatcagaagaatgatggagaccttccagcagctgatcacctacaaggtgatcagcaacgagttcaacagcagaaacctggtgaacgacgacgacgccatcgtggccgccagcaagtgcctgaagatggtgtactacgccaacgtggtgggcggcgaggtggacaccaaccacaacgaggaggacgacgaggagcccatccccgagagcagcgagctgaccctgcaggagctgctgggcgaggagagaagaaacaagaagggccccagagtggaccccctggagaccgagctgggcgtgaagaccctggactgcagaaagcccctgatccccttcgaggagttcatcaacgagcccctgaacgaggtgctggagatggacaaggactacaccttcttcaaggtggagaccgagaacaagttcagcttcatgacctgccccttcatcctgaacgccgtgaccaagaacctgggcctgtactacgacaacagaatcagaatgtacagcgagagaagaatcaccgtgctgtacagcctggtgcagggccagcagctgaacccctacctgagactgaaggtgagaagagaccacatcatcgacgacgccctggtgagactggagatgatcgccatggagaaccccgccgacctgaagaagcagctgtacgtggagttcgagggcgagcagggcgtggacgagggcggcgtgagcaaggagttcttccagctggtggtggaggagatcttcaaccccgacatcggcatgttcacctacgacgagagcaccaagctgttctggttcaaccccagcagcttcgagaccgagggccagttcaccctgatcggcatcgtgctgggcctggccatctacaacaactgcatcctggacgtgcacttccccatggtggtgtacagaaagctgatgggcaagaagggcaccttcagagacctgggcgacagccaccccgtgctgtaccagagcctgaaggacctgctggagtacgagggcaacgtggaggacgacatgatgatcaccttccagatcagccagaccgacctgttcggcaaccccatgatgtacgacctgaaggagaacggcgacaagatccccatcaccaacgagaacagaaaggagttcgtgaacctgtacagcgactacatcctgaacaagagcgtggagaagcagttcaaggccttcagaagaggcttccacatggtgaccaacgagagccccctgaagtacctgttcagacccgaggagatcgagctgctgatctgcggcagcagaaacctggacttccaggccctggaggagaccaccgagtacgacggcggctacaccagagacagcgtgctgatcagagagttctgggagatcgtgcacagcttcaccgacgagcagaagagactgttcctgcagttcaccaccggcaccgacagagcccccgtgggcggcctgggcaagctgaagatgatcatcgccaagaacggccccgacaccgagagactgcccaccagccacacctgcttcaacgtgctgctgctgcccgagtacagcagcaaggagaagctgaaggagagactgctgaaggccatcacctacgccaagggcttcggcatgctgtag

SEQ ID NO: 293647 - DNA, 2619 bp, Artificial Sequence
  derived and/or modified sequence
atggccacagcctgtaaacgatccggtgagcctcagtccgatgacattgaagctagccggatgaaaagagcagcggcaaagcatctaatcgagagatattatcaccaactcaccgaaggatgcggcaacgaggcgtgtacaaatgagttttgtgctagctgccccaccttcctgcggatggataataacgctgctgcgattaaagcgctcgagctctataaaatcaacgcaaagctgtgtgatccgcacccatccaaaaaaggggctagtagtgcctatttggaaaatagtaagggcgcgcctaataatagttgtagcgagatcaaaatgaataaaaaaggcgcacggatcgacttcaaagacgtgacttatctgactgaagaaaaagtttatgaaattctcgaattgtgtcgcgagagggaagactattcccctctgatcagagttatagggcgagtcttctctagtgctgaggcccttgtgcagtcttttcgtaaggtgaagcagcacactaaggaggaattgaagtctctgcaggccaaagatgaggacaaggacgaagacgaaaaggagaaggccgcatgtagtgctgctgccatggaggaggattccgaggcttctagcagcaggataggagatagttcccaaggcgacaacaacctgcaaaaactgggcccagatgatgtgtccgtcgacattgacgcgattcgccgggtgtacaccagactcctgtctaatgaaaaaatagaaacggcattccttaacgccttggtttatctttctccaaatgtcgagtgcgacctgacttaccataacgtgtatagtagggacccgaactacctgaatctgttcatcattgtgatggagaaccggaatctgcacagccctgaatacctggagatggccttgccactgttctgcaaggccatgtccaaactgccactggcggcacagggcaagctcatcaggctttggtcaaaatacaacgccgatcaaattagacgtatgatggaaacatttcaacagctgataacttataaagtaataagtaatgagttcaattcacgtaacctcgttaacgatgacgatgcgatagtggccgctagtaagtgtctgaagatggtgtattatgcaaacgttgtcggaggggaagtggatactaatcataatgaagaagacgacgaagagccgatccctgaaagttcggagcttactctacaggagctcttaggcgaagagagacgcaacaagaagggaccgcgggtggatcccctggagacagagctaggtgtaaaaactctggattgcaggaaaccactcataccctttgaagaatttattaatgaacctttaaacgaagttctagagatggataaggactatactttctttaaagtggagactgaaaataagtttagcttcatgacttgtcccttcatactcaatgccgtaacgaaaaacctgggcctctattatgacaatcggatacgaatgtactccgaacgcaggatcacggtcctgtactctctggtccagggccagcagctgaatccatatttaaggctgaaagtgagaagagatcacatcattgacgatgccctggtcagacttgagatgatcgccatggagaacccagcagatctgaaaaaacagctctatgttgagtttgaaggcgagcaaggagtggacgagggcggcgtcagcaaagaatttttccagctggtcgtcgaagagatcttcaatcccgacatcggcatgtttacctacgatgaatcaacgaagttattctggttcaatccaagttccttcgagaccgagggccagttcaccttaatcggaatagtgttggggttagctatttacaataattgtatcctagacgtccactttcccatggtggtatatcgcaagcttatgggtaaaaagggcacgttcagagatctaggggacagccacccagtgctgtatcagtctctgaaagatctcttagagtacgagggcaacgtggaagacgacatgatgataacgttccaaatatcccagactgacctgttcgggaacccgatgatgtacgaccttaaagaaaatggagataagatccccattaccaatgaaaaccggaaggaattcgtgaatttatatagcgattacattttgaataaatcggtggaaaaacaatttaaagcctttcggagaggatttcacatggtcactaacgaatctccactgaaatatctgtttcggcctgaagagatagaactcctgatttgcggatctcgcaacttggatttccaggcactggaggaaactaccgagtatgacggaggttacacccgtgactccgttttaatcagggagttctgggaaatagtgcatagcttcaccgatgagcagaagcgcctgttcctgcagttcaccacaggaaccgatcgcgcccctgtcgggggcttgggcaagctcaagatgatcatagcgaagaatgggccagacactgaacggctgccaaccagtcatacctgctttaatgttctactcttgccagaatactccagtaaagaaaaactcaaagagcggctgttgaaggcaatcacttatgcaaaaggatttggaatgctgtag

SEQ ID NO: 293648 - DNA, 2619 bp, Artificial Sequence
  derived and/or modified sequence
atgcgaagtgtgtgtcataggtccggggagccacaatctgacgatatagaagcctctcggatgaagagggcagctgcaaagcatctcatcgagcgttattaccatcagctgactgaggggtgcggcaacgaggcctgcacgaacgagttttgcgctagctgtccgacattcctgagaatggataacaatgctgcggccatcaaggcactggaactgtataagattaacgccaagttgtgcgacccacatcccagcaagaaaggtgccagttcagcatatctggagaattctaagggtgcaccaaacaactcctgttctgaaatcaagatgaacaagaaaggcgctagaatcgatttcaaggacgtgacttacttaactgaggaaaaggtgtatgaaattctcgagttgtgccgcgaaagagaagactattctccgcttattcgggtgatcggaagagtgttctccagcgccgaggcactggtccagtcctttcgaaaagttaaacaacacacaaaggaagaactgaagtctctccaggccaaggatgaagacaaggacgaggacgagaaagagaaggccgcctgctctgcagcggcgatggaggaagattcagaggctagcagctcccgcatcggggactcaagtcagggggacaacaacctgcaaaagctaggacccgacgacgtatctgtggatatcgatgcaattcgtcgggtctatactcgtctgttgtcaaacgaaaagattgagaccgcatttctcaatgcgcttgtgtacctttctcccaatgtcgaatgtgatttgacttatcataacgtgtattcacgtgaccccaattaccttaatctgttcattatcgttatggaaaaccgtaatcttcacagtccagaatacttagagatggccctcccgctgttttgtaaggccatgagcaaactgcctctcgcggctcagggtaagctgattaggctgtggagcaaatacaatgccgaccagatacgcagaatgatggaaacattccagcaacttatcacctacaaagttatctccaatgaattcaattccaggaatctcgtgaatgacgacgacgctatcgtggccgcatctaaatgcctgaaaatggtttattacgccaatgtggtcggcggtgaagttgacacgaatcataatgaagaggacgatgaggagccaatcccagaatcatctgagctgaccctccaggagctgcttggcgaagaacgacggaacaaaaaggggccccgcgtcgaccctttggagactgagctcggagtgaaaactctggattgtaggaagcctttgattccttttgaggagttcataaacgaacctttgaacgaagtgctggagatggacaaagattataccttctttaaggtggagactgaaaacaagttctcatttatgacgtgtccctttattttgaacgctgttaccaaaaacttgggtctatactacgataaccggatccgtatgtacagtgaaagaaggatcaccgtcctgtactcgctggtccagggacagcagcttaacccttatttaaggttaaaagtgagaagagatcatatcattgacgacgccctcgtacgcctggaaatgatcgctatggagaacccagccgatctgaagaagcagctatacgtcgagtttgaaggcgaacagggggtggatgaggggggtgtgagtaaagagttttttcaactggtcgtagaggaaatttttaacccagacataggaatgttcacatacgatgagtctaccaaacttttctggtttaacccctcctcatttgaaactgaggggcagtttactctgatcggaattgtcctaggtctggcaatatataacaattgtatcctggacgtgcactttcctatggtggtctatcgcaaactgatgggaaaaaaagggacatttcgggacttgggggacagtcacccagtactttaccaatctctgaaggaccttttggaatacgaaggaaacgttgaagatgacatgatgattacttttcaaattagtcagacagatctctttggcaaccccatgatgtatgatttgaaagagaatggggacaagatccctattacaaacgagaatcgcaaggagttcgtgaatttatattcagactacatactcaacaagagtgtggagaagcaattcaaggcatttcggagaggcttccatatggtcaccaacgagagccccctgaagtatctttttcgcccagaggagattgaactgctcatttgcgggagccgtaacctggattttcaggcgttggaggaaacaaccgagtacgacggggggtatactcgggatagtgttctgatcagagaattttgggagatcgtccattccttcaccgatgagcaaaaacgactgtttctgcagttcacgaccggaacagatcgagctcccgtggggggcctcggcaagctgaaaatgatcatcgctaagaatggtcctgataccgagcggctgccaaccagtcacacatgttttaacgtgctgttactgccagagtacagttctaaggaaaagttgaaagaaaggttgctcaaggctattacatatgcaaaaggctttggcatgctttag

SEQ ID NO: 293649 - DNA, 2619 bp, Artificial Sequence
  derived and/or modified sequence
atggccacagcctgcaagaggtctggagagccccagagtgatgacatcgaggccagcaggatgaagagagctgctgccaagcacctgattgaaagatactaccaccagctgacagagggctgtggaaatgaggcctgcaccaatgagttctgtgccagctgccccaccttcctgaggatggacaacaatgctgctgccatcaaggccctggagctgtacaagatcaatgccaagctgtgtgacccccaccccagcaagaagggggccagcagcgcctacctggagaacagcaagggggcccccaacaacagctgcagcgagatcaagatgaacaagaagggggccagaattgacttcaaggatgtgacctacctgacagaggagaaggtgtatgagatcctggagctgtgccgggagcgggaggactacagccccctcatccgggtcatcggccgggtcttcagcagcgctgaggccctggtgcagagcttcaggaaggtgaagcagcacaccaaggaggagctgaagagcctgcaggccaaggatgaggacaaggatgaagatgagaaggagaaggccgcctgcagcgctgctgccatggaggaggacagcgaggccagcagcagcagaattggagacagcagccagggcgacaacaacctgcagaagctgggcccagatgatgtgtctgtggacattgatgccatcagaagagtgtacacccggctgctgagcaatgagaagattgaaacagccttcctgaatgccctggtgtacctgagccccaacgtggagtgtgacctgacctaccacaacgtgtacagccgggaccccaactacctgaacctcttcatcatcgtgatggagaacagaaacctgcacagccctgagtacctggagatggccctgcccctcttctgcaaggccatgagcaagctgcccctggccgcccagggcaagctgatccggctgtggagcaagtacaatgctgaccagatccggaggatgatggagaccttccagcagctgatcacctacaaggtgatcagcaatgagttcaacagcaggaacctggtgaatgatgatgatgccatcgtggccgccagcaagtgcctgaagatggtgtactatgccaacgtggtgggcggggaggtggacaccaaccacaatgaggaggatgatgaggagcccatccctgagagcagcgagctgaccctgcaggagctgctgggggaggagaggaggaacaagaagggcccccgggtggaccccctggagacagagctgggcgtgaagaccctggactgcaggaagcccctcatcccctttgaggagttcatcaatgagcccctgaatgaggtgctggagatggacaaggactacaccttcttcaaggtggagacagagaacaagttctccttcatgacctgccccttcatcctgaatgctgtgaccaagaacctgggcctgtactatgacaaccgcatccgcatgtacagcgagcggcgcatcaccgtgctgtacagcctggtgcagggccagcagctgaacccctacctgcggctgaaggtgagaagagaccacatcattgatgatgccctggtgcggctggagatgattgccatggagaacccagctgacctgaagaagcagctgtatgtggagtttgaaggagagcagggcgtggatgaaggaggagtgtccaaggagttcttccagctggtggtggaggagatcttcaacccagacatcggcatgttcacctatgatgagagcaccaagctgttctggttcaaccccagcagctttgaaacagagggccagttcaccctcatcggcatcgtgctgggcctggccatctacaacaactgcatcctggatgtgcacttccccatggtggtgtacaggaagctgatgggcaagaagggcaccttccgggacctgggggacagccaccctgtgctgtaccagagcctgaaggacctgctggagtatgagggcaatgtggaggatgacatgatgatcaccttccagatcagccagacagacctgtttggaaaccccatgatgtatgacctgaaggaaaatggagacaagatccccatcaccaatgaaaataggaaggagtttgtgaacctgtacagcgactacatcctgaacaagtctgtggagaagcagttcaaggccttcagaagaggcttccacatggtgaccaatgaaagccccctgaagtacctgttccggcctgaggagattgagctgctgatctgtggcagcaggaacctggacttccaggccctggaggagaccacagaatatgatggcggctacacccgggacagcgtgctgatccgggagttctgggagatcgtgcacagcttcacagatgagcagaagaggctcttcctgcagttcaccactggaacagaccgggcccctgtgggcggcctgggcaagctgaagatgatcatcgccaagaatggaccagacacagagcggctgcccaccagccacacctgcttcaacgtgctgctgctgcctgagtacagcagcaaggagaagctgaaggagcggctgctgaaggccatcacctacgccaagggcttcggcatgctgtag

SEQ ID NO: 293650 - DNA, 2619 bp, Artificial Sequence
  derived and/or modified sequence
atgaggtctgtgtgccacaggtctggagagccccagagtgatgacatcgaggccagcaggatgaagagagctgctgccaagcacctgattgaaagatactaccaccagctgacagagggctgtggaaatgaggcctgcaccaatgagttctgtgccagctgccccaccttcctgaggatggacaacaatgctgctgccatcaaggccctggagctgtacaagatcaatgccaagctgtgtgacccccaccccagcaagaagggggccagcagcgcctacctggagaacagcaagggggcccccaacaacagctgcagcgagatcaagatgaacaagaagggggccagaattgacttcaaggatgtgacctacctgacagaggagaaggtgtatgagatcctggagctgtgccgggagcgggaggactacagccccctcatccgggtcatcggccgggtcttcagcagcgctgaggccctggtgcagagcttcaggaaggtgaagcagcacaccaaggaggagctgaagagcctgcaggccaaggatgaggacaaggatgaagatgagaaggagaaggccgcctgcagcgctgctgccatggaggaggacagcgaggccagcagcagcagaattggagacagcagccagggcgacaacaacctgcagaagctgggcccagatgatgtgtctgtggacattgatgccatcagaagagtgtacacccggctgctgagcaatgagaagattgaaacagccttcctgaatgccctggtgtacctgagccccaacgtggagtgtgacctgacctaccacaacgtgtacagccgggaccccaactacctgaacctcttcatcatcgtgatggagaacagaaacctgcacagccctgagtacctggagatggccctgcccctcttctgcaaggccatgagcaagctgcccctggccgcccagggcaagctgatccggctgtggagcaagtacaatgctgaccagatccggaggatgatggagaccttccagcagctgatcacctacaaggtgatcagcaatgagttcaacagcaggaacctggtgaatgatgatgatgccatcgtggccgccagcaagtgcctgaagatggtgtactatgccaacgtggtgggcggggaggtggacaccaaccacaatgaggaggatgatgaggagcccatccctgagagcagcgagctgaccctgcaggagctgctgggggaggagaggaggaacaagaagggcccccgggtggaccccctggagacagagctgggcgtgaagaccctggactgcaggaagcccctcatcccctttgaggagttcatcaatgagcccctgaatgaggtgctggagatggacaaggactacaccttcttcaaggtggagacagagaacaagttctccttcatgacctgccccttcatcctgaatgctgtgaccaagaacctgggcctgtactatgacaaccgcatccgcatgtacagcgagcggcgcatcaccgtgctgtacagcctggtgcagggccagcagctgaacccctacctgcggctgaaggtgagaagagaccacatcattgatgatgccctggtgcggctggagatgattgccatggagaacccagctgacctgaagaagcagctgtatgtggagtttgaaggagagcagggcgtggatgaaggaggagtgtccaaggagttcttccagctggtggtggaggagatcttcaacccagacatcggcatgttcacctatgatgagagcaccaagctgttctggttcaaccccagcagctttgaaacagagggccagttcaccctcatcggcatcgtgctgggcctggccatctacaacaactgcatcctggatgtgcacttccccatggtggtgtacaggaagctgatgggcaagaagggcaccttccgggacctgggggacagccaccctgtgctgtaccagagcctgaaggacctgctggagtatgagggcaatgtggaggatgacatgatgatcaccttccagatcagccagacagacctgtttggaaaccccatgatgtatgacctgaaggaaaatggagacaagatccccatcaccaatgaaaataggaaggagtttgtgaacctgtacagcgactacatcctgaacaagtctgtggagaagcagttcaaggccttcagaagaggcttccacatggtgaccaatgaaagccccctgaagtacctgttccggcctgaggagattgagctgctgatctgtggcagcaggaacctggacttccaggccctggaggagaccacagaatatgatggcggctacacccgggacagcgtgctgatccgggagttctgggagatcgtgcacagcttcacagatgagcagaagaggctcttcctgcagttcaccactggaacagaccgggcccctgtgggcggcctgggcaagctgaagatgatcatcgccaagaatggaccagacacagagcggctgcccaccagccacacctgcttcaacgtgctgctgctgcctgagtacagcagcaaggagaagctgaaggagcggctgctgaaggccatcacctacgccaagggcttcggcatgctgtag

SEQ ID NO: 293651 - DNA, 2619 bp, Artificial Sequence
  derived and/or modified sequence
atggccaccgcctgcaagcggagcggcgagccccagagcgacgacattgaagcaagccgcatgaagcgggccgccgctaaacacctgatcgagcgttattaccaccagctcactgaggggtgcgggaatgaagcctgtactaacgaattctgcgcatcgtgtcccactttcctgcgaatggacaacaatgcggcagcgatcaaggctctggagctgtataagatcaacgccaaactgtgtgatccacatccgagcaaaaagggcgcaagcagcgcctacttagagaacagcaagggagcacccaacaattcatgcagcgaaatcaagatgaataagaagggagcacgcattgactttaaggatgtgacatacctcactgaagagaaggtatatgagatcctagaactttgcagggagagagaagattatagtccactgatacgggtgatcggcagagtgttttcttccgccgaggcactggtgcagtcatttcgtaaggtgaagcagcatacaaaggaagaactaaagagtctgcaggctaaggacgaagacaaagatgaagatgagaaggaaaaagccgcttgttccgcggcggctatggaggaagattccgaagccagctcttcccggattggcgacagctcccagggagacaacaatctgcaaaaattaggtcccgacgacgttagtgtcgatatcgacgcaatcaggagagtctatacccggctcctgtcaaatgagaaaatcgaaactgctttcctcaacgccctggtctatctgtctcctaacgtggagtgcgatctcacgtaccacaacgtgtattctcgggaccctaattacctgaacctgtttatcattgtgatggagaatagaaatttgcattctcctgaatacctggaaatggcactgcccctcttctgcaaggcaatgtccaaactgccactggcagcacaggggaagctgattagattgtggagcaagtacaatgcagatcaaattcgacgcatgatggagacctttcagcaactgatcacatataaagtgatctccaacgaattcaactcacgcaacctcgtgaatgacgatgacgcaatcgtggctgcgtccaagtgtctgaaaatggtctactacgccaatgttgttgggggagaggtggacaccaaccataatgaagaggacgacgaagagccaattccggaatccagcgagcttactctgcaagaactgctcggcgaagagcggagaaacaaaaaaggacctcgagttgatccactggaaacagagctaggggtgaagaccttggattgccgaaaacctctgataccttttgaagaatttattaatgagcctttaaacgaggtgctggaaatggacaaggattacacattcttcaaggtggagacagaaaataagtttagcttcatgacttgcccattcatacttaatgccgtaacaaagaatctgggcctttactacgacaacagaattcggatgtatagtgagcggcgtatcaccgtgctatacagcttggtgcagggtcagcagcttaacccctacctacggctcaaggtcaggagggaccatattatcgatgatgcccttgtcagactggagatgatcgccatggagaatcccgctgacttgaaaaaacagctttatgtcgaattcgagggcgagcagggggtggacgaggggggcgtttccaaagagttcttccagcttgtggtggaagaaattttcaatcctgatatcggcatgtttacttacgacgaaagtactaagctgttctggtttaatcctagtagcttcgagacagagggtcaatttaccctcataggaattgtcctgggactagcgatttataacaattgtatactcgatgtccatttcccaatggttgtctatcgcaagctgatggggaagaagggaacattccgcgaccttggagactctcatccagtcctttaccaatctttgaaggatctcctggaatacgaggggaatgtcgaggacgatatgatgatcacattccagatctctcagactgacttattcgggaatcccatgatgtacgacctcaaggagaacggggacaaaatccctattacaaacgagaacaggaaggagttcgtaaacctgtattccgactacatactgaacaagtcagtcgaaaagcagtttaaggcctttaggagagggttccacatggtcacaaacgaatcaccgctgaaatacctgtttcggcctgaggagatcgaactattgatatgcggcagcaggaaccttgattttcaggcgcttgaagagacaaccgaatacgatggggggtacactcgagacagtgttctgatccgggaattttgggagattgtgcactccttcacagatgagcagaagagactgttcctacaattcactactggaacagaccgagccccagtgggtgggttgggaaagctaaagatgatcatagcaaaaaatggacctgatacggaacgccttccaacatcacatacatgtttcaatgtcctgttgcttcccgaatactccagcaaggaaaaacttaaggagcgactgttgaaggccattacttacgcaaaaggattcggtatgttgtag

SEQ ID NO: 293652 - DNA, 2619 bp, Artificial Sequence
  derived and/or modified sequence
atgcggagcgtgtgccaccggagcggcgagccccagagcgacgacattgaagcatcccgcatgaagcgagccgcagcgaaacatttgattgagcgttattaccatcagctgactgaaggatgtggaaacgaggcctgcaccaatgaattttgcgcatcttgcccaacttttttaagaatggacaacaacgctgctgccattaaggcgctggagctttacaaaataaatgctaagctgtgcgacccccatccatctaagaagggcgccagttctgcttacctcgagaacagcaaaggcgctccaaacaactcttgcagcgaaatcaagatgaataagaaaggcgcaaggatagatttcaaagatgtgacatatctcactgaagaaaaggtctacgagattctagagctctgcagagagcgcgaggattatagccccttgatccgcgttatcggaagagttttcagcagtgcagaggccctcgtgcagagtttccgcaaggtgaagcagcacactaaagaggagctgaagagtcttcaggctaaagacgaagataaggacgaggatgaaaaggaaaaggccgcgtgctccgcagctgccatggaggaggattccgaggcatcctcttcacgtatcggagactcttcacagggcgacaacaatctgcagaagctcgggcccgacgatgtgtcggtggatatcgacgctatccgtcgcgtctacaccagactgttgtctaatgagaagatcgaaaccgccttcctaaatgccctggtgtatctctctccgaacgtggagtgtgatctaacctaccacaacgtgtactctcgcgacccgaactatctcaatctcttcatcatcgtgatggaaaaccgcaacctgcattccccagaatatctggaaatggctctgccgcttttctgcaaggctatgtccaagctgcctctcgcggctcaaggcaaactaataagattgtggtcgaagtataatgccgaccaaatcaggagaatgatggagactttccagcagttgattacatacaaggttataagcaatgaattcaactcgcgaaaccttgtaaacgacgacgacgccatcgttgccgcgagcaaatgccttaagatggtgtattacgccaatgttgtaggcggtgaggtggataccaatcacaacgaagaggatgacgaggaacccatacccgagtcttctgagttaaccttacaggagctgctcggagaggaaaggcggaataaaaaagggcccagggtggatccgctcgaaacggagctgggtgtcaaaacactggactgccgaaagcctctcattcccttcgaagaatttatcaatgaaccattaaacgaggtgcttgaaatggacaaggactatactttcttcaaggtcgaaaccgaaaacaaattttccttcatgacatgccctttcatcttgaatgcagtgactaaaaacctggggctgtactatgacaataggattcgaatgtactctgagagacgtatcacagtattgtactctctggtacaggggcagcagcttaatccttatctgaggctgaaggttcggcgcgatcacatcatagatgacgctttggttcggttagagatgattgccatggagaaccccgctgaccttaaaaagcaactgtacgtggaattcgagggcgagcagggcgtggatgaaggaggcgttagcaaagagttctttcaactggttgtcgaagagatcttcaacccggatataggcatgttcacttacgatgaatctacaaaactcttttggttcaaccccagctcttttgagacggaagggcagttcacgctgatcggcatagttcttggtttagccatttataataattgtatactggatgttcacttcccgatggtggtgtaccgcaaattgatgggcaagaaaggtacattccgagacctcggagattcccatcccgtcttgtatcagagcctgaaggatctgctggaatacgagggaaacgtggaggatgacatgatgattacgttccagataagtcagactgatttgtttggcaatccaatgatgtatgacctgaaagaaaatggagacaagattccaataacaaatgagaaccgcaaagagtttgtgaatctttacagcgactacattctgaacaagtccgttgaaaaacagtttaaagcctttcgccgcggattccacatggtcaccaacgaatcaccactgaagtacttgttcaggccggaggagattgaactcttgatctgtggcagcagaaacctcgacttccaggcacttgaggagaccaccgagtatgacggcggctatacgagagactcggtgcttatcagggaattctgggagatcgtgcacagtttcaccgacgagcagaaacgcctttttctccaattcactaccggcactgatcgcgctccagtcggcgggctgggcaagctaaagatgataatcgctaaaaatgggccagataccgagaggttacctactagccacacatgtttcaacgttcttctgctgccagagtattccagcaaggagaaactcaaagaaagactccttaaggcaattacttacgccaagggatttggtatgctgtag

SEQ ID NO: 293653 - DNA, 2619 bp, Artificial Sequence
  derived and/or modified sequence
atggcaaccgcctgtaaacgttcaggcgagcctcaatcagatgatatcgaggcttccagaatgaaacgggctgcggcaaaacacctgatcgagaggtactatcaccagttgaccgaggggtgtgggaacgaggcatgcacaaacgaattctgcgcctcttgccctacattcctccgcatggataacaacgcggcagcgattaaagctctggagctatataagataaatgctaagctgtgtgatccccacccctctaaaaaaggtgcttcaagcgcatacctggaaaactcaaagggtgctcccaacaactcctgcagcgaaatcaagatgaacaaaaaaggcgcacgaatcgacttcaaggatgtcacctacctgactgaggagaaggtttacgaaattttggaactgtgtcgggaaagagaggattatagcccgttaattagggtgattggcagggtgtttagcagtgccgaggcactcgtgcaatctttcaggaaggtgaagcagcatactaaggaggaattgaaaagtctgcaagccaaggatgaggacaaggatgaggacgagaaggagaaggccgcatgtagcgccgcagccatggaggaagatagtgaagcttcatcctcacgcattggcgacagttcacagggtgacaacaacctacagaagctcgggccagacgatgttagtgttgacatagacgcaattcgtagggtttatactcggctgttgagtaacgaaaaaattgaaactgctttcctcaacgcacttgtgtatctgagccccaatgttgagtgtgacctcacttaccacaacgtctactcccgcgatccaaactatctgaatttatttatcattgttatggagaaccggaatctgcacagtcccgagtacctggagatggcactccccctcttttgcaaggcaatgagtaagctgcccctggctgcccagggtaaactgatccgcctgtggtcgaaatacaacgccgatcagattcggcgtatgatggagactttccagcagctgataacttataaggtaatttctaacgagtttaactctaggaacctcgtaaatgacgatgatgccatagtcgcggcatccaagtgcctgaaaatggtgtattatgcaaacgttgtaggaggggaggtcgacactaatcacaatgaggaggacgacgaggagcccattcctgagtcttccgagctcacccttcaggaattgcttggggaggaacggaggaacaagaagggtcccagggtggacccactcgaaacagagcttggggtcaaaactctggactgccgcaaaccacttatcccatttgaagagttcattaatgaaccccttaatgaagtcctcgagatggacaaggactacaccttcttcaaagtggagactgagaacaagttttccttcatgacttgtccattcatcttgaatgcagttacaaaaaaccttgggctgtactatgacaaccgcattaggatgtactctgagaggcggatcaccgttctctattccctagtgcagggccagcagctgaatccttatctgcgcctgaaggtgcgacgagaccatataatcgacgatgccctggttaggctggagatgatagccatggaaaaccctgccgacctgaaaaagcaactgtatgttgagtttgagggtgagcagggtgtggatgaaggtggcgtgtccaaggagttctttcagcttgtcgtagaggagatatttaacccagacattggcatgtttacatacgacgagtcaaccaagttgttttggtttaatccatcaagctttgaaactgagggccaattcacactcatcggaatcgtactggggctcgccatttataataactgcattctggacgtgcattttcctatggtggtctaccggaagctcatgggtaagaagggtactttccgggacctaggcgatagccatccagttctctatcagagcctgaaggatttgctggaatatgagggcaacgtggaagacgacatgatgatcacttttcagatatctcaaactgacctttttggaaaccccatgatgtacgacctcaaagagaatggtgataagattccaatcacaaatgagaaccgcaaagagtttgttaatttgtattcagattatatcctaaacaaatccgtggaaaaacagtttaaagcattccgcagaggatttcatatggtcacaaatgagagcccgttgaagtatttattccgccctgaggagatagaactgttgatctgtggatcacgcaatctggactttcaagcactggaagaaacaaccgagtatgatggaggatatacccgcgattctgtgctcatcagagaattttgggagatcgtgcactctttcactgacgagcagaagcggctttttctccagttcacaaccggcaccgaccgtgccccagtcggcggattaggtaaactcaaaatgatcatcgctaagaacggcccagatacggaacggctccccacctcacacacctgcttcaatgtactcctcctgcccgagtattcgagtaaggagaagttgaaggaacgactcctgaaagcgataacttacgccaaaggattcggaatgctttag

SEQ ID NO: 293654 - DNA, 2619 bp, Artificial Sequence
  derived and/or modified sequence
atgagatcagtgtgccatcggagtggcgaacctcagtctgacgatatcgaggcttcaagaatgaaaagggcagcagccaaacacctgattgaaaggtactaccatcagcttacagaaggttgtggaaacgaagcatgcactaacgagttctgcgcgagttgtccgacttttctacgcatggataataacgcagcggctataaaggcactggagctgtacaaaatcaatgccaaactctgcgacccacacccctcgaagaaaggtgcctcctccgcctatcttgagaatagcaaaggggctcctaacaattcctgcagtgaaattaaaatgaacaagaaaggcgctcgcatagactttaaggacgtgacttaccttacagaggaaaaggtttacgaaatcctggagctgtgtcgtgagcgcgaggattatagcccgctaattagagtcatcggaagggtcttcagctccgccgaagccctggtgcagagctttcgcaaggtgaagcaacacacgaaagaggagctcaaatctcttcaagcaaaggacgaggacaaagacgaggacgagaaggaaaaggccgcatgttccgccgcagcgatggaagaggactctgaagcaagcagtagcaggattggcgatagtagccaaggtgataataacctccagaaactgggccctgatgacgtgtctgtggatatcgacgccattagacgcgtgtatactaggttactgagtaacgaaaagattgaaacggcttttctgaacgccctggtatatctttcacctaatgtggagtgtgacctcacgtatcataacgtctacagtcgggaccctaactacttgaatctttttattatagtcatggagaatagaaatctgcactctccggagtaccttgaaatggccctcccactgttctgcaaagctatgtctaagttgcctctcgccgcacaagggaaactcataagactttggtcgaaatacaatgcagatcagatccgcagaatgatggaaacttttcagcagctcatcacctacaaggtgatatctaatgagttcaacagtcgaaatctggtcaatgacgacgacgcaatcgtcgccgcatccaagtgtctgaagatggtgtactatgccaatgtggtcggcggagaagtggacacaaatcataacgaggaggacgatgaggagcccattccggaatcatcagaactgacgcttcaagaactgctgggggaagaacgccgaaacaagaaaggacccagggtggatccattggagaccgagctgggggtcaaaacacttgattgcaggaaacctctgataccatttgaggaatttatcaatgagccccttaatgaggtactggagatggacaaagattacaccttcttcaaggtcgagaccgagaataagttcagtttcatgacctgcccctttatcctgaacgcagtgacgaaaaatttaggactttactacgacaatcgcatccggatgtattccgaaagacggatcaccgtgctgtacagccttgtccaaggacagcaactgaatccatatttgcggctgaaggtgcggagagatcacattatcgacgacgccctggtgcggctcgagatgattgcaatggaaaaccctgccgaccttaaaaagcaactgtatgtggaattcgaaggggaacagggcgtcgacgaagggggagtatcaaaagagttctttcagttggttgtcgaggagatctttaatcccgatatcggaatgttcacatatgacgaatccaccaagctcttttggttcaaccctagcagcttcgaaaccgaggggcaattcacactgattgggatcgtcctggggctcgcgatctacaacaactgtattttggatgttcactttccgatggtcgtataccgcaaactgatgggcaaaaagggaacctttcgcgacctgggggattcacaccccgtgctgtaccagtcactgaaagacttgctagaatatgaggggaatgtcgaggatgacatgatgatcacatttcagatcagtcagaccgacctgttcggcaatcctatgatgtatgatcttaaggagaatggcgataaaatcccaattaccaacgaaaacaggaaggagttcgtcaatttgtattctgattacatactcaacaaatccgtggagaagcagtttaaggccttccggaggggattccatatggtcacaaatgaatctcctttgaaatatttgttcagacccgaggagatcgagctactgatttgtggaagcagaaacctggacttccaggccctggaggagacgactgaatacgatggcggttatactagagattcggtcttaattcgagagttttgggagattgtgcattcctttactgatgagcagaagaggctttttttgcagtttacgacgggcacggaccgcgctccggtgggcggactgggtaagttgaagatgattatcgcaaaaaatggacccgacacagaaaggctgcctactagtcacacctgttttaatgtactgttgttacctgaatacagcagcaaagagaaactgaaggagcgattactgaaggcaatcacatatgccaagggctttggaatgctttag

SEQ ID NO: 293655 - DNA, 5179 bp, Artificial Sequence
  derived and/or modified sequence
ccaagatggtggcgctgggctcggggtgactacaggagacgacggggccttttcccttcgccaggacccgacacaccaggcttcgctcgctcgcgcacccctccgccgcgtagccatccgccagcgcgggcgcccgccatccgccgcctacttacgcttcacctctgccgacccggcgcgctcggctgcgggcggcggcgcctccttcggctcctcctcggaatagctcgcggcctgtagcccctggcaggagggcccctcagccccccggtgtggacaggcagcggcggctggcgacgaacgccgggatttcggcggccccggcgctccctttcccggcctcgttttccggataaggaagcgcgggtcccgcatgagccccggcggtggcggcagcgaaagagaacgaggcggtggcgggcggaggcggcgggcgagggcgactacgaccagtgaggcggccgccgcagcccaggcgcgggggcgacgacaggttaaaaatctgtaagagcctgattttagaattcaccagctcctcagaagtttggcgaaatatgagttattaagcctacgctcagatcaaggtagcagctagactggtgtgacaacctgtttttaatcagtgactcaaagctgtgatcaccctgatgtcaccgaatggccacagcttgtaaaagatcaggagaacctcagtctgacgacattgaagctagccgaatgaagcgagcagctgcaaagcatctaatagaacgctactaccaccagttaactgagggctgtggaaatgaagcctgcacgaatgagttttgtgcttcctgtccaacttttcttcgtatggataataatgcagcagctattaaagccctcgagctttataagattaatgcaaaactctgtgatcctcatccctccaagaaaggagcaagctcagcttaccttgagaactcgaaaggtgcccccaacaactcctgctctgagataaaaatgaacaagaaaggcgctagaattgattttaaagatgtgacttacttaacagaagagaaggtatatgaaattcttgaattatgtagagaaagagaggattattcccctttaatccgtgttattggaagagttttttctagtgctgaggcattggtacagagcttccggaaagttaaacaacacaccaaggaagaactgaaatctcttcaagcaaaagatgaagacaaagatgaagatgaaaaggaaaaagctgcatgttctgctgctgctatggaagaagactcagaagcatcttcctcaaggataggtgatagctcacagggagacaacaatttgcaaaaattaggccctgatgatgtgtctgtggatattgatgccattagaagggtctacaccagattgctctctaatgaaaaaattgaaactgcctttctcaatgcacttgtatatttgtcacctaacgtggaatgtgacttgacgtatcacaatgtatactctcgagatcctaattatctgaatttgttcattatcgtaatggagaatagaaatctccacagtcctgaatatctggaaatggctttgccattattttgcaaagcgatgagcaagctaccccttgcagcccaaggaaaactgatcagactgtggtctaaatacaatgcagaccagattcggagaatgatggagacatttcagcaacttattacttataaagtcataagcaatgaatttaacagtcgaaatctagtgaatgatgatgatgccattgttgctgcttcgaagtgcttgaaaatggtttactatgcaaatgtagtgggaggggaagtggacacaaatcacaatgaagaagatgatgaagagcccatccctgagtccagcgagctgacacttcaggaacttttgggagaagaaagaagaaacaagaaaggtcctcgagtggaccccctggaaactgaacttggtgttaaaaccctggattgtcgaaaaccacttatcccttttgaagagtttattaatgaaccactgaatgaggttctagaaatggataaagattatacttttttcaaagtagaaacagagaacaaattctcttttatgacatgtccctttatattgaatgctgtcacaaagaatttgggattatattatgacaatagaattcgcatgtacagtgaacgaagaatcactgttctctacagcttagttcaaggacagcagttgaatccatatttgagactcaaagttagacgtgaccatatcatagatgatgcacttgtccggctagagatgatcgctatggaaaatcctgcagacttgaagaagcagttgtatgtggaatttgaaggagaacaaggagttgatgagggaggtgtttccaaagaattttttcagctggttgtggaggaaatcttcaatccagatattggtatgttcacatacgatgaatctacaaaattgttttggtttaatccatcttcttttgaaactgagggtcagtttactctgattggcatagtactgggtctggctatttacaataactgtatactggatgtacattttcccatggttgtctacaggaagctaatggggaaaaaaggaacttttcgtgacttgggagactctcacccagttctatatcagagtttaaaagatttattggagtatgaagggaatgtggaagatgacatgatgatcactttccagatatcacagacagatctttttggtaacccaatgatgtatgatctaaaggaaaatggtgataaaattccaattacaaatgaaaacaggaaggaatttgtcaatctttattctgactacattctcaataaatcagtagaaaaacagttcaaggcttttcggagaggttttcatatggtgaccaatgaatctcccttaaagtacttattcagaccagaagaaattgaattgcttatatgtggaagccggaatctagatttccaagcactagaagaaactacagaatatgacggtggctataccagggactctgttctgattagggagttctgggaaatcgttcattcatttacagatgaacagaaaagactcttcttgcagtttacaacgggcacagacagagcacctgtgggaggactaggaaaattaaagatgattatagccaaaaatggcccagacacagaaaggttacctacatctcatacttgctttaatgtgcttttacttccggaatactcaagcaaagaaaaacttaaagagagattgttgaaggccatcacgtatgccaaaggatttggcatgctgtaaaacaaaacaaaacaaaataaaacaaaaaaaaggaaggaaaaaaaaagaaaaaatttaaaaaattttaaaaatataacgagggataaatttttggtggtgatagtgtcccagtacaaaaaggctgtaagatagtcaaccacagtagtcacctatgtctgtgcctcccttctttattggggacatgtgggctggaacagcagatttcagctacatatatgaacaaatcctttattattattataattatttttttgcgtgaaagtgttacatattctttcacttgtatgtacagagaggtttttctgaatatttattttaagggttaaatcacttttgcttgtgtttattactgcttgaggttgagccttttgagtatttaaaaaatatataccaacagaactactctcccaaggaaaatattgccaccatttgtagaccacgtaaccttcaagtatgtgctacttttttgtccctgtatctaactcaaatcaggaactgtattttttttaatgatttgcttttgaaacttgaagtcttgaaaacagtgtgatgcaattactgctgttctagcccccaaagagttttctgtgcaaaatcttgagaatcaatcaataaagaaagatggaaggaagggagaaattggaatgttttaactgcagccctcagaactttagtaacagcacaacaaattaaaaacaaaaacaactcatgccacagtatgtcgtcttcatgtgtcttgcaatgaactgtttcagtagccaatcctctttcttagtatatgaaaggacagggatttttgttcttgttgttctcgttgttgttttaagtttactggggaaagtgcatttggccaaatgaaatggtagtcaagcctattgcaacaaagttaggaagtttgttgtttgtttattataaacaaaaagcatgtgaaagtgcacttaagatagagtttttattaattacttacttattacctagattttaaatagacaatccaaagtctccccttcgtgttgccatcatcttgttgaatcagccattttatcgaggcacgtgatcagtgttgcaacataatgaaaaagatggctactgtgccttgtgttacttaatcatacagtaagctgacctggaaatgaatgaaactattactcctaagaattacattgtatagccccacagattaaatttaattaattaattcaaaacatgttaaacgttactttcatgtactatggaaaagtacaagtaggtttacattactgatttccagaagtaagtagtttcccctttcctagtcttctgtgtatgtgatgttgttaatttcttttattgcattataaaataaaaggattatgtatttttaactaaggtgagacattgatatatccttttgctacaagctatagctaatgtgctgagcttgtgccttggtgattgattgattgattgactgattgttttaactgattactgtagatcaacctgatgatttgtttgtttgaaattggcaggaaaaatgcagctttcaaatcattggggggagaaaaaggatgtctttcaggattattttaattaatttttttcataattgagacagaactgtttgttatgtaccataatgctaaataaaactgtggcacttttcaccataatttaatttagtggaaaaagaagacaatgctttccatattgtgataaggtaacatggggtttttctgggccagcctttagaacactgttagggtacatacgctaccttgatgaaagggaccttcgtgcaactgtagtcatcttaaaggcttctcatccactgtgcttcttaatgtgtaattaaagtgaggagaaattaaatactctgagggcgttttatataataaattcgtgaagaaatgtgtgctcttca

SEQ ID NO: 293656 - DNA, 4507 bp, Artificial Sequence
  derived and/or modified sequence
atgagatctgtgtgtcatagatcaggagaacctcagtctgacgacattgaagctagccgaatgaagcgagcagctgcaaagcatctaatagaacgctactaccaccagttaactgagggctgtggaaatgaagcctgcacgaatgagttttgtgcttcctgtccaacttttcttcgtatggataataatgcagcagctattaaagccctcgagctttataagattaatgcaaaactctgtgatcctcatccctccaagaaaggagcaagctcagcttaccttgagaactcgaaaggtgcccccaacaactcctgctctgagataaaaatgaacaagaaaggcgctagaattgattttaaagatgtgacttacttaacagaagagaaggtatatgaaattcttgaattatgtagagaaagagaggattattcccctttaatccgtgttattggaagagttttttctagtgctgaggcattggtacagagcttccggaaagttaaacaacacaccaaggaagaactgaaatctcttcaagcaaaagatgaagacaaagatgaagatgaaaaggaaaaagctgcatgttctgctgctgctatggaagaagactcagaagcatcttcctcaaggataggtgatagctcacagggagacaacaatttgcaaaaattaggccctgatgatgtgtctgtggatattgatgccattagaagggtctacaccagattgctctctaatgaaaaaattgaaactgcctttctcaatgcacttgtatatttgtcacctaacgtggaatgtgacttgacgtatcacaatgtatactctcgagatcctaattatctgaatttgttcattatcgtaatggagaatagaaatctccacagtcctgaatatctggaaatggctttgccattattttgcaaagcgatgagcaagctaccccttgcagcccaaggaaaactgatcagactgtggtctaaatacaatgcagaccagattcggagaatgatggagacatttcagcaacttattacttataaagtcataagcaatgaatttaacagtcgaaatctagtgaatgatgatgatgccattgttgctgcttcgaagtgcttgaaaatggtttactatgcaaatgtagtgggaggggaagtggacacaaatcacaatgaagaagatgatgaagagcccatccctgagtccagcgagctgacacttcaggaacttttgggagaagaaagaagaaacaagaaaggtcctcgagtggaccccctggaaactgaacttggtgttaaaaccctggattgtcgaaaaccacttatcccttttgaagagtttattaatgaaccactgaatgaggttctagaaatggataaagattatacttttttcaaagtagaaacagagaacaaattctcttttatgacatgtccctttatattgaatgctgtcacaaagaatttgggattatattatgacaatagaattcgcatgtacagtgaacgaagaatcactgttctctacagcttagttcaaggacagcagttgaatccatatttgagactcaaagttagacgtgaccatatcatagatgatgcacttgtccggctagagatgatcgctatggaaaatcctgcagacttgaagaagcagttgtatgtggaatttgaaggagaacaaggagttgatgagggaggtgtttccaaagaattttttcagctggttgtggaggaaatcttcaatccagatattggtatgttcacatacgatgaatctacaaaattgttttggtttaatccatcttcttttgaaactgagggtcagtttactctgattggcatagtactgggtctggctatttacaataactgtatactggatgtacattttcccatggttgtctacaggaagctaatggggaaaaaaggaacttttcgtgacttgggagactctcacccagttctatatcagagtttaaaagatttattggagtatgaagggaatgtggaagatgacatgatgatcactttccagatatcacagacagatctttttggtaacccaatgatgtatgatctaaaggaaaatggtgataaaattccaattacaaatgaaaacaggaaggaatttgtcaatctttattctgactacattctcaataaatcagtagaaaaacagttcaaggcttttcggagaggttttcatatggtgaccaatgaatctcccttaaagtacttattcagaccagaagaaattgaattgcttatatgtggaagccggaatctagatttccaagcactagaagaaactacagaatatgacggtggctataccagggactctgttctgattagggagttctgggaaatcgttcattcatttacagatgaacagaaaagactcttcttgcagtttacaacgggcacagacagagcacctgtgggaggactaggaaaattaaagatgattatagccaaaaatggcccagacacagaaaggttacctacatctcatacttgctttaatgtgcttttacttccggaatactcaagcaaagaaaaacttaaagagagattgttgaaggccatcacgtatgccaaaggatttggcatgctgtaaaacaaaacaaaacaaaataaaacaaaaaaaaggaaggaaaaaaaaagaaaaaatttaaaaaattttaaaaatataacgagggataaatttttggtggtgatagtgtcccagtacaaaaaggctgtaagatagtcaaccacagtagtcacctatgtctgtgcctcccttctttattggggacatgtgggctggaacagcagatttcagctacatatatgaacaaatcctttattattattataattatttttttgcgtgaaagtgttacatattctttcacttgtatgtacagagaggtttttctgaatatttattttaagggttaaatcacttttgcttgtgtttattactgcttgaggttgagccttttgagtatttaaaaaatatataccaacagaactactctcccaaggaaaatattgccaccatttgtagaccacgtaaccttcaagtatgtgctacttttttgtccctgtatctaactcaaatcaggaactgtattttttttaatgatttgcttttgaaacttgaagtcttgaaaacagtgtgatgcaattactgctgttctagcccccaaagagttttctgtgcaaaatcttgagaatcaatcaataaagaaagatggaaggaagggagaaattggaatgttttaactgcagccctcagaactttagtaacagcacaacaaattaaaaacaaaaacaactcatgccacagtatgtcgtcttcatgtgtcttgcaatgaactgtttcagtagccaatcctctttcttagtatatgaaaggacagggatttttgttcttgttgttctcgttgttgttttaagtttactggggaaagtgcatttggccaaatgaaatggtagtcaagcctattgcaacaaagttaggaagtttgttgtttgtttattataaacaaaaagcatgtgaaagtgcacttaagatagagtttttattaattacttacttattacctagattttaaatagacaatccaaagtctccccttcgtgttgccatcatcttgttgaatcagccattttatcgaggcacgtgatcagtgttgcaacataatgaaaaagatggctactgtgccttgtgttacttaatcatacagtaagctgacctggaaatgaatgaaactattactcctaagaattacattgtatagccccacagattaaatttaattaattaattcaaaacatgttaaacgttactttcatgtactatggaaaagtacaagtaggtttacattactgatttccagaagtaagtagtttcccctttcctagtcttctgtgtatgtgatgttgttaatttcttttattgcattataaaataaaaggattatgtatttttaactaaggtgagacattgatatatccttttgctacaagctatagctaatgtgctgagcttgtgccttggtgattgattgattgattgactgattgttttaactgattactgtagatcaacctgatgatttgtttgtttgaaattggcaggaaaaatgcagctttcaaatcattggggggagaaaaaggatgtctttcaggattattttaattaatttttttcataattgagacagaactgtttgttatgtaccataatgctaaataaaactgtggcacttttcaccataatttaatttagtggaaaaagaagacaatgctttccatattgtgataaggtaacatggggtttttctgggccagcctttagaacactgttagggtacatacgctaccttgatgaaagggaccttcgtgcaactgtagtcatcttaaaggcttctcatccactgtgcttcttaatgtgtaattaaagtgaggagaaattaaatactctgagggcgttttatataataaattcgtgaaga

SEQ ID NO: 293657 - DNA, 2699 bp, Artificial Sequence
  derived and/or modified sequence
atggagaagctgcaccagtgttattggaactcttctgtctgggagatacaagtttggaagcaatcttggggtacttacccacaaggctggtggagaccagatcaggagaacctcagtctgacgacattgaagctagccgaatgaagcgagcagctgcaaagcatctaatagaacgctactaccaccagttaactgagggctgtggaaatgaagcctgcacgaatgagttttgtgcttcctgtccaacttttcttcgtatggataataatgcagcagctattaaagccctcgagctttataagattaatgcaaaactctgtgatcctcatccctccaagaaaggagcaagctcagcttaccttgagaactcgaaaggtgcccccaacaactcctgctctgagataaaaatgaacaagaaaggcgctagaattgattttaaagatgtgacttacttaacagaagagaaggtatatgaaattcttgaattatgtagagaaagagaggattattcccctttaatccgtgttattggaagagttttttctagtgctgaggcattggtacagagcttccggaaagttaaacaacacaccaaggaagaactgaaatctcttcaagcaaaagatgaagacaaagatgaagatgaaaaggaaaaagctgcatgttctgctgctgctatggaagaagactcagaagcatcttcctcaaggataggtgatagctcacagggagacaacaatttgcaaaaattaggccctgatgatgtgtctgtggatattgatgccattagaagggtctacaccagattgctctctaatgaaaaaattgaaactgcctttctcaatgcacttgtatatttgtcacctaacgtggaatgtgacttgacgtatcacaatgtatactctcgagatcctaattatctgaatttgttcattatcgtaatggagaatagaaatctccacagtcctgaatatctggaaatggctttgccattattttgcaaagcgatgagcaagctaccccttgcagcccaaggaaaactgatcagactgtggtctaaatacaatgcagaccagattcggagaatgatggagacatttcagcaacttattacttataaagtcataagcaatgaatttaacagtcgaaatctagtgaatgatgatgatgccattgttgctgcttcgaagtgcttgaaaatggtttactatgcaaatgtagtgggaggggaagtggacacaaatcacaatgaagaagatgatgaagagcccatccctgagtccagcgagctgacacttcaggaacttttgggagaagaaagaagaaacaagaaaggtcctcgagtggaccccctggaaactgaacttggtgttaaaaccctggattgtcgaaaaccacttatcccttttgaagagtttattaatgaaccactgaatgaggttctagaaatggataaagattatacttttttcaaagtagaaacagagaacaaattctcttttatgacatgtccctttatattgaatgctgtcacaaagaatttgggattatattatgacaatagaattcgcatgtacagtgaacgaagaatcactgttctctacagcttagttcaaggacagcagttgaatccatatttgagactcaaagttagacgtgaccatatcatagatgatgcacttgtccggctagagatgatcgctatggaaaatcctgcagacttgaagaagcagttgtatgtggaatttgaaggagaacaaggagttgatgagggaggtgtttccaaagaattttttcagctggttgtggaggaaatcttcaatccagatattggtatgttcacatacgatgaatctacaaaattgttttggtttaatccatcttcttttgaaactgagggtcagtttactctgattggcatagtactgggtctggctatttacaataactgtatactggatgtacattttcccatggttgtctacaggaagctaatggggaaaaaaggaacttttcgtgacttgggagactctcacccagttctatatcagagtttaaaagatttattggagtatgaagggaatgtggaagatgacatgatgatcactttccagatatcacagacagatctttttggtaacccaatgatgtatgatctaaaggaaaatggtgataaaattccaattacaaatgaaaacaggaaggaatttgtcaatctttattctgactacattctcaataaatcagtagaaaaacagttcaaggcttttcggagaggttttcatatggtgaccaatgaatctcccttaaagtacttattcagaccagaagaaattgaattgcttatatgtggaagccggaatctagatttccaagcactagaagaaactacagaatatgacggtggctataccagggactctgttctgattagggagttctgggaaatcgttcattcatttacagatgaacagaaaagactcttcttgcagtttacaacgggcacagacagagcacctgtgggaggactaggaaaattaaagatgattatagccaaaaatggcccagacacagaaaggttacctacatctcatacttgctttaatgtgcttttacttccggaatactcaagcaaagaaaaacttaaagagagattgttgaaggccatcacgtatgccaaaggatttggcatgctgtaa

SEQ ID NO: 293658 - DNA, 4491 bp, Artificial Sequence
  derived and/or modified sequence
acagatcaggagaacctcagtctgacgacattgaagctagccgaatgaagcgagcagctgcaaagcatctaatagaacgctactaccaccagttaactgagggctgtggaaatgaagcctgcacgaatgagttttgtgcttcctgtccaacttttcttcgtatggataataatgcagcagctattaaagccctcgagctttataagattaatgcaaaactctgtgatcctcatccctccaagaaaggagcaagctcagcttaccttgagaactcgaaaggtgcccccaacaactcctgctctgagataaaaatgaacaagaaaggcgctagaattgattttaaagatgtgacttacttaacagaagagaaggtatatgaaattcttgaattatgtagagaaagagaggattattcccctttaatccgtgttattggaagagttttttctagtgctgaggcattggtacagagcttccggaaagttaaacaacacaccaaggaagaactgaaatctcttcaagcaaaagatgaagacaaagatgaagatgaaaaggaaaaagctgcatgttctgctgctgctatggaagaagactcagaagcatcttcctcaaggataggtgatagctcacagggagacaacaatttgcaaaaattaggccctgatgatgtgtctgtggatattgatgccattagaagggtctacaccagattgctctctaatgaaaaaattgaaactgcctttctcaatgcacttgtatatttgtcacctaacgtggaatgtgacttgacgtatcacaatgtatactctcgagatcctaattatctgaatttgttcattatcgtaatggagaatagaaatctccacagtcctgaatatctggaaatggctttgccattattttgcaaagcgatgagcaagctaccccttgcagcccaaggaaaactgatcagactgtggtctaaatacaatgcagaccagattcggagaatgatggagacatttcagcaacttattacttataaagtcataagcaatgaatttaacagtcgaaatctagtgaatgatgatgatgccattgttgctgcttcgaagtgcttgaaaatggtttactatgcaaatgtagtgggaggggaagtggacacaaatcacaatgaagaagatgatgaagagcccatccctgagtccagcgagctgacacttcaggaacttttgggagaagaaagaagaaacaagaaaggtcctcgagtggaccccctggaaactgaacttggtgttaaaaccctggattgtcgaaaaccacttatcccttttgaagagtttattaatgaaccactgaatgaggttctagaaatggataaagattatacttttttcaaagtagaaacagagaacaaattctcttttatgacatgtccctttatattgaatgctgtcacaaagaatttgggattatattatgacaatagaattcgcatgtacagtgaacgaagaatcactgttctctacagcttagttcaaggacagcagttgaatccatatttgagactcaaagttagacgtgaccatatcatagatgatgcacttgtccggctagagatgatcgctatggaaaatcctgcagacttgaagaagcagttgtatgtggaatttgaaggagaacaaggagttgatgagggaggtgtttccaaagaattttttcagctggttgtggaggaaatcttcaatccagatattggtatgttcacatacgatgaatctacaaaattgttttggtttaatccatcttcttttgaaactgagggtcagtttactctgattggcatagtactgggtctggctatttacaataactgtatactggatgtacattttcccatggttgtctacaggaagctaatggggaaaaaaggaacttttcgtgacttgggagactctcacccagttctatatcagagtttaaaagatttattggagtatgaagggaatgtggaagatgacatgatgatcactttccagatatcacagacagatctttttggtaacccaatgatgtatgatctaaaggaaaatggtgataaaattccaattacaaatgaaaacaggaaggaatttgtcaatctttattctgactacattctcaataaatcagtagaaaaacagttcaaggcttttcggagaggttttcatatggtgaccaatgaatctcccttaaagtacttattcagaccagaagaaattgaattgcttatatgtggaagccggaatctagatttccaagcactagaagaaactacagaatatgacggtggctataccagggactctgttctgattagggagttctgggaaatcgttcattcatttacagatgaacagaaaagactcttcttgcagtttacaacgggcacagacagagcacctgtgggaggactaggaaaattaaagatgattatagccaaaaatggcccagacacagaaaggttacctacatctcatacttgctttaatgtgcttttacttccggaatactcaagcaaagaaaaacttaaagagagattgttgaaggccatcacgtatgccaaaggatttggcatgctgtaaaacaaaacaaaacaaaataaaacaaaaaaaaggaaggaaaaaaaaagaaaaaatttaaaaaattttaaaaatataacgagggataaatttttggtggtgatagtgtcccagtacaaaaaggctgtaagatagtcaaccacagtagtcacctatgtctgtgcctcccttctttattggggacatgtgggctggaacagcagatttcagctacatatatgaacaaatcctttattattattataattatttttttgcgtgaaagtgttacatattctttcacttgtatgtacagagaggtttttctgaatatttattttaagggttaaatcacttttgcttgtgtttattactgcttgaggttgagccttttgagtatttaaaaaatatataccaacagaactactctcccaaggaaaatattgccaccatttgtagaccacgtaaccttcaagtatgtgctacttttttgtccctgtatctaactcaaatcaggaactgtattttttttaatgatttgcttttgaaacttgaagtcttgaaaacagtgtgatgcaattactgctgttctagcccccaaagagttttctgtgcaaaatcttgagaatcaatcaataaagaaagatggaaggaagggagaaattggaatgttttaactgcagccctcagaactttagtaacagcacaacaaattaaaaacaaaaacaactcatgccacagtatgtcgtcttcatgtgtcttgcaatgaactgtttcagtagccaatcctctttcttagtatatgaaaggacagggatttttgttcttgttgttctcgttgttgttttaagtttactggggaaagtgcatttggccaaatgaaatggtagtcaagcctattgcaacaaagttaggaagtttgttgtttgtttattataaacaaaaagcatgtgaaagtgcacttaagatagagtttttattaattacttacttattacctagattttaaatagacaatccaaagtctccccttcgtgttgccatcatcttgttgaatcagccattttatcgaggcacgtgatcagtgttgcaacataatgaaaaagatggctactgtgccttgtgttacttaatcatacagtaagctgacctggaaatgaatgaaactattactcctaagaattacattgtatagccccacagattaaatttaattaattaattcaaaacatgttaaacgttactttcatgtactatggaaaagtacaagtaggtttacattactgatttccagaagtaagtagtttcccctttcctagtcttctgtgtatgtgatgttgttaatttcttttattgcattataaaataaaaggattatgtatttttaactaaggtgagacattgatatatccttttgctacaagctatagctaatgtgctgagcttgtgccttggtgattgattgattgattgactgattgttttaactgattactgtagatcaacctgatgatttgtttgtttgaaattggcaggaaaaatgcagctttcaaatcattggggggagaaaaaggatgtctttcaggattattttaattaatttttttcataattgagacagaactgtttgttatgtaccataatgctaaataaaactgtggcacttttcaccataatttaatttagtggaaaaagaagacaatgctttccatattgtgataaggtaacatggggtttttctgggccagcctttagaacactgttagggtacatacgctaccttgatgaaagggaccttcgtgcaactgtagtcatcttaaaggcttctcatccactgtgcttcttaatgtgtaattaaagtgaggagaaattaaatactctgagggcgttttatataataaattcgtgaaga

SEQ ID NO: 293659 - DNA, 2619 bp, Artificial Sequence
  derived and/or modified sequence
atggccaccgcctgcaagagaagcggcgagccccagagcgacgacatcgaggccagcagaatgaagagagccgccgccaagcacctgatcgagagatactaccaccagctgaccgagggctgcggcaacgaggcctgcaccaacgagttctgcgccagctgccccaccttcctgagaatggacaacaacgccgccgccatcaaggccctggagctgtacaagatcaacgccaagctgtgcgacccccaccccagcaagaagggcgccagcagcgcctacctggagaacagcaagggcgcccccaacaacagctgcagcgagatcaagatgaacaagaagggcgccagaatcgacttcaaggacgtgacctacctgaccgaggagaaggtgtacgagatcctggagctgtgcagagagagagaggactacagccccctgatcagagtgatcggcagagtgttcagcagcgccgaggccctggtgcagagcttcagaaaggtgaagcagcacaccaaggaggagctgaagagcctgcaggccaaggacgaggacaaggacgaggacgagaaggagaaggccgcctgcagcgccgccgccatggaggaggacagcgaggccagcagcagcagaatcggcgacagcagccagggcgacaacaacctgcagaagctgggccccgacgacgtgagcgtggacatcgacgccatcagaagagtgtacaccagactgctgagcaacgagaagatcgagaccgccttcctgaacgccctggtgtacctgagccccaacgtggagtgcgacctgacctaccacaacgtgtacagcagagaccccaactacctgaacctgttcatcatcgtgatggagaacagaaacctgcacagccccgagtacctggagatggccctgcccctgttctgcaaggccatgagcaagctgcccctggccgcccagggcaagctgatcagactgtggagcaagtacaacgccgaccagatcagaagaatgatggagaccttccagcagctgatcacctacaaggtgatcagcaacgagttcaacagcagaaacctggtgaacgacgacgacgccatcgtggccgccagcaagtgcctgaagatggtgtactacgccaacgtggtgggcggcgaggtggacaccaaccacaacgaggaggacgacgaggagcccatccccgagagcagcgagctgaccctgcaggagctgctgggcgaggagagaagaaacaagaagggccccagagtggaccccctggagaccgagctgggcgtgaagaccctggactgcagaaagcccctgatccccttcgaggagttcatcaacgagcccctgaacgaggtgctggagatggacaaggactacaccttcttcaaggtggagaccgagaacaagttcagcttcatgacctgccccttcatcctgaacgccgtgaccaagaacctgggcctgtactacgacaacagaatcagaatgtacagcgagagaagaatcaccgtgctgtacagcctggtgcagggccagcagctgaacccctacctgagactgaaggtgagaagagaccacatcatcgacgacgccctggtgagactggagatgatcgccatggagaaccccgccgacctgaagaagcagctgtacgtggagttcgagggcgagcagggcgtggacgagggcggcgtgagcaaggagttcttccagctggtggtggaggagatcttcaaccccgacatcggcatgttcacctacgacgagagcaccaagctgttctggttcaaccccagcagcttcgagaccgagggccagttcaccctgatcggcatcgtgctgggcctggccatctacaacaactgcatcctggacgtgcacttccccatggtggtgtacagaaagctgatgggcaagaagggcaccttcagagacctgggcgacagccaccccgtgctgtaccagagcctgaaggacctgctggagtacgagggcaacgtggaggacgacatgatgatcaccttccagatcagccagaccgacctgttcggcaaccccatgatgtacgacctgaaggagaacggcgacaagatccccatcaccaacgagaacagaaaggagttcgtgaacctgtacagcgactacatcctgaacaagagcgtggagaagcagttcaaggccttcagaagaggcttccacatggtgaccaacgagagccccctgaagtacctgttcagacccgaggagatcgagctgctgatctgcggcagcagaaacctggacttccaggccctggaggagaccaccgagtacgacggcggctacaccagagacagcgtgctgatcagagagttctgggagatcgtgcacagcttcaccgacgagcagaagagactgttcctgcagttcaccaccggcaccgacagagcccccgtgggcggcctgggcaagctgaagatgatcatcgccaagaacggccccgacaccgagagactgcccaccagccacacctgcttcaacgtgctgctgctgcccgagtacagcagcaaggagaagctgaaggagagactgctgaaggccatcacctacgccaagggcttcggcatgctgtag

SEQ ID NO: 293660 - protein, 139 aa, Artificial Sequence
  derived and/or modified sequence
MPEGPELHLASQFVNEACRALVFGGCVEKSSVSRNPEVPFESSAYRISASARGKELRLILSPLPGAQPQQEPRAPRGAATPCPPALLHGPAWPPARPMFRGHPPVRPLGPWGKVAAGPRALCLAGVPAVQGECATKPSG

SEQ ID NO: 293661 - protein, 390 aa, Artificial Sequence
  derived and/or modified sequence
MPEGPELHLASQFVNEACRALVFGGCVEKSSVSRNPEVPFESSAYRISASARGKELRLILSPLPGAQPQQEPLALVFRFGMSGSFQLVPREELPRHAHLRFYTAPPGPRLALCFVDIRRFGRWDLGGKWQPGRGPCVLQEYQQFRENVLRNLADKAFDRPICEALLDQRFFNGIGNYLRAEILYRLKIPPFEKARSVLEALQQHRPSPELTLSQKIRTKLQNPDLLELCHSVPKEVVQLGGKGYGSESGEEDFAAFRAWLRCYGMPGMSSLQDRHGRTIWFQGDPGPLAPKGRKSRKKKSKATQLSPEDRVEDALPPSKAPSRTRRAKRDLPKRTATQRPEGTSLQQDPEAPTVPKKGRRKGRQAASGHCRPRKVKADIPSLEPEGTSAS

SEQ ID NO: 293662 - DNA, 1896 bp, Artificial Sequence
  derived and/or modified sequence
ctctttctcgcctcagggcctttgtactggcggttccttccgccggacacgtcgggtttcctcgtttttgcggactggcgctttctgatttcagagactctccgcaacagaaccatctcaagtgggtctacctcctcgcctttttttgttgttgttgttgcttggctgcgcttctgacagggcaggccgtgatgatgtttgtttatgagttaggtctgactgttcgttggtgcttaagatccccaccgggtccctagggcctgtgcgtaccgcgcacctgtgcacgtcctgcgcgcagctgcaggcgactccgctctggctcgtcgctgctgtttcctgctgggggtgccgaccctgtcccacgctagctgggtgacttcccccaaccgcagagacagcggcgacccggggcctcagacctgcccccgcatctcgccggcgccaggcagtgggaagtcaggttcttccgccacctcccagccaggactctgccaccctccctcaggatgcctgagggccccgagctgcacctggccagccagtttgtgaatgaggcctgcagggcgctggtgttcggcggctgcgtggagaagtcctctgtcagccgcaaccctgaggtgccctttgagagcagtgcctaccgcatctcagcttcagcccgcggcaaggagctgcgcctgatactgagccctctgcctggggcccagccccaacaggagccactggccctggtcttccgcttcggcatgtccggctcttttcagctggtgccccgcgaggagctgccacgccatgcccacctgcgcttttacacggccccgcctggcccccggctcgccctatgtttcgtggacatccgccggttcggccgctgggaccttgggggaaagtggcagccgggccgcgggccctgtgtcttgcaggagtaccagcagttcagggagaatgtgctacgaaacctagcggataaggcctttgaccggcccatctgcgaggccctcctggaccagaggttcttcaatggcattggcaactatctgcgggcagagatcctgtaccggctgaagatccccccctttgagaaggcccgctcggtcctggaggccctgcagcagcacaggccgagcccggagctgaccctgagccagaagataaggaccaagctgcagaatccagacctgctggagctatgtcactcagtgcccaaggaagtggtccagttggggggcaaaggctacgggtcagagagcggggaggaggactttgctgcctttcgagcctggctgcgctgctatggcatgccaggcatgagctccctgcaggaccggcatggccgtaccatctggttccagggggatcctggaccgttggcacccaaagggcgcaagtcccgcaaaaagaaatccaaggccacacagctgagtcctgaggacagagtggaggacgctttgcctccaagcaaggccccttccaggacacgaagggcaaagagagaccttcctaagaggactgcaacccagcggcctgaggggaccagcctccagcaggacccagaagctcccacagtgcccaagaaggggaggaggaaggggcgacaggcagcctctggccactgcagaccccggaaggtcaaggctgacatcccatccttggaaccagaggggacctcagcctcttagcaggaggctctccttgcttgcactcaccctttcttattgtcttgccctgcatctgggggtctgaatttttgggagcaggcaatatctgaaggtgcaaacaggccctacggctgttccctgcacaactctcatggttttaattgtaccccatcttccacatctttaaagctcatgtgaaaaatgctgcatttttaataaactgatacatttgaacttc

SEQ ID NO: 293663 - protein, 603 aa, Artificial Sequence
  derived and/or modified sequence
MSSSTEVSRCIAHLHRTELHGQLISVEKVKGDPSKKEMKKENDEKSSSRSSGDKKNTSDRSSKTQASVKKEEKRSSEKSEKKESKDTKKIEGKDEKNDNGASGQTSESIKKSEEKKRISSKSPGHMVILDQTKGDHCRPSRRGRYEKIHGRSKEKERASLDKKRDKDYRRKEILPFEKMKEQRLREHLVRFERLRRAMELRRRREIAERERRERERIRIIREREERERLQRERERLEIERQKLERERMERERLERERIRIEQERRKEAERIAREREELRRQQQQLRYEQEKRNSLKRPRDVDHRRDDPYWSENKKLSLDTDARFGHGSDYSRQQNRFNDFDHRERGRFPESSAVQSSSFERRDRFVGQSEGKKARPTARREDPSFERYPKNFSDSRRNEPPPPRNELRESDRREVRGERDERRTVIIHDRPDITHPRHPREAGPNPSRPTSWKSEGSMSTDKRETRVERPERSGREVSGHSVRGAPPGNRSSASGYGSREGDRGVITDRGGGSQHYPEERHVVERHGRDTSGPRKEWHGPPSQGPSYHDTRRMGDGRAGAGMITQHSSNASPINRIVQISGNSMPRGSGSGFKPFKGGPPRRF

SEQ ID NO: 293664 - DNA, 1812 bp, Artificial Sequence
  derived and/or modified sequence
atgtccagttccacagaagtttctcgttgcattgcacaccttcatagaacagaacttcatgggcagctgatcagcgtggagaaagtgaaaggagatccttccaaaaaagagatgaagaaggagaatgatgagaagagtagcagtagatcttcgggtgacaagaagaatacatcagataggtcctcaaagactcaggcaagcgtgaagaaggaagaaaagcgttccagcgagaaaagtgaaaagaaagagagtaaggatacgaagaaaattgaggggaaagatgaaaagaatgataacggcgctagcggacagacaagtgaaagcatcaaaaagtcggaggaaaaaaaaagaatttcttccaaatcgcccgggcacatggtgatcctcgaccagaccaagggggatcactgtagaccgtctaggaggggacgatacgagaagattcacggacgtagcaaggaaaaggaaagggcgtcattggataaaaaaagagacaaggactacagacgaaaagagatactgcctttcgaaaagatgaaggaacaaagattgcgggagcacctggtccgattcgagaggctccgcagagctatggaactcagacggagacgggaaattgcagagcgcgaacgacgggagagagagaggatccggatcattagggagagagaggagcgagagaggctgcagcgcgaaagggaaaggctggaaatcgagaggcaaaagctggagcgggagaggatggaacgggaaagattggaacgcgagaggattcgcattgagcaggaaagacgaaaagaagcagaaagaattgcccgcgagagagaagagctgcggaggcagcagcaacagctcagatatgagcaggagaagcggaatagcctaaagagacctcgcgacgtcgaccacaggcgggatgatccgtactggtcagagaacaagaagcttagcctggacacagatgccaggttcgggcacgggagcgattactctcggcaacaaaacaggtttaacgattttgatcatagagagagggggagatttccagaatcttctgccgtacagagttccagtttcgaaagaagagacaggttcgtgggccagtctgaggggaaaaaagccaggcctaccgctcggagggaggatccttcttttgaaagatacccaaaaaacttctctgattcacgccgcaacgagccaccgccaccccggaacgagctcagagagtccgaccggcgggaggtgcgtggagagagggatgaacgacggaccgtaatcattcatgatcgccccgatataacccacccccgccatcctcgggaggccggacctaacccgtctcgccctacgtcatggaagtcagaggggtcgatgagcaccgataaaagggagaccagggtggaacgacctgagcgttcagggcgcgaggttagtggccactctgtccgcggggctccacctgggaatcgctccagtgcttcggggtacggatccagagaaggggatcgcggtgtcatcacagatcgaggcggcggctcgcaacactatccagaagagcgacacgttgttgaacggcacggccgggatacatctggtccccgtaaggaatggcatgggccaccttcacaggggcctagctaccacgatactaggaggatgggtgatggcagagccggggctgggatgatcacccagcactctagtaacgcatcccccatcaacaggattgtacagatttctggcaacagcatgcccagggggagcgggtcagggttcaaaccgttcaaaggcgggcctcctagacgtttctag

SEQ ID NO: 293665 - DNA, 303 bp, Artificial Sequence
  derived and/or modified sequence
ggggtgatcaccgaccgaggaggaggcagtcagcattacccggaggagcgacacgtggtggaacgccacgggcgggataccagcggcccgcgtaaagagtggcacggcccaccatcccaaggccctagttaccacgacacccgacgcatgggtgacgggcgggcaggtgctggaatgataacccaacacagctcaaacgcatcgccaataaatagaatcgtgcagataagcggtaactcgatgccacgcgggtccggtagcggcttcaagccgttcaagggtgggccacccagaaggttctag

SEQ ID NO: 293666 - DNA, 1812 bp, Artificial Sequence
  derived and/or modified sequence
atgagcagcagcacagaggtgagccgctgcatcgcccacctgcacaggacagagctgcacggccagctgatctctgtggagaaggtgaagggggaccccagcaagaaggagatgaagaaggaaaatgatgagaagagcagcagccgcagcagcggggacaagaagaacaccagtgacaggagcagcaagacccaggcctctgtgaagaaggaggagaagaggagcagcgagaagtctgagaagaaggagagcaaggacaccaagaagattgagggcaaggatgagaagaatgacaatggagccagcggccagaccagcgagagcatcaagaagtctgaggagaagaagaggatcagcagcaagagccctggccacatggtgatcctggaccagaccaagggggaccactgccggcccagcagaagaggccgctatgagaagatccacggccgcagcaaggagaaggagcgggccagcctggacaagaagagggacaaggactacagaaggaaggagatcctgccctttgagaagatgaaggagcagaggctgcgggagcacctggtgcgctttgagcggctgcggcgggccatggagctgcggaggagaagagaaattgctgagcgggagcggcgggagcgggagcgcatccgcatcatccgggagcgggaggagcgggagcggctgcagcgggagcgggagcggctggagattgaaaggcagaagctggagcgggagaggatggagcgggagcggctggagcgggagcgcatccgcatcgagcaggagaggaggaaggaggccgagagaattgcccgggagcgggaggagctgcggcggcagcagcagcagctgcgctatgagcaggagaagaggaacagcctgaagaggcccagagatgtggaccacagaagagatgacccctactggagcgagaacaagaagctgagcctggacacagatgcccgcttcggccacggcagtgactacagccggcagcagaaccgcttcaatgactttgaccaccgggagcggggccgcttccctgagagcagcgctgtgcagagcagcagctttgaaagaagagacagatttgtgggccagagcgagggcaagaaggcccggcccacagcccggcgggaggaccccagctttgagcgctaccccaagaacttcagtgacagcagaagaaatgagcccccacctccaagaaatgagctgcgggagagtgaccggcgggaggtgcggggggagagagatgagaggagaactgtcatcatccatgacagaccagacatcacccaccccaggcacccccgggaggccggccccaaccccagccggcccacctcctggaagtctgagggctccatgagcacagacaagcgggagaccagggtggagaggcctgagaggagcggccgggaggtgtctggccacagcgtgcggggggcccctcctggcaacagaagcagcgccagcggctacggcagccgggagggggaccggggcgtcatcacagaccggggcggcggcagccagcactacccagaggagagacatgtggtggagcggcacggccgggacaccagcggccccaggaaggagtggcacggcccccccagccagggccccagctaccatgacaccaggaggatgggagatggccgggccggggccggcatgatcacccagcacagcagcaatgccagccccatcaaccgcatcgtgcagatcagcggcaacagcatgccccggggcagcggcagcggcttcaagcccttcaagggcggccccccccggcgcttctag

SEQ ID NO: 293667 - DNA, 303 bp, Artificial Sequence
  derived and/or modified sequence
ggtgtcatcacagacagaggaggcggcagccagcactacccagaggagcggcacgtggtggagagacatggccgggacaccagcggccccaggaaggagtggcacggcccccccagccagggccccagctaccatgacaccaggaggatgggagatggccgggccggggccggcatgatcacccagcacagcagcaatgccagccccatcaacagaattgtgcagatcagcggcaacagcatgccccggggcagcggcagcggcttcaagcccttcaagggcggccccccccggcgcttctag

SEQ ID NO: 293668 - DNA, 3021 bp, Artificial Sequence
  derived and/or modified sequence
actcgctgcctcggcagcgcgctgctcttctaagatggctgccgctaccggtgcggtggcagcctcggccgcctcgggtcaggcggaaggtaaaaagatcaccgatctgcgggtcatcgatctgaagtccgagctgaagcggcggaacttagacatcaccggagtcaagaccgtgctcatctcccgactcaagcaggtaaaaaacatgaagcagatgagttgagtggagatgcttctgtggaagatgatgcttttatcaaggactgtgaattggagaatcaagaggcacatgagcaagatggaaatgatgaactaaaggactctgaagaatttggtgaaaatgaagaagaaaatgtgcattccaaggagttactctctgcagaagaaaacaagagagctcatgaattaatagaggcagaaggaatagaagatatagaaaaagaggacatcgaaagtcaggaaattgaagctcaagaaggtgaagatgatacctttctaacagcccaagatggtgaggaagaagaaaatgagaaagctcttcaaaggaatctaaagacagcaagacatcatctaaagatgacaaaggaagtacaagtagtactagtggtagcagtggaagctcaactaaaaatatctgggttagtggactttcatctaataccaaagctgctgatttgaagaacctctttggcaaatatggaaaggttctgagtgcaaaagtagttacaaatgctcgaagtcctggggcaaaatgctatggcattgtaactatgtcttcaagcacagaggtgtccaggtgtattgcacatcttcatcgcactgagctgcatggacagctgatttctgttgaaaaagtaaaaggtgatccctctaagaaagaaatgaagaaagaaaatgatgaaaagagtagttcaagaagttctggagataaaaaaaatacgagtgatagaagtagcaagacacaagcctctgtcaaaaaagaagagaaaagatcgtctgagaaatctgaaaaaaaagaaagcaaggatactaagaaaatagaaggtaaagatgagaagaatgataatggagcaagtggccaaacatcagaatcgattaaaaaaagtgaagaaaagaagcgaataagttccaagagtccaggacatatggtaatactagaccaaactaaaggagatcattgtagaccatcaagaagaggaagatatgagaaaattcatggaagaagtaaggaaaaggagagagctagtctagataaaaaaagagataaagactacagaaggaaagagatcttgccttttgaaaagatgaaggaacaaaggttgagagaacatttagttcgttttgaaaggctgcgacgagcaatggaacttcgaagacgaagagagattgcagagagagagcgtcgagagcgagaacgcattagaataattcgtgaacgggaagaacgggaacgcttacagagagagagagagcgcctagaaattgaaaggcaaaaactagagagagagagaatggaacgcgaacgcttggaaagggaacgcattcgtattgaacaggaacgtcgtaaggaagctgaacggattgctcgagaaagagaggaactcagaaggcaacaacagcagcttcgttatgaacaagaaaaaaggaattccttgaaacgcccacgtgatgtagatcataggcgagatgatccttactggagcgagaataaaaagttgtctctagatacagatgcacgatttggccatggatccgactactctcgccaacagaacagatttaatgactttgatcaccgagagaggggcaggtttcctgagagttcagcagtacagtcttcatcttttgaaaggcgggatcgctttgttggtcaaagtgaggggaaaaaagcacgacctactgcacgaagggaagatccaagcttcgaaagatatcccaaaaatttcagtgactccagaagaaatgagcctccaccaccaagaaatgaacttagagaatcagacaggcgagaagtacgaggggagcgagacgaaaggagaacggtgattattcatgacaggcctgatatcactcatcctagacatcctcgagaggcagggcccaatccttccagacccaccagctggaaaagtgaaggaagcatgtccactgacaaacgggaaacaagagttgaaaggccagaacgatctgggagagaagtatcagggcacagtgtgagaggcgctccccctgggaatcgtagcagcgcttcggggtacgggagcagagagggagacagaggagtcatcacagaccgaggaggtggatcacagcactatcctgaggagcgacatgtggttgaacgccatggacgggacacaagcggaccaaggaaagagtggcatggtccaccctctcaagggcctagctatcatgatacgaggcgaatgggtgacggccgggcaggagcaggcatgataacccaacattcaagtaacgcatccccaattaatagaattgtacaaatcagtggcaattccatgccaagaggaagtggctccggatttaagccatttaagggtggacctccgcgacgattctgaaaatgagctctctgccaaggttttaagataatttattgaaatctcctgtaaactttacttgactacttatgaagaggacctctgacttgcttgagagttctgtcagacttttctttttaaaaatttaacatgattgcttttctcaattttggagaagatgtttaaatagttctgttgtaacttttaatagttttgtgtatcattcaactttttttcttgcagcaccgaggcacatttgaaaagatggaattgaagtcgttttgtttaacgctgtgtgaatataaagagtagtttgcagctgtgtggtagtggtttaatttgcagccttagctctgtggtgtctggctctagagttacttctttttaccaagcattttcagcctccattttgaaggctgtctacacttaagaagtcttagctgtctaatttttagagaat

SEQ ID NO: 293669 - DNA, 674 bp, Artificial Sequence
  derived and/or modified sequence
ggagtcatcacagaccgaggaggtggatcacagcactatcctgaggagcgacatgtggttgaacgccatggacgggacacaagcggaccaaggaaagagtggcatggtccaccctctcaagggcctagctatcatgatacgaggcgaatgggtgacggccgggcaggagcaggcatgataacccaacattcaagtaacgcatccccaattaatagaattgtacaaatcagtggcaattccatgccaagaggaagtggctccggatttaagccatttaagggtggacctccgcgacgattctgaaaatgagctctctgccaagcaccgaggcacatttgaaaagatggaattgaagtcgttttgtttaacgctgtgtgaatataaagagtagtttgcagctgtgtggtagtggtttaatttgcagccttagctctgtggtgtctggctctagagttacttctttttaccaagcattttcagcctccattttgaaggctgtctacacttaagaagtcttagctgtctaatttttagagaataagattgttcattgcatttctgagtattatgtaacctatttttgcagaaggtactgttacattaagtgcatctgtgtatcctggtttaaaaaaatgtaatcttttttgaaataaaccttcatattctgtatagtt

SEQ ID NO: 293670 - DNA, 1812 bp, Artificial Sequence
  derived and/or modified sequence
atgagcagcagcaccgaggtgagccggtgcatcgcccacctgcaccggaccgagctccatggtcagctcattagtgtggaaaaagtcaagggtgatccttccaaaaaagaaatgaaaaaggagaacgatgagaaatcaagcagtcgatctagcggggataagaaaaatacttccgaccgcagtagcaagactcaggccagcgttaaaaaggaagagaaacgaagctctgaaaaaagcgaaaaaaaagaatccaaggatacgaaaaaaattgaaggcaaagatgagaaaaacgacaatggggcatctggccagacaagcgaaagcattaaaaagtccgaggagaagaagcgcatcagttccaaatctcccggtcacatggtcatactcgatcagaccaaaggagatcattgtcgaccttctagacgagggcggtatgaaaaaatccacgggaggagcaaagagaaagagcgggccagtcttgacaaaaagcgggataaggactaccgtaggaaagaaatcctgccttttgaaaaaatgaaggagcaacggctgcgggagcatcttgtgagatttgagaggctgcgtcgggccatggagcttcgcaggcggcgtgaaattgcagagcgtgaaaggcgcgagcgagagagaataagaattattcgggaaagggaggaaagagagcggctacagcgcgagcgagagcggctggagatcgaacgccaaaagttagagcgggagcgaatggagcgcgagagactggaacgtgaacggatacggattgaacaggaacgtcggaaggaagctgaacgaattgcccgagagagggaagaactgcgtcgtcagcagcaacagctcagatatgagcaagaaaagcgcaactcccttaagagacccagggatgtggaccaccgaagggacgacccttactggtctgaaaataaaaaactgtctctcgatacagacgccaggttcggtcacggaagcgactatagccggcagcaaaacaggttcaacgatttcgaccaccgcgagaggggcaggtttccagagtcttccgccgtacagagttcatcatttgagcggcgagaccgttttgtgggccagtctgaagggaagaaggcacgccctaccgcaaggcgcgaagatccatctttcgagagatatcctaagaacttcagcgattctaggcgaaacgagccgcctcctccaaggaatgaactcagggagtcagatagacgagaggttaggggcgagcgcgacgagaggcggactgtgatcattcacgatcgtccggatattacacatccacggcatcccagagaggcgggaccaaatcctagtcgaccgactagctggaagtccgaagggtcaatgtccactgataagcgagagacccgcgttgaaagaccagaaaggtctggacgggaggtgagtggacactctgtgagaggcgcaccccctggcaatcgcagctctgccagcggctatggctcccgagaaggagacagaggagttatcaccgatcgcggaggcgggtcccaacactaccccgaagagaggcacgtcgtggagcgccacggcagagacacgagcggaccccgcaaggaatggcacggacccccatcacagggcccatcatatcacgatacaaggagaatgggcgacggccgcgctggggctggcatgatcactcaacattctagcaacgcctcccctatcaaccgaatcgtacagatctctggaaattctatgcctcgagggtcggggagcgggttcaaaccatttaagggcggacctcccagaagattttag

SEQ ID NO: 293671 - DNA, 303 bp, Artificial Sequence
  derived and/or modified sequence
ggcgtgatcaccgaccggggcggcggcagccagcactaccccgaggagcgacacgttgtagaaaggcacggccgagatactagtggcccacgcaaagaatggcatggacctcccagccaaggcccctcataccacgacaccaggcgtatgggggatggaagagccggtgcaggcatgataacccagcactcatcaaacgctagccctattaacaggattgttcagattagcggaaattctatgccacgcggctctgggtccggatttaagccatttaagggcggaccaccacgacgcttctag

SEQ ID NO: 293672 - DNA, 1812 bp, Artificial Sequence
  derived and/or modified sequence
atgagttcatcaaccgaggtgtcaagatgcatcgcacatctgcatcgcaccgagctgcacggccagttgatctccgtcgagaaggtcaaaggcgatccttctaagaaagaaatgaaaaaagagaatgacgagaaaagctctagcagaagcagcggcgacaagaagaacacttctgacagatccagcaagacccaggcgtccgtgaaaaaagaggagaagcgcagctcagagaaaagcgaaaaaaaggaaagtaaggacacgaaaaaaatcgaaggtaaagacgagaagaacgataatggcgcaagcgggcagactagcgagtccatcaaaaagtctgaagagaagaaacggatatcatcaaaaagtccaggtcacatggttattctggatcagaccaagggcgatcactgtagacccagtagaagagggcgatatgagaagatccacggcaggagcaaggagaaagaaagggcgagcctggataagaagagagataaagattacaggcgaaaggaaattcttccattcgagaaaatgaaagagcagcgactccgcgagcacctggtgagattcgaacggctcagaagagctatggagctgaggagacggagagagatcgctgagagggaaagaagggaacgcgagaggatccgcattattagagaacgggaagagagggaaaggctccagcgagaaagggagagactcgaaatcgagcgacagaaactggagcgcgagaggatggagcgggaaagactggaacgcgaacgcatccgaatagagcaggagaggagaaaggaagctgagcgtatcgcaagggaacgagaagagcttcgtcggcagcagcagcagttgaggtatgaacaggagaagaggaatagcctaaagaggccacgggatgtggaccatagaagggatgatccgtattggtcagagaacaagaaacttagcctggacaccgacgctagatttgggcatggtagtgattatagccgacagcaaaaccgttttaacgacttcgaccatagggagagaggcagattccctgagtcgagcgcagtccagtccagcagcttcgaacgccgagataggttcgtgggacagagtgaagggaagaaagccagacctacggccagacgcgaggaccctagctttgaacgctacccgaagaacttttctgattctaggaggaacgagcctcctcctccaagaaatgaactgagggaatccgaccggcgagaagtgcggggagagcgagatgaaaggcgcacggtgatcattcatgatcgtccggacattacacacccaagacaccccagggaggcagggccaaacccctcccgtcccacctcctggaagtcggagggttctatgagcacagacaaacgagagactagggttgagcggccagagagatcaggaagggaagtatctggacactcagttaggggggctcccccaggcaacagatctagcgctagtggatacgggtcgagagagggggacagaggagttatcaccgacagggggggaggatcacagcattatcccgaggagcgtcacgtggtggaaagacatgggagggatacttcggggcctagaaaggagtggcacggacctcccagtcaaggcccatcgtatcacgacacgagaagaatgggcgatggccgagcgggtgcaggaatgatcacccagcactcaagcaatgcctctcccatcaaccgcatcgtccagatttccgggaactcaatgcctcgagggagcggctctggcttcaaacccttcaagggaggacctccacgcaggttttag

SEQ ID NO: 293673 - DNA, 303 bp, Artificial Sequence
  derived and/or modified sequence
ggtgtgatcaccgacaggggtgggggttctcaacactatcccgaggagcgacacgttgtggaacggcacggccgagatacctctggaccaaggaaagaatggcacggcccacccagccaggggccatcctatcatgacacccggagaatgggcgacgggcgagccggagccggaatgatcacccaacattcatctaacgcttctcctattaatcggatagttcaaatttctggcaattctatgcctcggggaagcgggtctgggttcaagccattcaagggaggccctcctagaaggttttag

SEQ ID NO: 293674 - DNA, 1812 bp, Artificial Sequence
  derived and/or modified sequence
atgagcagcagcaccgaggtgagcagatgcatcgcccacctgcacagaaccgagctgcacggccagctgatcagcgtggagaaggtgaagggcgaccccagcaagaaggagatgaagaaggagaacgacgagaagagcagcagcagaagcagcggcgacaagaagaacaccagcgacagaagcagcaagacccaggccagcgtgaagaaggaggagaagagaagcagcgagaagagcgagaagaaggagagcaaggacaccaagaagatcgagggcaaggacgagaagaacgacaacggcgccagcggccagaccagcgagagcatcaagaagagcgaggagaagaagagaatcagcagcaagagccccggccacatggtgatcctggaccagaccaagggcgaccactgcagacccagcagaagaggcagatacgagaagatccacggcagaagcaaggagaaggagagagccagcctggacaagaagagagacaaggactacagaagaaaggagatcctgcccttcgagaagatgaaggagcagagactgagagagcacctggtgagattcgagagactgagaagagccatggagctgagaagaagaagagagatcgccgagagagagagaagagagagagagagaatcagaatcatcagagagagagaggagagagagagactgcagagagagagagagagactggagatcgagagacagaagctggagagagagagaatggagagagagagactggagagagagagaatcagaatcgagcaggagagaagaaaggaggccgagagaatcgccagagagagagaggagctgagaagacagcagcagcagctgagatacgagcaggagaagagaaacagcctgaagagacccagagacgtggaccacagaagagacgacccctactggagcgagaacaagaagctgagcctggacaccgacgccagattcggccacggcagcgactacagcagacagcagaacagattcaacgacttcgaccacagagagagaggcagattccccgagagcagcgccgtgcagagcagcagcttcgagagaagagacagattcgtgggccagagcgagggcaagaaggccagacccaccgccagaagagaggaccccagcttcgagagataccccaagaacttcagcgacagcagaagaaacgagccccccccccccagaaacgagctgagagagagcgacagaagagaggtgagaggcgagagagacgagagaagaaccgtgatcatccacgacagacccgacatcacccaccccagacaccccagagaggccggccccaaccccagcagacccaccagctggaagagcgagggcagcatgagcaccgacaagagagagaccagagtggagagacccgagagaagcggcagagaggtgagcggccacagcgtgagaggcgccccccccggcaacagaagcagcgccagcggctacggcagcagagagggcgacagaggcgtgatcaccgacagaggcggcggcagccagcactaccccgaggagagacacgtggtggagagacacggcagagacaccagcggccccagaaaggagtggcacggcccccccagccagggccccagctaccacgacaccagaagaatgggcgacggcagagccggcgccggcatgatcacccagcacagcagcaacgccagccccatcaacagaatcgtgcagatcagcggcaacagcatgcccagaggcagcggcagcggcttcaagcccttcaagggcggcccccccagaagattctag

SEQ ID NO: 293675 - DNA, 303 bp, Artificial Sequence
  derived and/or modified sequence
ggcgtgatcaccgacagaggcggcggcagccagcactaccccgaggagagacacgtggtggagagacacggcagagacaccagcggccccagaaaggagtggcacggcccccccagccagggccccagctaccacgacaccagaagaatgggcgacggcagagccggcgccggcatgatcacccagcacagcagcaacgccagccccatcaacagaatcgtgcagatcagcggcaacagcatgcccagaggcagcggcagcggcttcaagcccttcaagggcggcccccccagaagattctag

SEQ ID NO: 293676 - protein, 1192 aa, Artificial Sequence
  derived and/or modified sequence
MFCSEKKLREVERIVKANDREYNEKFQYADNRIHTSKYNILTFLPINLFEQFQRVANAYFLCLLILQLIPEISSLTWFTTIVPLVLVITMTAVKDATDDYFRHKSDNQVNNRQSEVLINSKLQNEKWMNVKVGDIIKLENNQFVAADLLLLSSSEPHGLCYVETAELDGETNLKVRHALSVTSELGADISRLAGFDGIVVCEVPNNKLDKFMGILSWKDSKHSLNNEKIILRGCILRNTSWCFGMVIFAGPDTKLMQNSGKTKFKRTSIDRLMNTLVLWIFGFLICLGIILAIGNSIWESQTGDQFRTFLFWNEGEKSSVFSGFLTFWSYIIILNTVVPISLYVSVEVIRLGHSYFINWDRKMYYSRKAIPAVARTTTLNEELGQIEYIFSDKTGTLTQNIMTFKRCSINGRIYGEVHDDLDQKTEITQEKEPVDFSVKSQADREFQFFDHHLMESIKMGDPKVHEFLRLLALCHTVMSEENSAGELIYQVQSPDEGALVTAARNFGFIFKSRTPETITIEELGTLVTYQLLAFLDFNNTRKRMSVIVRNPEGQIKLYSKGADTILFEKLHPSNEVLLSLTSDHLSEFAGEGLRTLAIAYRDLDDKYFKEWHKMLEDANAATEERDERIAGLYEEIERDLMLLGATAVEDKLQEGVIETVTSLSLANIKIWVLTGDKQETAINIGYACNMLTDDMNDVFVIAGNNAVEVREELRKAKQNLFGQNRNFSNGHVVCEKKQQLELDSIVEETITGDYALIINGHSLAHALESDVKNDLLELACMCKTVICCRVTPLQKAQVVELVKKYRNAVTLAIGDGANDVSMIKSAHIGVGISGQEGLQAVLASDYSFAQFRYLQRLLLVHGRWSYFRMCKFLCYFFYKNFAFTLVHFWFGFFCGFSAQTVYDQWFITLFNIVYTSLPVLAMGIFDQDVSDQNSVDCPQLYKPGQLNLLFNKRKFFICVLHGIYTSLVLFFIPYGAFYNVAGEDGQHIADYQSFAVTMATSLVIVVSVQIALDTSYWTFINHVFIWGSIAIYFSILFTMHSNGIFGIFPNQFPFVGNARHSLTQKCIWLVILLTTVASVMPVVAFRFLKVDLYPTLSDQIRRWQKAQKKARPPSSRRPRTRRSSSRRSGYAFAHQEGYGELITSGKNMRAKNPPPTSGLEKTHYNSTSWIENLCKKTTDTVSSFSQDKTVKL

SEQ ID NO: 293677 - DNA, 5677 bp, Artificial Sequence
  derived and/or modified sequence
gcttttctccttggcatggtcacggaatggatacctgtttgatcttcctgcactgctgagaaatcttccttttgggggagaggattaagtctgggttgaggtaggccacctgttgagacctggtgaaagatcaggtataataatgttctgcagtgaaaagaaattgcgtgaagtggaacggatagtgaaagccaatgaccgtgaatataatgaaaagttccagtatgcggataatcgtatccacacatcgaaatataatattctcaccttcttgccaattaatttatttgaacagttccaaagagtggcaaatgcctattttctttgccttctgattttacagctaattccagaaatttcctccttgacctggtttaccaccattgtgcctttggtcctggtgataactatgacagctgtcaaagatgccacagatgactattttcgccacaagagtgataatcaagtgaataatcggcagtctgaagtgctcatcaacagcaaactgcagaatgaaaaatggatgaatgtcaaagtgggagacatcattaaattagaaaataaccaatttgttgctgctgatttacttctcctatcaagtagtgagccacatggtctctgttatgttgaaactgctgagcttgatggggaaacgaacctaaaagtccgccatgcactatcagttacttcagaacttggagcagatatcagcagacttgcagggtttgatgggattgttgtctgtgaggtgcctaacaacaagttagataaattcatgggaatcctttcttggaaagacagcaagcattccctcaacaatgagaagataatcctgagaggctgcatcctgagaaataccagctggtgttttggaatggttatttttgcaggtcctgacactaaactaatgcagaatagtggtaagacaaagtttaaaaggacaagcattgatagattgatgaatactctagtactatggatttttgggtttctgatatgcttgggaattattcttgcaataggaaattcaatctgggagagtcaaactggggaccaattcagaactttcctcttttggaatgaaggagagaagagctctgtgttctccggattcttaacattctggtcatatattattattctcaatacagttgtacccatttccttatatgtgagtgtggaagtaattcgtctaggacacagttattttataaactgggaccggaagatgtattattctcgaaaagcaatacctgcagtggctcgaacgaccacgctcaatgaggaactggggcagattgagtacattttctccgacaaaacgggtaccctcactcaaaacatcatgacctttaaaagatgttccattaatgggagaatctatggtgaagtacatgatgacctggatcagaagacagaaataactcaggaaaaagagcctgtggatttctcagtcaaatctcaagcggatagagaatttcagttctttgaccaccatctgatggaatccattaaaatgggtgatcccaaagttcatgaattccttaggttacttgctctctgccacactgtaatgtcagaagagaatagcgcaggagagctgatttaccaagttcagtcacctgatgaaggggctctagtgactgccgctagaaattttgggttcatttttaaatcccggaccccagagaccataacaatagaagaattgggaacactagttacttatcaattacttgcctttttggatttcaacaacaccagaaaaaggatgtctgtcatagttcgaaacccagaaggacagataaagctttattccaaaggagcagatactattctgtttgaaaaacttcatccttccaatgaagtccttttgtctttgacgtcagaccacctcagtgaatttgcaggggaaggccttcggaccttggccatcgcatacagagacctggatgacaagtactttaaagagtggcataagatgcttgaagatgcgaatgctgccacagaagagagggatgaacgaatagctgggctatatgaagaaattgaaagagatttgatgctactaggtgccactgctgtagaagataagttacaggagggtgttattgaaacagttacaagtttatcactagccaatattaagatctgggtcctaacaggagacaaacaagaaactgccatcaacatcggttatgcctgcaacatgctgactgacgacatgaatgatgtgtttgtgatagcagggaataatgctgtggaagtgagagaagaactcaggaaagcaaaacaaaatttgtttggacaaaacagaaatttttccaatggccatgtagtttgtgaaaaaaagcagcagctggagttggattctattgtagaagaaaccataacaggagattatgccttaatcataaatggccacagtttggctcatgccctagaaagtgatgtcaagaatgatctcctagaacttgcttgcatgtgtaagactgtaatttgctgcagggtcactccactccagaaagcccaagtggtagagctggtgaagaagtacagaaatgctgttactttggccattggtgatggagccaatgatgtcagcatgattaaaagtgctcacattggtgttggcatcagcggccaggaaggattgcaagcagtcttagccagcgactattcatttgcacagtttagatatctccaaaggcttctccttgttcatggaaggtggtcttatttccgaatgtgcaaattcttatgctatttcttctataagaattttgcatttacacttgtgcatttctggtttggtttcttctgtggtttctcagcccagactgtttatgaccagtggttcatcaccctttttaacattgtttacacatcactgcctgttttagccatggggatttttgaccaggatgtgagtgaccagaacagcgtggactgtccccagctctacaaaccaggacagctgaatctgctttttaacaagcgtaaatttttcatttgcgtgttgcatggaatctacacctcattagtccttttcttcatcccctatggggccttttacaacgtggctggagaagatgggcaacatattgctgactaccagtcctttgcagttaccatggccacatctttggtcattgtggtcagtgtgcagatagccttggataccagttactggactttcattaatcacgtcttcatctgggggagcattgccatttatttctccattttatttacaatgcacagtaatggcatctttggcatcttcccaaaccagtttccatttgttggtaatgcacgacattccctgacccagaagtgcatctggcttgtaattctcttaacaacagtggcttcagttatgccagtggtggcattcagatttttgaaggtggatttatacccaaccctgagtgatcagatccgccggtggcagaaggctcaaaagaaggcaaggcctccaagtagccgaaggcctcggacccgcaggtcaagctcaagaaggtctggctatgcttttgctcaccaagaaggctatggagagcttatcacatctggaaaaaatatgcgagctaaaaatccacccccaacatcagggctggaaaagacacattataatagcactagctggattgaaaatttatgtaagaaaaccacagacaccgtgagcagctttagccaggataaaacagtgaaactgtgagtcaatatgaatttaaaccacgtagttatcttttcacttcaggtggagctgaaattctgctggctccagagtttgagatttgaggcaagaggtggggcaggcagattgcctcacttaacttaaatctgcggcagacaactgccagtgcccatcaaacaggagtgtgcgctatggaaaaccaggccagagggtcactgtctggtttgtgatttggtggacaaaacactcgctgttacaagtacagattttttttttttttaaatcaacctagataccaattgacctgaactttagaatcttatttatggagaaaaacttgtaaagctgcatattcactgaatggatcctcaggcggataaaagggtgcattttaaaggtatatatccaagctgaaaagcatgcctattgacagataaacatgtatctgtaagatcagcctttcccaaggtatacttttaaaatttaaagcgtgtactgtgttgctttcagactgagttgcatgtcactctttagtcttgatatctacctgtctgttcagccaggacaacaaatggcttccaagcctgaagaatacaaaagtgtgcttgtgtttctcatttttataccagtctagggacaaaggagactgaacatctttgcagcaggataggctggtaatttgatcaaatttattcaaaaagctctcagtctgtgtcatgtaaggacatgcttatgaaatgtgagagaggctcgccactaagtattctaaatacttttcaatggcttttctaacaacctcagtagtaatttgctgagcatcatccagaccattaatagaatcagcaaagcactggaatttcacactttaatgataatattccacatagtctatgggcaaatattttcaacatttccaatttttaaagcttcagaattgaagccaaacaaattaataaataattgttttaattactatttaaaaactcaggtttagattgtttaaaattagttgcttttgatactcagctgtcatgtttataattcaaacatgtagtaaacatatgtaggtaaggttgtttttttggagatgttgcagctcaaatttcagtccacatatgaatcatcagtgtattttccataaagtgattcgggcatatttgtgtgaaaacctcagttctgtcacttcttacctctataaacttggacgataatgtgccttctctgagactcagtttcttcctctgtaaaatgaggacatactacctacctcatgtggttggttgatgattgtctgtcaaagcacaaactctgaaattattaaaaacataattatttcataaacagatgagttaagttccagttaactcaacatcagtataacagagcaattggaagagaatatgaaaaaactggaatctaaatagtcagtgaggaaggctttgataaaatgaaattgccagaaagatataaaactggttagggtcctacagggaaataaaattataaccgtggaggtacatttctctaccagaaagcaaaaataaagcatcatgtcttaatggttttctacaaatcaacttctaattctacagagtccttaatctggtccctattaaattcttggtcagacaaagttacatttcccaagagagtcaggtgacacttgagtgagtttgatggataatgagctaatgtgatatctataggtcacaattttttaaaaccaaaattttcaagtctgggataatctttcctaaatgggatcaaatgaaataatatgtgtaaaagagtcaaatgcagtcctttaccatagtaactgcctatggacgttgtctttcccttacatgcctgcctacacttaaccagatgttggttttcaatgtctaatttgtcattagtttcaccacatttgctcactttttgtaacatttttgcaagatttgaaaactttcagtaaatgttttggcactattggta

SEQ ID NO: 293678 - DNA, 4894 bp, Artificial Sequence
  derived and/or modified sequence
aaaatgagaaagagaccagcaagagcagactaggaaaggaagagaagggaaggagaaaaggaaactagaatgcatttctgtaggccacctgttgagacctggtgaaagatcaggtataataatgttctgcagtgaaaagaaattgcgtgaagtggaacggatagtgaaagccaatgaccgtgaatataatgaaaagttccagtatgcggataatcgtatccacacatcgaaatataatattctcaccttcttgccaattaatttatttgaacagttccaaagagtggcaaatgcctattttctttgccttctgattttacagctaattccagaaatttcctccttgacctggtttaccaccattgtgcctttggtcctggtgataactatgacagctgtcaaagatgccacagatgactattttcgccacaagagtgataatcaagtgaataatcggcagtctgaagtgctcatcaacagcaaactgcagaatgaaaaatggatgaatgtcaaagtgggagacatcattaaattagaaaataaccaatttgttgctgctgatttacttctcctatcaagtagtgagccacatggtctctgttatgttgaaactgctgagcttgatggggaaacgaacctaaaagtccgccatgcactatcagttacttcagaacttggagcagatatcagcagacttgcagggtttgatgggattgttgtctgtgaggtgcctaacaacaagttagataaattcatgggaatcctttcttggaaagacagcaagcattccctcaacaatgagaagataatcctgagaggctgcatcctgagaaataccagctggtgttttggaatggttatttttgcaggtcctgacactaaactaatgcagaatagtggtaagacaaagtttaaaaggacaagcattgatagattgatgaatactctagtactatggatttttgggtttctgatatgcttgggaattattcttgcaataggaaattcaatctgggagagtcaaactggggaccaattcagaactttcctcttttggaatgaaggagagaagagctctgtgttctccggattcttaacattctggtcatatattattattctcaatacagttgtacccatttccttatatgtgagtgtggaagtaattcgtctaggacacagttattttataaactgggaccggaagatgtattattctcgaaaagcaatacctgcagtggctcgaacgaccacgctcaatgaggaactggggcagattgagtacattttctccgacaaaacgggtaccctcactcaaaacatcatgacctttaaaagatgttccattaatgggagaatctatggtgaagtacatgatgacctggatcagaagacagaaataactcaggaaaaagagcctgtggatttctcagtcaaatctcaagcggatagagaatttcagttctttgaccaccatctgatggaatccattaaaatgggtgatcccaaagttcatgaattccttaggttacttgctctctgccacactgtaatgtcagaagagaatagcgcaggagagctgatttaccaagttcagtcacctgatgaaggggctctagtgactgccgctagaaattttgggttcatttttaaatcccggaccccagagaccataacaatagaagaattgggaacactagttacttatcaattacttgcctttttggatttcaacaacaccagaaaaaggatgtctgtcatagttcgaaacccagaaggacagataaagctttattccaaaggagcagatactattctgtttgaaaaacttcatccttccaatgaagtccttttgtctttgacgtcagaccacctcagtgaatttgcaggggaaggccttcggaccttggccatcgcatacagagacctggatgacaagtactttaaagagtggcataagatgcttgaagatgcgaatgctgccacagaagagagggatgaacgaatagctgggctatatgaagaaattgaaagagatttgatgctactaggtgccactgctgtagaagataagttacaggagggtgttattgaaacagttacaagtttatcactagccaatattaagatctgggtcctaacaggagacaaacaagaaactgccatcaacatcggttatgcctgcaacatgctgactgacgacatgaatgatgtgtttgtgatagcagggaataatgctgtggaagtgagagaagaactcaggaaagcaaaacaaaatttgtttggacaaaacagaaatttttccaatggccatgtagtttgtgaaaaaaagcagcagctggagttggattctattgtagaagaaaccataacaggagattatgccttaatcataaatggccacagtttggctcatgccctagaaagtgatgtcaagaatgatctcctagaacttgcttgcatgtgtaagactgtaatttgctgcagggtcactccactccagaaagcccaagtggtagagctggtgaagaagtacagaaatgctgttactttggccattggtgatggagccaatgatgtcagcatgattaaaagtgctcacattggtgttggcatcagcggccaggaaggattgcaagcagtcttagccagcgactattcatttgcacagtttagatatctccaaaggcttctccttgttcatggaaggtggtcttatttccgaatgtgcaaattcttatgctatttcttctataagaattttgcatttacacttgtgcatttctggtttggtttcttctgtggtttctcagcccagactgtttatgaccagtggttcatcaccctttttaacattgtttacacatcactgcctgttttagccatggggatttttgaccaggatgtgagtgaccagaacagcgtggactgtccccagctctacaaaccaggacagctgaatctgctttttaacaagcgtaaatttttcatttgcgtgttgcatggaatctacacctcattagtccttttcttcatcccctatggggccttttacaacgtggctggagaagatgggcaacatattgctgactaccagtcctttgcagttaccatggccacatctttggtcattgtggtcagtgtgcagatagccttggataccagttactggactttcattaatcacgtcttcatctgggggagcattgccatttatttctccattttatttacaatgcacagtaatggcatctttggcatcttcccaaaccagtttccatttgttggtaatgcacgacattccctgacccagaagtgcatctggcttgtaattctcttaacaacagtggcttcagttatgccagtggtggcattcagatttttgaaggtggatttatacccaaccctgagtgatcagatccgccggtggcagaaggctcaaaagaaggcaaggcctccaagtagccgaaggcctcggacccgcaggtcaagctcaagaaggtctggctatgcttttgctcaccaagaaggctatggagagcttatcacatctggaaaaaatatgcgagctaaaaatccacccccaacatcagggctggaaaagacacattataatagcactagctggattgaaaatttatgtaagaaaaccacagacaccgtgagcagctttagccaggataaaacagtgaaactgtgagtcaatatgaatttaaaccacgtagttatcttttcacttcaggtggagctgaaattctgctggctccagagtttgagatttgaggcaagaggtggggcaggcagattgcctcacttaacttaaatctgcggcagacaactgccagtgcccatcaaacaggagtgtgcgctatggaaaaccaggccagagggtcactgtctggtttgtgatttggtggacaaaacactcgctgttacaagtacagattttttttttttttaaatcaacctagataccaattgacctgaactttagaatcttatttatggagaaaaacttgtaaagctgcatattcactgaatggatcctcaggcggataaaagggtgcattttaaaggtatatatccaagctgaaaagcatgcctattgacagataaacatgtatctgtaagatcagcctttcccaaggtatacttttaaaatttaaagcgtgtactgtgttgctttcagactgagttgcatgtcactctttagtcttgatatctacctgtctgttcagccaggacaacaaatggcttccaagcctgaagaatacaaaagtgtgcttgtgtttctcatttttataccagtctagggacaaaggagactgaacatctttgcagcaggataggctggtaatttgatcaaatttattcaaaaagctctcagtctgtgtcatgtaaggacatgcttatgaaatgtgagagaggctcgccactaagtattctaaatacttttcaatggcttttctaacaacctcagtagtaatttgctgagcatcatccagaccattaatagaatcagcaaagcactggaatttcacactttaatgataatattccacatagtctatgggcaaatattttcaacatttccaatttttaaagcttcagaattgaagccaaacaaattaataaataattgttttaattactatttaaaaactcaggtttagattgtttaaaattagttgcttttgatactcagctgtcatgtttataattcaaacatgtagtaaacatatgtaggtaaggttgtttttttggagatgttgcagctcaaatttcagtccacatatgaatcatcagtgtattttccataaagtgattcgggcatatttgtgtgaaaacctcagttctgtcacttcttacctctataaacttggacgataatgtg

SEQ ID NO: 293679 - protein, 416 aa, Artificial Sequence
  derived and/or modified sequence
MALWRGSAYAGFLALGLSPGNGKDHSILHSRNDLEEAFIHFMGKGAAAERFFSDKETFHDIAQVASEFPGAQHYVGGNAALIGQKFAANSDLKVLLCGPVGPKLHELLDDNVFVPPESLQEVDEFHLILEYQAGEEWGQLKAPHANRFIFSHDLSNGAMNMLEVFVSSLEEFQPDLVVLSGLHMMEGQSKELQRKRLLEVVTSISDIPTGIPVHLELASMTNRELMSSIVHQQVFPAVTSLGLNEQELLFLTQSASGPHSSLSSWNGVPDVGMVSDILFWILKEHGRSKSRASDLTRIHFHTLVYHILATVDGHWANQLAAVAAGARVAGTQACATETIDTSRVSLRAPQEFMTSHSEAGSRIVLNPNKPVVEWHREGISFHFTPVLVCKDPIRTVGLGDAISAEGLFYSEVHPHY

SEQ ID NO: 293680 - DNA, 1251 bp, Artificial Sequence
  derived and/or modified sequence
atggccctgtggaggggctccgcgtacgccggctttcttgcgttgggattatccccagggaacggaaaggaccacagtatcctgcattccaggaatgacctggaagaagcttttatccatttcatggggaagggcgctgccgcagaaaggtttttctccgacaaggagacttttcatgacattgctcaggtcgcgagtgagtttccaggagcccagcattacgtcggaggcaacgccgcccttatagggcaaaagttcgcagccaactccgacctgaaagtcctgctttgtggccccgttggcccgaaactgcatgagcttcttgacgacaacgtcttcgtccccccagagtcactgcaagaggtggacgaatttcacctaattctcgaataccaggccggggaggaatggggacaattgaaagccccccacgccaacagattcattttctcccatgacctcagcaacggagccatgaatatgctagaagtcttcgtttcgtcattggaggaatttcaaccggatctggtggttctcagcgggctgcacatgatggagggtcaatccaaagagctccagaggaagagattactcgaagtggtaacatccatcagcgatatcccaactggaatcccagtgcacctggagctcgcttctatgaccaaccgggagctgatgtcctcaatcgtccaccaacaggtgtttcctgctgttacctctctgggactgaacgaacaggaactcctgtttttaacacagtccgcatccgggccacatagcagcttgtctagctggaacggggtgcccgacgtcggcatggtgagtgatatccttttttggattctcaaagagcacgggaggtccaagagccgtgcgagcgatctgaccaggattcattttcacacactcgtttaccacatcctggctacagtggacggccactgggccaaccagctggccgctgtcgctgcaggagcaagggtcgccggcactcaagcttgtgccacagaaaccatcgatacatcacgcgtcagcctccgtgccccccaggagttcatgacgtcccatagcgaagccggttcaagaattgtgttgaatcccaataaacctgtagtcgaatggcatagagaaggaatcagcttccatttcaccccagtgctggtatgcaaagacccaattcgcactgtgggactgggtgacgcaatcagtgcagaaggcctcttttattccgaagttcatccccattattag

SEQ ID NO: 293681 - DNA, 1090 bp, Artificial Sequence
  derived and/or modified sequence
cagcattctgcattcaaggaatgatctggaagaagccttcattcacttcatggggaagggagcagctgctgagcgcttcttcagtgataaggaaacttttcacgacattgcccaggttgcatcagagttcccaggagcccagcactatgtaggaggaaatgcagctttaattggacagaaatttgcagccaactcagatttaaaggttcttctttgcggtccagttggtccaaagctacatgagcttcttgatgacaatgtctttgttccaccagagtcattgcaggaagtggatgagttccacctcattttagagtatcaagcaggggaggagtggggccagttaaaagctccccatgccaaccgattcatcttctctcacgacctctccaacggggccatgaatatgctggaggtgtttgtgtctagcctggaggagtttcagccagacctggtggtcctctctggattgcacatgatggagggacaaagcaaggagctccagaggaagagactcttggaggttgtaacctccatttctgacatccccactggtattccagttcacctagagctggccagtatgactaacagggagctcatgagcagcattgtccatcagcaggtctttcccgcggtgacttcccttgggctgaatgaacaggagctgttatttctcacccagtcagcctctggacctcactcttctctctcttcctggaacggtgttcctgatgtgggcatggtcagtgacatcctcttctggatcttgaaagaacatgggaggagtaaaagcagagcctcggatctcaccaggatccatttccacacgctggtctaccacatcctggcaactgtggatggacactgggccaaccagctggcagccgtggctagctcgtgtggctgggacacaggcctgcgccacagaaaccatagacaccagccgagtgtctctgagggcaccccaagagttcatgacttcccattcggaggcaggctccaggattgtattaaacccaaacaagccagtagtagaatggcacagagagggaatatccttccacttcacaccagtattggtgtgtaa

SEQ ID NO: 293682 - DNA, 1650 bp, Artificial Sequence
  derived and/or modified sequence
gttcgcgcaggtgcggcgcctgggtccccatggcgctgtggcgcggctccgcgtacgcgggcttcctggcacttggccttagtcctgggaatgggaaagatcacagcattctgcattcaaggaatgatctggaagaagccttcattcacttcatggggaagggagcagctgctgagcgcttcttcagtgataaggaaacttttcacgacattgcccaggttgcatcagagttcccaggagcccagcactatgtaggaggaaatgcagctttaattggacagaaatttgcagccaactcagatttaaaggttcttctttgcggtccagttggtccaaagctacatgagcttcttgatgacaatgtctttgttccaccagagtcattgcaggaagtggatgagttccacctcattttagagtatcaagcaggggaggagtggggccagttaaaagctccccatgccaaccgattcatcttctctcacgacctctccaacggggccatgaatatgctggaggtgtttgtgtctagcctggaggagtttcagccagacctggtggtcctctctggattgcacatgatggagggacaaagcaaggagctccagaggaagagactcttggaggttgtaacctccatttctgacatccccactggtattccagttcacctagagctggccagtatgactaacagggagctcatgagcagcattgtccatcagcaggtctttcccgcggtgacttcccttgggctgaatgaacaggagctgttatttctcacccagtcagcctctggacctcactcttctctctcttcctggaacggtgttcctgatgtgggcatggtcagtgacatcctcttctggatcttgaaagaacatgggaggagtaaaagcagagcctcggatctcaccaggatccatttccacacgctggtctaccacatcctggcaactgtggatggacactgggccaaccagctggcagccgtggctgcaggagctcgtgtggctgggacacaggcctgcgccacagaaaccatagacaccagccgagtgtctctgagggcaccccaagagttcatgacttcccattcggaggcaggctccaggattgtattaaacccaaacaagccagtagtagaatggcacagagagggaatatccttccacttcacaccagtattggtgtgtaaagaccccattcgaactgtaggccttggagatgccatttcagccgaaggactcttctattcggaagtacaccctcactattaggaagattcttaggggtaatttttctgaggaaggagaactagccaacttaagaattacaggaagaaagtggtttggaagacagccaaagaaataaaagcagttcttccttgcccacttgagaagtgcacgcccactcacccaacatcctggtctctaggaaagcctcatgtgaggttcctctttctttcagtctgcagttgtctggaagcctgggtggcgtcatgagctgaaggatcatgctttcctgtcctggctccataggttataggctggctggtgaaaggttcacgtggcccaggctgaacttcattgcctagctttggatgtgctttctgccataaagactgatttttgttcgttctgagccttc

SEQ ID NO: 293683 - DNA, 1251 bp, Artificial Sequence
  derived and/or modified sequence
atggccctgtggaggggcagcgcctatgccggcttcctggccctgggcctgagccctggaaatggcaaggaccacagcatcctgcacagcagaaatgacctggaggaggccttcatccacttcatgggcaaaggagctgctgctgagcgcttcttcagtgacaaggagaccttccatgacatcgcccaggtggccagcgagttccctggggcccagcactacgtgggcggcaatgctgccctgattggccagaagtttgctgccaacagcgacctgaaggtgctgctgtgtggccctgtgggccccaagctgcacgagctgctggatgacaacgtgtttgtgcccccagagagcctgcaggaggtggatgagttccacctgatcctggagtaccaggccggggaggagtggggccagctgaaggccccccacgccaaccgcttcatcttcagccatgacctgagcaatggagccatgaacatgctggaggtgtttgtgagcagcctggaggagttccagcctgacctggtggtgctgagcggcctgcacatgatggagggccagagcaaggagctgcagaggaagaggctgctggaggtggtgaccagcatcagtgacatccccaccggcatccctgtgcacctggagctggcctccatgaccaaccgggagctgatgagcagcatcgtgcaccagcaggtgtttcctgctgtgaccagcctgggcctgaatgagcaggagctgctcttcctgacccagagcgccagcggcccccacagcagcctgagctcctggaatggagtgcctgatgtgggcatggtgtctgacatcctcttctggatcctgaaggagcacggccgcagcaagagccgggccagtgacctgacccgcatccacttccacaccctggtgtaccacatcctggccaccgtggatggccactgggccaaccagctggccgctgtggccgccggggcccgggtggccggcacccaggcctgtgccacagagaccatcgacaccagccgggtgtccctgcgggccccccaggagttcatgaccagccacagcgaggccggcagcagaattgtgctgaaccccaacaagcctgtggtggagtggcaccgggagggcatctccttccacttcacccctgtgctggtgtgcaaggaccccatcagaacagtgggcctgggagatgccatctctgctgagggcctcttctacagcgaggtgcacccccactactag

SEQ ID NO: 293684 - DNA, 1251 bp, Artificial Sequence
  derived and/or modified sequence
atggccctgtggcggggcagcgcctacgccggcttcctggccctgggtctttcccccggtaatgggaaagaccacagtattctccactcccgaaacgacctagaggaagctttcatccattttatgggcaaaggggctgccgcggaacgatttttctccgacaaggagactttccatgatatcgcccaggtggcttctgagttcccaggggctcaacattacgttggcggcaacgccgcattaattgggcagaagtttgctgcaaatagcgacttaaaggtactgctgtgcggacccgtggggcctaagcttcacgagctgttggatgacaacgtcttcgtcccacccgagtccctccaagaagtagatgagttccacctcattcttgaatatcaggctggggaagagtgggggcagctgaaggctccacatgcaaatagattcattttttcacacgatctgtctaatggcgctatgaacatgttagaagtgtttgttagctctctggaggagtttcaacctgacctggtggtgctctccggcctccatatgatggaagggcagagtaaggagttgcagaggaagcgcctgttagaggttgttacttctatctcggacatccccacaggtattcctgttcatctggagctagcctctatgacaaatagagagctgatgagttctatcgtgcaccaacaggtgtttccagctgtgactagtttggggctaaatgagcaggagctcctcttcctcacacagtctgcttccggaccccattccagcctctcctcttggaatggcgtgcccgatgttggtatggtctccgacatcctgttttggattctcaaggaacacggaaggtctaagagccgtgcaagtgatctaacccgtattcattttcataccctcgtgtaccacatcctcgcgaccgtggatggccattgggctaaccaactcgccgccgtggccgcgggcgcgcgcgttgcaggcacccaggcgtgtgccacagagaccatagacacaagtagagtctccctgagggccccgcaagaattcatgacatcccattcagaagctggtagcaggattgtgctgaacccaaacaagcccgtggtggagtggcacagagaaggtatcagcttccacttcacgccagtcctcgtctgtaaagatcctatccgaacagttggacttggggacgcaatctccgcagaggggctgttctactcagaagtccacccccactattag

SEQ ID NO: 293685 - DNA, 1251 bp, Artificial Sequence
  derived and/or modified sequence
atggcactctggcgcggatccgcctacgcaggctttctcgccctgggcctgtccccaggcaatgggaaggatcattccatcctgcacagtagaaacgacctcgaagaggcgttcatccattttatggggaagggagcggcagccgaacgattttttagtgacaaagaaacctttcatgacattgctcaggtagccagcgaattcccaggagcccagcactacgtgggagggaatgcagcattaattggacagaaatttgccgcaaactccgatctcaaagtgctcctctgcgggccagtaggtcccaagctccacgagctgttggatgataacgtcttcgtcccccctgaaagcctgcaggaggtcgatgaattccatttaatcctggaatatcaggctggcgaagaatggggccaactgaaggcaccccatgctaaccgctttattttcagtcatgaccttagtaacggagctatgaacatgctggaggtgtttgtctctagtctggaggaattccagcccgatctcgttgtcctctctggcctacatatgatggaaggacaatccaaggagttgcagaggaaacggttgctggaggtggtcaccagtatctcggacatccccacggggatccccgtgcatcttgaacttgcgtctatgacaaaccgggaattgatgtcttccattgttcaccagcaagtttttcctgcggttacctctctggggctgaacgagcaggaactgttattcttgacccagagcgctagcgggcctcacagctccctgagctcatggaacggagtgcctgatgttggcatggtgagtgacatactgttttggattctgaaagagcatggccgtagtaaatctagggcgtccgatctcacgcgtatacacttccacactctcgtttatcacatcctcgcgaccgtcgatggccactgggccaatcagctcgcagctgttgcggcaggagcccgtgtcgcgggtactcaggcctgcgccactgaaactatcgacacttcccgggtgtcattgagggcgcctcaggagtttatgaccagtcacagtgaggccggttcacgaattgtactgaacccgaacaagccagtggttgaatggcatcgcgagggcattagtttccacttcactcctgtactggtgtgtaaagatcccataaggaccgtcggcctgggtgatgcaatttctgcagagggactgttctattccgaggttcatccgcattactag

SEQ ID NO: 293686 - DNA, 1251 bp, Artificial Sequence
  derived and/or modified sequence
atggccctgtggagaggcagcgcctacgccggcttcctggccctgggcctgagccccggcaacggcaaggaccacagcatcctgcacagcagaaacgacctggaggaggccttcatccacttcatgggcaagggcgccgccgccgagagattcttcagcgacaaggagaccttccacgacatcgcccaggtggccagcgagttccccggcgcccagcactacgtgggcggcaacgccgccctgatcggccagaagttcgccgccaacagcgacctgaaggtgctgctgtgcggccccgtgggccccaagctgcacgagctgctggacgacaacgtgttcgtgccccccgagagcctgcaggaggtggacgagttccacctgatcctggagtaccaggccggcgaggagtggggccagctgaaggccccccacgccaacagattcatcttcagccacgacctgagcaacggcgccatgaacatgctggaggtgttcgtgagcagcctggaggagttccagcccgacctggtggtgctgagcggcctgcacatgatggagggccagagcaaggagctgcagagaaagagactgctggaggtggtgaccagcatcagcgacatccccaccggcatccccgtgcacctggagctggccagcatgaccaacagagagctgatgagcagcatcgtgcaccagcaggtgttccccgccgtgaccagcctgggcctgaacgagcaggagctgctgttcctgacccagagcgccagcggcccccacagcagcctgagcagctggaacggcgtgcccgacgtgggcatggtgagcgacatcctgttctggatcctgaaggagcacggcagaagcaagagcagagccagcgacctgaccagaatccacttccacaccctggtgtaccacatcctggccaccgtggacggccactgggccaaccagctggccgccgtggccgccggcgccagagtggccggcacccaggcctgcgccaccgagaccatcgacaccagcagagtgagcctgagagccccccaggagttcatgaccagccacagcgaggccggcagcagaatcgtgctgaaccccaacaagcccgtggtggagtggcacagagagggcatcagcttccacttcacccccgtgctggtgtgcaaggaccccatcagaaccgtgggcctgggcgacgccatcagcgccgagggcctgttctacagcgaggtgcacccccactactag

SEQ ID NO: 293687 - protein, 346 aa, Artificial Sequence
  derived and/or modified sequence
MGKGAAAERFFSDKETFHDIAQVASEFPGAQHYVGGNAALIGQKFAANSDLKVLLCGPVGPKLHELLDDNVFVPPESLQEVDEFHLILEYQAGEEWGQLKAPHANRFIFSHDLSNGAMNMLEVFVSSLEEFQPDLVVLSGLHMMEGQSKELQRKRLLEVVTSISDIPTGIPVHLELASMTNRELMSSIVHQQVFPAVTSLGLNEQELLFLTQSASGPHSSLSSWNGVPDVGMVSDILFWILKEHGRSKSRASDLTRIHFHTLVYHILATVDGHWANQLAAVASSCGWDTGLRHRNHRHQPSVSEGTPRVHDFPFGGRLQDCIKPKQASSRMAQRGNILPLHTSIGV

SEQ ID NO: 293688 - DNA, 1041 bp, Artificial Sequence
  derived and/or modified sequence
atgggtaagggagcggctgctgagcgtttcttttcagacaaagagacctttcacgatattgcacaagtggctagtgaatttcccggtgcccagcactatgtgggagggaatgcagcgctgataggccagaagttcgccgcgaacagcgacctgaaggtcctgctgtgcgggcccgtgggacctaaattgcacgaactactggacgacaacgtatttgtgccccctgagtccctccaggaggttgatgagtttcatctgatcctggaatatcaagctggagaagaatggggacagctcaaggcgccccacgcaaatcggttcatcttcagccacgacttaagcaatggagccatgaatatgctcgaggtttttgtgtcttccctggaagagtttcaaccagacctcgtggttctctccggactgcacatgatggaaggccagagtaaagaactgcagcgaaagaggttgttggaggtggtgaccagcatcagcgacatccctaccggtatccctgtacacctggagttagcttctatgacaaatcgagaattgatgtcttcaattgttcatcaacaagtcttccctgcagttactagcttggggttgaacgaacaagagcttctcttcctgacccaatctgccagcgggccacattcctccttgtccagctggaacggcgtgcccgatgtgggtatggtttcagatatcctattttggattctcaaagaacacgggaggagcaagagcagagcaagtgatctgactagaattcactttcataccttagtctaccatatcctggccactgtggacgggcactgggccaatcagctcgcagctgtggcttcttcctgcgggtgggacaccggtctacggcaccggaaccaccgacaccagccctctgtgtcagagggcacaccgagggttcacgacttcccatttggcggccgtctccaggattgtatcaagcctaagcaggcgagcagtcgcatggcacaacgtgggaatatattacccttgcatacctccattggagtctag

SEQ ID NO: 293689 - DNA, 1041 bp, Artificial Sequence
  derived and/or modified sequence
atgggcaaaggagctgctgctgagcgcttcttcagtgacaaggagaccttccatgacatcgcccaggtggccagcgagttccctggggcccagcactacgtgggcggcaatgctgccctgattggccagaagtttgctgccaacagcgacctgaaggtgctgctgtgtggccctgtgggccccaagctgcacgagctgctggatgacaacgtgtttgtgcccccagagagcctgcaggaggtggatgagttccacctgatcctggagtaccaggccggggaggagtggggccagctgaaggcccctcatgccaaccgcttcatcttcagccatgacctgagcaatggagccatgaacatgctggaggtgtttgtgagcagcctggaggagttccagcctgacctggtggtgctgagcggcctgcacatgatggagggccagagcaaggagctgcagaggaagaggctgctggaggtggtgaccagcatcagtgacatccccaccggcatccctgtgcacctggagctggcctccatgaccaaccgggagctgatgagcagcatcgtgcaccagcaggtgtttcctgctgtgaccagcctgggcctgaatgagcaggagctgctcttcctgacccagagcgccagcggcccccacagcagcctgagctcctggaatggagtgcctgatgtgggcatggtgtctgacatcctcttctggatcctgaaggagcacggccgcagcaagagccgggccagtgacctgacccgcatccacttccacaccctggtgtaccacatcctggccaccgtggatggccactgggccaaccagctggccgctgtggccagcagctgtggctgggacaccggcctgcggcacaggaaccaccgccaccagcccagcgtgtctgagggcaccccccgggtgcatgacttcccctttggaggccgcctgcaggactgcatcaagcccaagcaggccagcagcaggatggcccagaggggcaacatcctgcccctgcacaccagcattggagtgtag

SEQ ID NO: 293690 - DNA, 1041 bp, Artificial Sequence
  derived and/or modified sequence
atgggcaagggcgccgccgccgagcggttcttcagcgacaaggagacttttcatgatatcgcccaggtggcttctgagttcccgggcgcccagcattacgtcggcggtaatgctgcacttattggacagaagttcgctgcaaactcagatttgaaggtgttgctgtgtggaccagtaggcccaaagctccatgaacttctagacgacaatgtgttcgtgcccccagagagtcttcaagaggtggatgaattccacctcattctggagtatcaggctggagaggagtggggacagttgaaggctccacacgcaaatcgttttattttttcccatgacctgtccaacggtgccatgaacatgctggaagtgttcgtgtctagtctcgaagaatttcagccagatcttgtggttctgtctggcctacacatgatggaagggcagtctaaggaactgcaacgtaaacgcttactcgaggtggtgacctctatcagtgacatccccaccggcataccagttcatttggagctggcttccatgacgaatagggagctgatgtcctcgatagttcaccagcaggtctttccggcagtcacctccctgggcctaaatgagcaggaattactctttctgacccaaagtgcatccggtcctcacagctccctttcttcttggaatggggttccagacgtcgggatggtgtcagacattctcttttggatcctcaaagaacacggccgtagcaagagccgcgcgagcgatctgactcgcattcacttccatacgcttgtataccatatcttggccacagtcgacggacactgggcaaatcagctcgcggccgtggcctcttcttgtggctgggataccgggctgagacatagaaatcaccggcaccagcccagtgtcagtgaaggtactcctagagttcacgacttcccatttggggggagactacaagactgtatcaaaccaaaacaggccagctcaagaatggcccaaaggggcaacatcttgccgttacacacaagcatcggagtctag

SEQ ID NO: 293691 - DNA, 1041 bp, Artificial Sequence
  derived and/or modified sequence
atgggcaagggagccgctgctgaacgcttcttttctgacaaggaaacctttcacgatatcgctcaggtggcttcagagttccccggtgctcagcactatgttgggggtaacgccgcactgatcggtcaaaagttcgcggcaaactccgatctgaaggtgcttttatgcggccctgtgggacctaagcttcacgaactactggacgataacgtatttgtccctccagaatccttgcaggaggtcgacgagttccatctcatccttgaataccaggccggtgaggagtgggggcagcttaaagccccacatgctaaccgatttatcttctcacacgatctcagcaatggcgctatgaacatgctggaggtcttcgtgtcttccctggaggagttccagcctgacctggtggtgttatcaggcttgcacatgatggagggccagagcaaggaactgcaacgcaaaaggctgctggaagtggttacatcaatctcagacatccccacaggaatccctgtgcacttggagctagccagtatgacaaacagagagctgatgagttccatcgtccatcagcaggtcttccctgcagttacaagcctgggacttaacgagcaggaactcctattccttacacaatcagcaagtggacctcattcatccttgagttcttggaatggtgtaccagatgttggaatggtgagcgacatccttttttggattctgaaggaacatgggagatccaagtctcgggcttccgatctgaccagaattcacttccacactctggtttatcacatactggcaaccgtggacggccactgggccaatcagctcgcagcagtggcctcctcatgcggttgggatacagggctgagacatcggaatcatagacatcagccctccgtatctgaaggtaccccaagggtccacgatttccctttcggaggtaggcttcaagactgcattaaacccaaacaagccagctctaggatggcgcaacgaggaaacattctaccgcttcacacctctattggggtgtag

SEQ ID NO: 293692 - DNA, 1041 bp, Artificial Sequence
  derived and/or modified sequence
atgggcaagggcgccgccgccgagagattcttcagcgacaaggagaccttccacgacatcgcccaggtggccagcgagttccccggcgcccagcactacgtgggcggcaacgccgccctgatcggccagaagttcgccgccaacagcgacctgaaggtgctgctgtgcggccccgtgggccccaagctgcacgagctgctggacgacaacgtgttcgtgccccccgagagcctgcaggaggtggacgagttccacctgatcctggagtaccaggccggcgaggagtggggccagctgaaggccccccacgccaacagattcatcttcagccacgacctgagcaacggcgccatgaacatgctggaggtgttcgtgagcagcctggaggagttccagcccgacctggtggtgctgagcggcctgcacatgatggagggccagagcaaggagctgcagagaaagagactgctggaggtggtgaccagcatcagcgacatccccaccggcatccccgtgcacctggagctggccagcatgaccaacagagagctgatgagcagcatcgtgcaccagcaggtgttccccgccgtgaccagcctgggcctgaacgagcaggagctgctgttcctgacccagagcgccagcggcccccacagcagcctgagcagctggaacggcgtgcccgacgtgggcatggtgagcgacatcctgttctggatcctgaaggagcacggcagaagcaagagcagagccagcgacctgaccagaatccacttccacaccctggtgtaccacatcctggccaccgtggacggccactgggccaaccagctggccgccgtggccagcagctgcggctgggacaccggcctgagacacagaaaccacagacaccagcccagcgtgagcgagggcacccccagagtgcacgacttccccttcggcggcagactgcaggactgcatcaagcccaagcaggccagcagcagaatggcccagagaggcaacatcctgcccctgcacaccagcatcggcgtgtag

SEQ ID NO: 293693 - protein, 121 aa, Artificial Sequence
  derived and/or modified sequence
MATLGHTFPFYAGPKPTFPMDTTLASIIMIFLTALATFIVILPGIRGKTRLFWLLRVVTSLFIGAAILAVNFSSEWSVGQVSTNTSYKAFSSEWISADIGLQVGLGGVNITLTGTPVQQLN

SEQ ID NO: 293694 - DNA, 562 bp, Artificial Sequence
  derived and/or modified sequence
gtgcttccagcggacggcagcgcgcgagaccaggccaggcgtcaaagcaagtcacccatccgacctaaacccctctaagaccccggagtcacgtctccctccggggatcctcgtgaggtcttgggggtcccaccgccctgcgagccgcgcccgcgccccgccagacccggaactgcgtcgctagaacgtcgggacctggttccctctttaatcacacccccgggggcgcttcgtgtgaggttccacgggggaaggcgagaggcgcaggctgccacacacgcactgtttggaagaggggaagcattgccccccctgcaccacctcaccaagatggctactttgggacacacattccccttctatgctggccccaagccaaccttcccgatggacaccactttggccagcatcatcatgatctttctgactgcactggccacgttcatcgtcatcctgcctggcattcggggaaagacgaggctgttctggctgcttcgggtggtgaccagcttattcatcggggctgcaatcctggggacccccgtgcagcagctgaatgaga

SEQ ID NO: 293695 - DNA, 578 bp, Artificial Sequence
  derived and/or modified sequence
atggagtctggcgcctggggaggcgcggaggtgcttccagcggacggcagcgcgcgagaccaggccaggcgtcaaagcaagtcacccatccgacctaaacccctctaagaccccggagtcacgtctccctccggggatcctcgtgaggtcttgggggtcccaccgccctgcgagccgcgcccgcgccccgccagacccggaactgcgtcgctagaacgtcgggacctggttccctctttaatcacacccccgggggcgcttcgtgtgaggttccacgggggaaggcgagaggcgcaggctgccacacacgcactgtttggaagaggggaagcattgccccccctgcaccacctcaccaagatggctactttgggacacacattccccttctatgctggccccaagccaaccttcccgatggacaccactttggccagcatcatcatgatctttctgactgcactggccacgttcatcgtcatcctgcctggcattcggggaaagacgaggctgttctggctgcttcgggtggtgaccagcttattcatcggggctgcaatcctggctgtgaatttcag

SEQ ID NO: 293696 - DNA, 532 bp, Artificial Sequence
  derived and/or modified sequence
agcgcgcgaggtgagacggcgagggctcccggggcgcaggtagagatgttccgtcggtgccgaaggcccggctagtgcggttgtgtggacggcgaaaaaaaccaggccaggcgtcaaagcaagtcacccatccgacctaaacccctctaagaccccggagtcacgtctccctccggggatcctcgtgaggtcttgggggtcccaccgccctgcgagccgcgcccgcgccccgccagacccggaactgcgtcgctaggccgggagagggaggcggcgccgcagagcctcgggtgcagtctgagaagtttgggagtgacttgaagagtgactggaagcaccccagacccgaacgtcgggacctggttccctctttaatcacacccccgggggcgcttcgtgtgaggttccacgggggaaggcgagaggcgcaggctgccacacacgcactgtttggaagaggggaagcattgccccccctgcaccacctcaccaagatggctactttgggacacacattccccttctatgctgg

SEQ ID NO: 293697 - DNA, 2684 bp, Artificial Sequence
  derived and/or modified sequence
gcttccagcggacggcagcgcgcgagcattgccccccctgcaccacctcaccaagatggctactttgggacacacattccccttctatgctggccccaagccaaccttcccgatggacaccactttggccagcatcatcatgatctttctgactgcactggccacgttcatcgtcatcctgcctggcattcggggaaagacgaggctgttctggctgcttcgggtggtgaccagcttattcatcggggctgcaatcctggggacccccgtgcagcagctgaatgagaccatcaattacaacgaggagttcacctggcgcctgggtgagaactatgctgaggagtatgcaaaggctctggagaaggggctgccagaccctgtgttgtacctagctgagaagttcactccaagaagcccatgtggcctataccgccagtaccgcctggcgggacactacacctcagccatgctatgggtggcattcctctgctggctgctggccaatgtgatgctctccatgcctgtgctggtatatggtggctacatgctattggccacgggcatcttccagctgttggctctgctcttcttctccatggccacatcactcacctcaccctgtcccctgcacctgggcgcttctgtgctgcatactcaccatgggcctgccttctggatcacattgaccacaggactgctgtgtgtgctgctgggcctggctatggcggtggcccacaggatgcagcctcacaggctgaaggctttcttcaaccagagtgtggatgaagaccccatgctggagtggagtcctgaggaaggtggactcctgagcccccgctaccggtccatggctgacagtcccaagtcccaggacattcccctgtcagaggcttcctccaccaaggcatactgtaaggaggcacaccccaaagatcctgattgtgctttataacattcctccccgtggaggccacctggacttccagtctggctccaaacctcattggcgccccataaaaccagcagaactgccctcagggtggctgttaccagacacccagcaccaatctacagacggagtagaaaaaggaggctctatatactgatgttaaaaaacaaaacaaaacaaaaagccctaagggactgaagagatgctgggcctgtccataaagcctgttgccatgataaggccaagcaggggctagcttatctgcacagcaacccagcctttccgtgctgccttgcctcttcaagatgctattcactgaaacctaacttcacccccataacaccagcagggtgggggttacatatgattctcctatggtttcctctcatccctcggcacctcttgttttcctttttcctgggttccttttgttcttcctttacttctccagcttgtgtggccttttggtacaatgaaagacagcactggaaaggaggggaaaccaaacttctcatcctaggtctaacattaaccaactatgccacattctctttgagcttcagttcccaaatttgctacataagattgcaagacttgccaagaatcttgggatttatctttctatgccttgctgacacctaccttggccctcaaacaccacctcacaagaagccaggtgggaagttagggaatcaactccaaaacgctattccttcccaccccactcagctgggctagctgagtggcatccaggacgggggagtgggtgacctgcctcatcactgccacctaacgtccccctggggtggttcagaaagatgctagctctggtagggtccctccggcctcactagagggcgcccctattactctggagtcgacgcagagaatcaggtttcacagcactgcggagagtgtactaggctgtctccagcccagcgaagctcatgaggacgtgcgaccccggcgcggagaagccatgaaaattaatgggaaaaacagtttttaaaaaacaaaagaaaaaaaggtttatttacagatcgccccaggagactttccctggtgcctgcggatgtccgaggcctcgcgccagcagcgctcagtgcccttcctggagctctcctggcccaggcctggcgggcactgcttcccggcctgcgatgtcccaaggcggggaaggagtccagattgggtccccctcacaggttagtggtgatacattttaagtctgggagagcggcctgcttgtgcagtgggtcgccgaggataagaggtgagccccctctctcctggctgcagtccttggcgctttggtccagaagggtgcgaagagcgctgggccgaacatactggagactcaccacggcccctccgaggaagaggcacaggacgcctgtggcggtggggatcgaaagaaaggagggcatgtggagtcagggctatgttgcccaggctggtctcgaactctggcctcaaacgaccttcctgcctcgacctcccaaagtgctgggattacaggcgtgatgcccgggccttcttccatcttttggagcctaccccttgtgttacctcccgccacacacctctaatctgaattacatgaaacacggcaagacaccaaacccttctgagccccccacttttcatctgtaaaatggtcataacagtgcctgtttctgcgaactattgagaggggcaaatagggtaatagatgtgaattcattctgtaaactgg

SEQ ID NO: 293698 - DNA, 572 bp, Artificial Sequence
  derived and/or modified sequence
gcttccagcggacggcagcgcgcgaggtgagacggcgagggctcccggggcgcagaccaggccaggcgtcaaagcaagtcacccatccgacctaaacccctctaagaccccggagtcacgtctccctccggggatcctcgtgaggtcttgggggtcccaccgccctgcgagccgcgcccgcgccccgccagacccggaactgcgtcgctagaacgtcgggacctggttccctctttaatcacacccccgggggcgcttcgtgtgaggttccacgggggaaggcgagaggcgcaggctgccacacacgcactgtttggaagaggggaagcattgccccccctgcaccacctcaccaagatggctactttgggacacacattccccttctatgctggccccaagccaaccttcccgatggacaccactttggccagcatcatcatgatctttctgactgcactggccacgttcatcgtcatcctgcctggcattcggggaaagacgaggctgttctggctgcttcgggtggtgaccagcttattcatcggggctgcaatcctggggacccccgt

SEQ ID NO: 293699 - DNA, 641 bp, Artificial Sequence
  derived and/or modified sequence
agccacggggcggggcgcagtggggcgggatggagtctggcgcctggggaggcgcggaggtgcttccagcggacggcagcgcgcgagaccaggccaggcgtcaaagcaagtcacccatccgacctaaacccctctaagaccccggagtcacgtctccctccggggatcctcgtgaggtcttgggggtcccaccgccctgcgagccgcgcccgcgccccgccagacccggaactgcgtcgctagcccttctctgtaccaggccgggagagggaggcggcgccgcagagcctcgggtgcagtctgagaagtttgggagtgacttgaagagtgactggaagcaccccagacccggtttgtccggtcacagccgggtccttacgtgagttaggagaggagtgggggtcggacgggagccccactgagagtaagggcgcgcgtttgttcacagaacgtcgggacctggttccctctttaatcacacccccgggggcgcttcgtgtgaggttccacgggggaaggcgagaggcgcaggctgccacacacgcactgtttggaagaggggaagcattgccccccctgcaccacctcaccaagatggctactttgggacacacattccccttctatgctggccccaagcc

SEQ ID NO: 293700 - DNA, 441 bp, Artificial Sequence
  derived and/or modified sequence
gcggacggcagcgcgcgaggtgagacggcgagggctcccggggcgcagcattgccccccctgcaccacctcaccaagatggctactttgggacacacattccccttctatgctggccccaagccaaccttcccgatggacaccactttggccagcatcatcatgatctttctgactgcactggccacgttcatcgtcatcctgcctggcattcggggaaagacgaggctgttctggctgcttcgggtggtgaccagcttattcatcggggctgcaatcctggctgtgaatttcagttctgagtggtctgtgggccaggtcagcaccaacacatcatacaaggccttcagttctgagtggatcagcgctgatattgggctgcaggtcgggctgggtggagtcaacatcacactcacagggacccccgtgcagcagctgaatg

SEQ ID NO: 293701 - DNA, 1044 bp, Artificial Sequence
  derived and/or modified sequence
accaagatggctactttgggacacacattccccttctatgctggccccaagccaaccttcccgatggacaccactttggccagcatcatcatgatctttctgactgcactggccacgttcatcgtcatcctgcctggcattcggggaaagacgaggctgttctggctgcttcgggtggtgaccagcttattcatcggggctgcaatcctggctgtgaatttcagttctgagtggtctgtgggccaggtcagcaccaacacatcatacaaggccttcagttctgagtggatcagcgctgatattgggctgcaggtcgggctgggtggagtcaacatcacactcacagggacccccgtgcagcagctgaatgagaccatcaattacaacgaggagttcacctggcgcctgggtgagaactatgctgaggagtatgcaaaggctctggagaaggggctgccagaccctgtgttgtacctagctgagaagttcactccaagaagcccatgtggcctataccgccagtaccgcctggcgggacactacacctcagccatgctatgggtggcattcctctgctggctgctggccaatgtgatgctctccatgcctgtgctggtatatggtggctacatgctattggccacgggcatcttccagctgttggctctgctcttcttctccatggccacatcactcacctcaccctgtcccctgcacctgggcgcttctgtgctgcatactcaccatgggcctgccttctggatcacattgaccacaggactgctgtgtgtgctgctgggcctggctatggcggtggcccacaggatgcagcctcacaggctgaaggctttcttcaaccagagtgtggatgaagaccccatgctggagtggagtcctgaggaaggtggactcctgagcccccgctaccggtccatggctgacagtcccaagtcccaggacattcccctgtcagaggcttcctccaccaaggcatactgtaaggaggcacaccccaaagatcctgattgtgctttataacattcc

SEQ ID NO: 293702 - protein, 77 aa, Artificial Sequence
  derived and/or modified sequence
MATLGHTFPFYAGPKPTFPMDTTLASIIMIFLTALATFIVILPGIRGKTRLFWLLRVVTSLFIGAAILGTPVQQLNE

SEQ ID NO: 293703 - protein, 298 aa, Artificial Sequence
  derived and/or modified sequence
MATLGHTFPFYAGPKPTFPMDTTLASIIMIFLTALATFIVILPGIRGKTRLFWLLRVVTSLFIGAAILGTPVQQLNETINYNEEFTWRLGENYAEEYAKALEKGLPDPVLYLAEKFTPRSPCGLYRQYRLAGHYTSAMLWVAFLCWLLANVMLSMPVLVYGGYMLLATGIFQLLALLFFSMATSLTSPCPLHLGASVLHTHHGPAFWITLTTGLLCVLLGLAMAVAHRMQPHRLKAFFNQSVDEDPMLEWSPEEGGLLSPRYRSMADSPKSQDIPLSEASSTKAYCKEAHPKDPDCAL

SEQ ID NO: 293704 - protein, 72 aa, Artificial Sequence
  derived and/or modified sequence
MATLGHTFPFYAGPKPTFPMDTTLASIIMIFLTALATFIVILPGIRGKTRLFWLLRVVTSLFIGAAILGTPV

SEQ ID NO: 293705 - DNA, 234 bp, Artificial Sequence
  derived and/or modified sequence
atggcaactctggggcacacgtttccattctacgccggaccgaagcctacatttcccatggacactaccctggcctccataattatgatttttcttaccgctctggccacatttatcgtcattctgccgggcattcgcggcaagaccaggctgttctggctcctccgtgtagtcaccagcctgtttattggcgccgcgatccttggcacacctgtgcagcaattgaatgagtag

SEQ ID NO: 293706 - DNA, 897 bp, Artificial Sequence
  derived and/or modified sequence
atggcaacccttgggcacacattcccattctacgctggcccaaagccaacttttccaatggacacgacattagctagtatcattatgatattcctgacggcactcgccacttttattgtcatactgcccggtattagaggtaagacgcgcttattttggctgttgcgcgtcgtgacttcgctgttcattggggcagccatcttaggcactcccgttcagcagctgaacgagaccatcaattataacgaagaattcacctggcgcctgggtgagaattacgcggaggaatacgcaaaagcgctggaaaagggcttaccagatccagtgttataccttgctgaaaaattcacacccagatctccctgcgggttataccgtcagtataggttggccggacattatacaagcgccatgctgtgggtggccttcctgtgttggctccttgcaaatgttatgttgagtatgccagtgttggtctatgggggatacatgcttctggcgaccgggattttccaactgctggctctgctctttttctctatggctaccagtctcacctcgccatgcccgctgcacctgggagctagtgtgttgcacacacatcatggacccgcattttggattacattgaccaccggcctcctgtgcgtgttactgggcctagccatggcagtcgcccacagaatgcagccgcatcgtctgaaggcattcttcaaccaatcagtcgacgaagaccccatgcttgaatggtcccctgaggaaggagggctgctttccccacgataccgatcaatggccgacagcccaaagagccaagatataccactgtcagaagcatcttctaccaaggcctactgtaaagaggcacacccaaaggatccagattgtgccttgtag

SEQ ID NO: 293707 - DNA, 897 bp, Artificial Sequence
  derived and/or modified sequence
atggcgaccttgggacatacctttcccttttacgcgggcccgaagcccacgtttcccatggacacaaccctcgcttctattattatgatatttctcactgcactagcaactttcattgtaatcttgccaggcatcagaggaaagacgcgactgttctggcttctgcgcgtcgtcacttctttgtttatcggggccgctatacttgggacacctgtccagcagctgaacgagaccatcaattataatgaggagtttacatggaggctgggagagaattacgccgaagaatatgcgaaggctctggagaaagggttacccgatcccgtgctttatttggccgagaagtttaccccacgatctccatgcggactgtatagacagtaccgactggctggccactataccagtgctatgctgtgggttgcctttttatgctggctgctcgccaatgtgatgctcagtatgccggttcttgtgtacggagggtacatgctgctggctacagggattttccagctcctggccctcctcttcttctcaatggcaaccagcttaacttccccctgtcccctgcatctaggcgcaagcgtgctgcacacccaccacgggcctgccttctggatcactttgacgaccggactgctgtgcgtactgttgggtctggccatggctgtggcccataggatgcagccccaccgcctaaaggctttttttaaccagagcgtggatgaagatcctatgctggaatggtcccctgaagaaggaggactgctgtctccccgctatagatcaatggctgactcccccaagtcccaggacatccctcttagcgaagcctcatctacaaaggcctactgcaaagaggctcatccgaaagaccctgattgcgctctctag

SEQ ID NO: 293708 - DNA, 219 bp, Artificial Sequence
  derived and/or modified sequence
atggccaccctcgggcacacctttcccttttatgccgggcccaaacccacatttccaatggacacgactctggcctctatcattatgatattcctcactgcactcgctacatttatcgttattctgcccggaattagaggaaaaaccaggctgttttggcttctaagagtggtgacaagccttttcataggcgccgcaattctgggcacccccgtatag

SEQ ID NO: 293709 - DNA, 234 bp, Artificial Sequence
  derived and/or modified sequence
atggccaccctgggccacaccttccccttctacgccggccccaagcccaccttccccatggacaccaccctggccagcatcatcatgatcttcctgacagccctggccaccttcatcgtcatcctgcccggcatccggggcaagaccaggctcttctggctgctgcgggtggtgaccagcctcttcatcggggccgccatcctgggcacccctgtgcagcagctgaatgaatag

SEQ ID NO: 293710 - DNA, 897 bp, Artificial Sequence
  derived and/or modified sequence
atggccaccctgggccacaccttccccttctacgccggccccaagcccaccttccccatggacaccaccctggccagcatcatcatgatcttcctgacagccctggccaccttcatcgtcatcctgcccggcatccggggcaagaccaggctcttctggctgctgcgggtggtgaccagcctcttcatcggggccgccatcctgggcacccctgtgcagcagctgaatgagaccatcaactacaatgaggagttcacctggaggctgggagaaaattatgcagaggagtatgccaaggccctggagaagggcctgcctgaccctgtgctgtacctggccgagaagttcacccccaggagcccctgtggcctgtaccggcagtaccgcctggccggccactacaccagcgccatgctgtgggtggccttcctgtgctggctgctggccaacgtgatgctgtccatgcctgtgctggtgtatggaggctacatgctgctggccaccggcatcttccagctgctggccctgctcttcttctccatggccaccagcctgaccagcccctgccccctgcacctgggcgcctctgtgctgcacacccaccacggccctgccttctggatcaccctgaccaccggcctgctgtgtgtgctgctgggcctggccatggctgtggcccacaggatgcagccccaccggctgaaggccttcttcaaccagagcgtggatgaggaccccatgctggagtggagccctgaggagggcggcctgctgagcccccgctaccgctccatggctgacagccccaagagccaggacatccccctgtctgaggccagcagcaccaaggcctactgcaaggaggcccaccccaaggaccctgactgtgccctgtag

SEQ ID NO: 293711 - DNA, 219 bp, Artificial Sequence
  derived and/or modified sequence
atggccaccctgggccacaccttccccttctacgccggccccaagcccaccttccccatggacaccaccctggccagcatcatcatgatcttcctgacagccctggccaccttcatcgtcatcctgcccggcatccggggcaagaccaggctcttctggctgctgcgggtggtgaccagcctcttcatcggggccgccatcctgggcacccctgtgtag

SEQ ID NO: 293712 - DNA, 234 bp, Artificial Sequence
  derived and/or modified sequence
atggccaccctgggccacaccttccccttctacgccggccccaagccaacctttcccatggatacgaccctggcatctatcatcatgatcttcctgacagctttggcaacgttcatcgtaattttgccaggtatccggggaaaaacacggctgttctggttgctaagagttgtgactagcctattcataggtgctgctatcctgggcacccctgtgcagcagctgaacgagtag

SEQ ID NO: 293713 - DNA, 897 bp, Artificial Sequence
  derived and/or modified sequence
atggccaccctgggccacaccttccccttctacgccggccccaagccaacgtttcccatggataccaccctcgccagcatcatcatgatttttttgacggccctggcaactttcattgtgatcttgccggggatcaggggaaaaactcgcctgttctggcttttgagggtcgtaacctccttattcattggtgctgccatactgggtactcctgtccagcagctcaacgaaacgatcaattacaacgaggagtttacctggagattgggtgaaaattatgcagaggaatacgccaaagccctggagaaagggctgcccgatccagtcctatatctggctgagaagttcactccccgatcaccttgcggtctgtatcggcaataccgtctcgccggtcactacacttccgccatgctatgggtagcgttcctttgctggttactggcgaatgtgatgttgtccatgcctgtgctggtgtacggtgggtacatgctgctggccaccgggatattccagctgttggctttgctgttcttttccatggccacctctctgacttctccatgccccctgcacctgggcgcatcagtgctgcacactcaccatgggcctgccttctggattaccctaaccactggcctactttgcgtcctactcggactggccatggctgtcgctcatcggatgcagcctcaccggctaaaagccttctttaaccagagcgtggatgaagacccaatgctcgaatggagtccggaggaaggcgggctcctgtctccccgataccggtccatggccgatagccccaaatctcaggacatcccgctgagcgaggcttcaagcaccaaagcatactgcaaagaggcacacccgaaagacccagattgtgcactgtag

SEQ ID NO: 293714 - DNA, 897 bp, Artificial Sequence
  derived and/or modified sequence
atggccaccctgggccacaccttccccttctacgccggccccaagccaacattccccatggacactacattggcaagtataataatgatctttcttacagccctggccactttcattgtgatccttcccggtattcgaggtaaaacaaggctgttttggctgctgcgtgtggtgacgtcgctgttcattggagctgctatattaggcacacctgtccagcagttaaacgaaacaatcaattataacgaggagttcacttggaggctgggagaaaattatgcagaagaatatgctaaggccttggaaaagggtctacctgacccagtcctctacctagccgagaagtttaccccaagatctccctgtggtctttacagacagtataggctggcaggccattatacgtccgcgatgttatgggtagctttcttatgttggcttttagcgaacgtgatgctgagcatgccagttcttgtgtacggtggatatatgctcttggcaactggtatctttcagctgctggctttgctttttttttcgatggctacctccctgacctcgccctgccctttgcacctgggtgcttcagtgctccatacacaccacggccctgcattctggatcacgttgactactggcctgctctgcgttctactcggtctcgctatggcggtggcccacaggatgcagccccatcggttgaaagcattctttaatcagtctgttgacgaagacccaatgctggaatggtcccctgaggaaggaggactactgtctccacggtatagatcaatggccgatagcccgaagagccaggatatccccttaagtgaagcatctagtactaaagcctactgcaaagaggcacatcccaaagaccccgactgcgcactctag

SEQ ID NO: 293715 - DNA, 219 bp, Artificial Sequence
  derived and/or modified sequence
atggccaccctgggccacaccttccccttctacgccggccccaagccaacctttcccatggatactaccctggcgagtatcattatgatctttctcacagctctggcaacctttattgtaattcttcctggaatccgtgggaaaacaagacttttctggctgttacgcgtcgtgacttccctgtttatcggcgctgcaatccttgggacccccgtgtag

SEQ ID NO: 293716 - DNA, 234 bp, Artificial Sequence
  derived and/or modified sequence
atggctactctgggacatacctttcccttctatgctggacctaaacctacgtttccgatggatacgaccctggctagtattattatgatcttcttgacggcgttagcaacattcatcgtcatcctgccgggaattaggggcaagacccggctcttctggctgctccgggttgttaccagcctatttataggggcagctattcttggaactccggttcagcagttgaacgagtag

SEQ ID NO: 293717 - DNA, 897 bp, Artificial Sequence
  derived and/or modified sequence
atggccactctggggcacacctttccattctacgcagggccaaagcctaccttccccatggacactaccttggcctccatcataatgattttcttaacagctctggcaacatttatcgtgatccttccgggaatcagaggtaaaacacggctgttttggctgctccgggtggtcacttccctcttcattggggcagccatcttgggcacccctgtccaacagctgaatgagaccattaactacaacgaggagtttacttggcgccttggagagaattacgcagaggagtacgccaaagccctggagaagggtctgcccgaccctgtcctgtacttagctgaaaagtttaccccaagaagcccctgtggtttatataggcagtatagactcgccggacactacacttcagccatgctctgggtggcgtttctgtgctggctcttggccaatgtgatgctgtcaatgccggtcctggtgtatggtggctatatgctgcttgccactggaatttttcaactcctggctctactgttcttttctatggcgacttctctgaccagtccatgtcctttgcacttgggagcgtccgtgctccacacacaccacggacctgcattctggatcacactgaccaccggcctgttatgcgtgctcctgggtttagctatggcagtggcccatagaatgcaaccgcatcggctgaaggccttcttcaatcagagtgtcgacgaggacccaatgcttgagtggtctccagaggaggggggtctcctgtctcccagatataggtctatggcggattctccaaagagccaggacattcccctgtctgaggcatcttccaccaaagcatattgcaaggaagctcaccccaaggatcctgattgcgcactgtag

SEQ ID NO: 293718 - DNA, 897 bp, Artificial Sequence
  derived and/or modified sequence
atggctaccctgggccatactttcccattttacgcgggtcccaagcctacatttcctatggataccaccctggcctctataatcatgatcttcctcaccgctctagctaccttcatcgtgattcttcccggtattcggggaaaaacaagacttttctggttgctgagagtggttaccagcctctttatcggcgctgcgatcttggggactcccgtgcagcagttgaacgaaacaatcaactataacgaggagtttacttggcgactcggcgaaaactatgccgaggagtatgctaaagcactcgagaaaggcctgcccgaccctgttttgtatcttgctgagaaatttaccccgaggtctccctgtgggctgtatcggcagtatcgactcgcgggtcattatacgtctgctatgctttgggtggcatttctctgctggttgctggctaacgtcatgctgagcatgcctgtgttggtatacggtgggtacatgctgctggccacaggcatatttcagctgctcgcactgctttttttcagtatggctacttccctgacctccccgtgtccgttgcacctcggggcatcagtactccatacacaccacggtccagccttttggatcactctgacaaccggcctgttgtgcgtgctccttgggctcgctatggccgtcgcgcacaggatgcaacctcatcggcttaaggcattcttcaatcaatctgtcgatgaggatccgatgctggaatggtcacccgaagaagggggactgctcagtcctagatatagatctatggccgacagtcctaaatctcaagatataccgctgagcgaggccagcagcactaaagcttactgtaaggaagcgcacccaaaagatccagattgcgctctgtag

SEQ ID NO: 293719 - DNA, 219 bp, Artificial Sequence
  derived and/or modified sequence
atggcgaccctgggccatacttttccattttacgcaggtcctaaacctacttttccaatggacaccaccctggcttcaattatcatgatttttctcacagcacttgcaacgtttatagtaattttgcctgggattagagggaagacccggctgttttggctgctgcgagtggtcaccagcctcttcattggggctgcaatattggggactcccgtctag

SEQ ID NO: 293720 - DNA, 234 bp, Artificial Sequence
  derived and/or modified sequence
atggccaccctgggccacaccttccccttctacgccggccccaagcccaccttccccatggacaccaccctggccagcatcatcatgatcttcctgaccgccctggccaccttcatcgtgatcctgcccggcatcagaggcaagaccagactgttctggctgctgagagtggtgaccagcctgttcatcggcgccgccatcctgggcacccccgtgcagcagctgaacgagtag

SEQ ID NO: 293721 - DNA, 897 bp, Artificial Sequence
  derived and/or modified sequence
atggccaccctgggccacaccttccccttctacgccggccccaagcccaccttccccatggacaccaccctggccagcatcatcatgatcttcctgaccgccctggccaccttcatcgtgatcctgcccggcatcagaggcaagaccagactgttctggctgctgagagtggtgaccagcctgttcatcggcgccgccatcctgggcacccccgtgcagcagctgaacgagaccatcaactacaacgaggagttcacctggagactgggcgagaactacgccgaggagtacgccaaggccctggagaagggcctgcccgaccccgtgctgtacctggccgagaagttcacccccagaagcccctgcggcctgtacagacagtacagactggccggccactacaccagcgccatgctgtgggtggccttcctgtgctggctgctggccaacgtgatgctgagcatgcccgtgctggtgtacggcggctacatgctgctggccaccggcatcttccagctgctggccctgctgttcttcagcatggccaccagcctgaccagcccctgccccctgcacctgggcgccagcgtgctgcacacccaccacggccccgccttctggatcaccctgaccaccggcctgctgtgcgtgctgctgggcctggccatggccgtggcccacagaatgcagccccacagactgaaggccttcttcaaccagagcgtggacgaggaccccatgctggagtggagccccgaggagggcggcctgctgagccccagatacagaagcatggccgacagccccaagagccaggacatccccctgagcgaggccagcagcaccaaggcctactgcaaggaggcccaccccaaggaccccgactgcgccctgtag

SEQ ID NO: 293722 - DNA, 219 bp, Artificial Sequence
  derived and/or modified sequence
atggccaccctgggccacaccttccccttctacgccggccccaagcccaccttccccatggacaccaccctggccagcatcatcatgatcttcctgaccgccctggccaccttcatcgtgatcctgcccggcatcagaggcaagaccagactgttctggctgctgagagtggtgaccagcctgttcatcggcgccgccatcctgggcacccccgtgtag

SEQ ID NO: 293723 - DNA, 1678 bp, Artificial Sequence
  derived and/or modified sequence
gcttccagcggacggcagcgcgcgagaccaggccaggcgtcaaagcaagtcacccatccgacctaaacccctctaagaccccggagtcacgtctccctccggggatcctcgtgaggtcttgggggtcccaccgccctgcgagccgcgcccgcgccccgccagacccggaactgcgtcgctagaacgtcgggacctggttccctctttaatcacacccccgggggcgcttcgtgtgaggttccacgggggaaggcgagaggcgcaggctgccacacacgcactgtttggaagaggggaagggctgcacttcctgctttcatccagaccaagttcggatcaagtgggagttcttcaaagagagagtttgcattgccccccctgcaccacctcaccaagatggctactttgggacacacattccccttctatgctggccccaagccaaccttcccgatggacaccactttggccagcatcatcatgatctttctgactgcactggccacgttcatcgtcatcctgcctggcattcggggaaagacgaggctgttctggctgcttcgggtggtgaccagcttattcatcggggctgcaatcctggggacccccgtgcagcagctgaatgagaccatcaattacaacgaggagttcacctggcgcctgggtgagaactatgctgaggagtatgcaaaggctctggagaaggggctgccagaccctgtgttgtacctagctgagaagttcactccaagaagcccatgtggcctataccgccagtaccgcctggcgggacactacacctcagccatgctatgggtggcattcctctgctggctgctggccaatgtgatgctctccatgcctgtgctggtatatggtggctacatgctattggccacgggcatcttccagctgttggctctgctcttcttctccatggccacatcactcacctcaccctgtcccctgcacctgggcgcttctgtgctgcatactcaccatgggcctgccttctggatcacattgaccacaggactgctgtgtgtgctgctgggcctggctatggcggtggcccacaggatgcagcctcacaggctgaaggctttcttcaaccagagtgtggatgaagaccccatgctggagtggagtcctgaggaaggtggactcctgagcccccgctaccggtccatggctgacagtcccaagtcccaggacattcccctgtcagaggcttcctccaccaaggcatactgtaaggaggcacaccccaaagatcctgattgtgctttataacattcctccccgtggaggccacctggacttccagtctggctccaaacctcattggcgccccataaaaccagcagaactgccctcagggtggctgttaccagacacccagcaccaatctacagacggagtagaaaaaggaggctctatatactgatgttaaaaaacaaaacaaaacaaaaagccctaagggactgaagagatgctgggcctgtccataaagcctgttgccatgataaggccaagcaggggctagcttatctgcacagcaacccagcctttccgtgctgccttgcctcttcaagatgctattcactgaaacctaacttcacccccataacaccagcagggtgggggttacatatgattctcctatggtttcctctca

SEQ ID NO: 293724 - protein, 96 aa, Artificial Sequence
  derived and/or modified sequence
MPAVASVPKELYLSSSLKDLNKKTEVKPEKISTKSYVHSALKIFKTAEECRLDRDEERAYVLYMKYVTVYNLIKKRPDFKQQQDYFHSILGPGNIK

SEQ ID NO: 293725 - protein, 1195 aa, Artificial Sequence
  derived and/or modified sequence
MWSLTASEGESTTAHFFLGAGDEGLGTRGIGMRPEESDSELLEDEEDEVPPEPQIIVGICAMTKKSKSKPMTQILERLCRFDYLTVVILGEDVILNEPVENWPSCHCLISFHSKGFPLDKAVAYSKLRNPFLINDLAMQYYIQGDRREVYRILQEEGIDLPRYAVLNRDPARPEECNLIEGEDQVEVNGAVFPKPFVEKPVSAEDHNVYIYYPSSAGGGSQRLFRKIGSRSSVYSPESSVRKTGSYIYEEFMPTDGTDVKVYTVGPDYAHAEARKSPALDGKVERDSEGKEIRYPVMLTAMEKLVARKVCVAFKQTVCGFDLLRANGHSFVCDVNGFSFVKNSMKYYDDCAKILGNTIMRELAPQFQIPWSIPTEAEDIPIVPTTSGTMMELRCVIAIIRHGDRTPKQKMKMEVKHPRFFALFEKHGGYKTGKLKLKRPEQLQEVLDITRLLLAELEKEPGGEIEEKTGKLEQLKSVLEMYGHFSGINRKVQLTYYPHGVKASNEGQDPQRETLAPSLLLVLKWGGELTPAGRVQAEELGRAFRCMYPGGQGDYAGFPGCGLLRLHSTFRHDLKIYASDEGRVQMTAAAFAKGLLALEGELTPILVQMVKSANMNGLLDSDGDSLSSCQHRVKARLHHILQQDAPFGPEDYDQLAPTRSTSLLNSMTIIQNPVKVCDQVFALIENLTHQIRERMQDPRSVDLQLYHSETLELMLQRWSKLERDFRQKSGRYDISKIPDIYDCVKYDVQHNGSLGLQGTAELLRLSKALADVVIPQEYGISREEKLEIAVGFCLPLLRKILLDLQRTHEDEYSRGVLSPGRHVRTRLYFTSESHVHSLLSVFRYGGLLDETQDADRALQTSPQPPEGPGLPRRSPLIRNRKAGSMEVLSETSSSRPGGYRLFSSSRPPTEMKQSGLGSQCTGLFSTTVLGGSSSAPNLQDYARSHGKKLPPASLKHRDELLFVPAVKRFSVSFAKHPTNGFEGCSMVPTIYPLETLHNALSLRQVPPMETSQPYEEVSQPCQEVPDISQPCQDISEALSQPCQKVPDISQQCQENHDNGNHTCQEVPHISQPCQKSSQLCQKVSEEVCQLCLENSEEVSQPCQGVSVEVGKLVHKFHVGVGSLVQETLVEVGSPAEEIPEEVIQPYQEFSVEVGRLAQETSAINLLSQGIPEIDKPSQEFPEEIDLQAQEVPEEIN

SEQ ID NO: 293726 - DNA, 3588 bp, Artificial Sequence
  derived and/or modified sequence
atgtggagcctgaccgccagcgagggcgagagcaccaccgcccacttcttcctgggcgccggcgacgagggcctgggcaccagaggcatcggcatgagacccgaggagagcgacagcgagctgctggaggacgaggaggacgaggtgccccccgagccccagatcatcgtgggcatctgcgccatgaccaagaagagcaagagcaagcccatgacccagatcctggagagactgtgcagattcgactacctgaccgtggtgatcctgggcgaggacgtgatcctgaacgagcccgtggagaactggcccagctgccactgcctgatcagcttccacagcaagggcttccccctggacaaggccgtggcctacagcaagctgagaaaccccttcctgatcaacgacctggccatgcagtactacatccagggcgacagaagagaggtgtacagaatcctgcaggaggagggcatcgacctgcccagatacgccgtgctgaacagagaccccgccagacccgaggagtgcaacctgatcgagggcgaggaccaggtggaggtgaacggcgccgtgttccccaagcccttcgtggagaagcccgtgagcgccgaggaccacaacgtgtacatctactaccccagcagcgccggcggcggcagccagagactgttcagaaagatcggcagcagaagcagcgtgtacagccccgagagcagcgtgagaaagaccggcagctacatctacgaggagttcatgcccaccgacggcaccgacgtgaaggtgtacaccgtgggccccgactacgcccacgccgaggccagaaagagccccgccctggacggcaaggtggagagagacagcgagggcaaggagatcagataccccgtgatgctgaccgccatggagaagctggtggccagaaaggtgtgcgtggccttcaagcagaccgtgtgcggcttcgacctgctgagagccaacggccacagcttcgtgtgcgacgtgaacggcttcagcttcgtgaagaacagcatgaagtactacgacgactgcgccaagatcctgggcaacaccatcatgagagagctggccccccagttccagatcccctggagcatccccaccgaggccgaggacatccccatcgtgcccaccaccagcggcaccatgatggagctgagatgcgtgatcgccatcatcagacacggcgacagaacccccaagcagaagatgaagatggaggtgaagcaccccagattcttcgccctgttcgagaagcacggcggctacaagaccggcaagctgaagctgaagagacccgagcagctgcaggaggtgctggacatcaccagactgctgctggccgagctggagaaggagcccggcggcgagatcgaggagaagaccggcaagctggagcagctgaagagcgtgctggagatgtacggccacttcagcggcatcaacagaaaggtgcagctgacctactacccccacggcgtgaaggccagcaacgagggccaggacccccagagagagaccctggcccccagcctgctgctggtgctgaagtggggcggcgagctgacccccgccggcagagtgcaggccgaggagctgggcagagccttcagatgcatgtaccccggcggccagggcgactacgccggcttccccggctgcggcctgctgagactgcacagcaccttcagacacgacctgaagatctacgccagcgacgagggcagagtgcagatgaccgccgccgccttcgccaagggcctgctggccctggagggcgagctgacccccatcctggtgcagatggtgaagagcgccaacatgaacggcctgctggacagcgacggcgacagcctgagcagctgccagcacagagtgaaggccagactgcaccacatcctgcagcaggacgcccccttcggccccgaggactacgaccagctggcccccaccagaagcaccagcctgctgaacagcatgaccatcatccagaaccccgtgaaggtgtgcgaccaggtgttcgccctgatcgagaacctgacccaccagatcagagagagaatgcaggaccccagaagcgtggacctgcagctgtaccacagcgagaccctggagctgatgctgcagagatggagcaagctggagagagacttcagacagaagagcggcagatacgacatcagcaagatccccgacatctacgactgcgtgaagtacgacgtgcagcacaacggcagcctgggcctgcagggcaccgccgagctgctgagactgagcaaggccctggccgacgtggtgatcccccaggagtacggcatcagcagagaggagaagctggagatcgccgtgggcttctgcctgcccctgctgagaaagatcctgctggacctgcagagaacccacgaggacgagtacagcagaggcgtgctgagccccggcagacacgtgagaaccagactgtacttcaccagcgagagccacgtgcacagcctgctgagcgtgttcagatacggcggcctgctggacgagacccaggacgccgacagagccctgcagaccagcccccagccccccgagggccccggcctgcccagaagaagccccctgatcagaaacagaaaggccggcagcatggaggtgctgagcgagaccagcagcagcagacccggcggctacagactgttcagcagcagcagaccccccaccgagatgaagcagagcggcctgggcagccagtgcaccggcctgttcagcaccaccgtgctgggcggcagcagcagcgcccccaacctgcaggactacgccagaagccacggcaagaagctgccccccgccagcctgaagcacagagacgagctgctgttcgtgcccgccgtgaagagattcagcgtgagcttcgccaagcaccccaccaacggcttcgagggctgcagcatggtgcccaccatctaccccctggagaccctgcacaacgccctgagcctgagacaggtgccccccatggagaccagccagccctacgaggaggtgagccagccctgccaggaggtgcccgacatcagccagccctgccaggacatcagcgaggccctgagccagccctgccagaaggtgcccgacatcagccagcagtgccaggagaaccacgacaacggcaaccacacctgccaggaggtgccccacatcagccagccctgccagaagagcagccagctgtgccagaaggtgagcgaggaggtgtgccagctgtgcctggagaacagcgaggaggtgagccagccctgccagggcgtgagcgtggaggtgggcaagctggtgcacaagttccacgtgggcgtgggcagcctggtgcaggagaccctggtggaggtgggcagccccgccgaggagatccccgaggaggtgatccagccctaccaggagttcagcgtggaggtgggcagactggcccaggagaccagcgccatcaacctgctgagccagggcatccccgagatcgacaagcccagccaggagttccccgaggagatcgacctgcaggcccaggaggtgcccgaggagatcaactag

SEQ ID NO: 293727 - DNA, 3771 bp, Artificial Sequence
  derived and/or modified sequence
gattgggccgctgtcaggtgtcgctgcctgcaggttcggctgcgcgagcggagggaggcgggactcaagagtagccttcctcgaggacctgcctttcccatttgctgcctgaagttaatgtttcttgctggccaaatcagggacatgccggcattagcgggatgagtgggtgttccggcagggatgtggtcattgacggccagtgagggcgagagtaccacggcccacttcttccttggagctggagatgaggggctgggcacccgtggaataggcatgaggccagaagagagtgacagcgagctccttgaggatgaggaggatgaagtgcctcctgaacctcagatcattgttggcatctgtgccatgaccaagaaatccaagtccaagccaatgactcaaatcctagagcgactctgcagatttgactacctgactgttgtcattctgggagaagatgtaatccttaatgaacctgtggaaaactggccatcctgccactgcctcatctctttccactccaaaggctttcctctggacaaagctgttgcttactccaagcttcgaaacccctttcttatcaatgatctggccatgcagtattacatccaaggtgacaggagggaggtgtaccggatcctgcaggaagagggtattgatctgcctcgatatgctgtgctcaaccgtgatcctgcccggcctgaggaatgcaacctgatagaaggtgaagaccaagtagaggtcaatggagctgtctttcccaagccctttgtggagaagccagtgagtgcagaagaccacaatgtttacatctactaccccagctcagctggaggaggaagccagcgtctctttcgtaagattggcagccgaagcagtgtttactctcctgagagcagcgtccgaaagacggggtcgtacatctatgaggagtttatgccaacagatggcacagatgtcaaggtgtatacagtggggccagattatgcccatgctgaagctagaaaatctccagctttggatgggaaggttgaacgagacagtgaggggaaagagattcgatatccagtcatgctgactgccatggaaaagctggtggccaggaaagtctgcgtagctttcaagcaaacagtttgtggatttgaccttcttcgtgccaatggtcattcctttgtgtgtgatgtcaatggctttagttttgtcaagaactcgatgaaatactacgatgactgtgccaagattctggggaacaccataatgcgggagcttgccccacagttccagattccatggtccatccccacggaggctgaggacattcccattgttcccaccacatctggcactatgatggaacttcgttgtgtcattgcaattattcgtcatggggatcgtactcccaagcagaagatgaagatggaagtgaaacacccaaggttttttgctctgtttgaaaaacatggtggctacaagacagggaaattaaaactcaagcgacctgagcagctccaggaggtgctggatatcacaaggctgttgttggctgaactggagaaagaaccaggtggtgagatcgaggagaagactggaaaactagagcagctgaagtctgtactggagatgtatggtcacttctcaggtataaaccggaaggtacaattgacttactaccctcatggagtaaaagcttctaatgaggggcaagatccacagagggaaactctggccccatctctgttgctggtactgaagtggggtggagaactgactcctgctggccgtgttcaggctgaggagctggggcgagcttttcgctgcatgtaccctggaggacagggtgactatgctggcttccctggttgtgggctgcttcgtctccatagcactttccgccacgatctcaagatctatgcctctgatgagggtcgtgttcagatgactgctgctgccttcgccaagggccttctggctctagaaggggagctgacacccattttggtgcaaatggtgaagagtgccaacatgaatgggctactggacagcgatggggattccttgagcagctgccagcaccgggtgaaggctcggctgcaccatattctacagcaggatgcgccctttggccctgaggactacgatcagctggctcccaccagaagtacttccctgctcaactccatgactatcatccagaatcctgtgaaggtctgtgatcaggtatttgccctgatcgaaaacctcacccaccagatccgggaacgaatgcaggaccccaggtctgtagacctgcagctctaccacagtgagacactagagctaatgctacagcgttggagcaagctggagcgtgactttcgacagaagagtgggcgctatgatatcagtaagatccctgacatctatgactgtgtcaagtatgatgtgcagcacaatgggagtctgggacttcaaggcacagcagagttgctccgtctctctaaggcactggctgatgtggtcattccccaggagtacgggatcagtcgggaggagaaactggaaattgctgtgggcttctgtcttccactgttgcggaagatactacttgacctgcagagaacccacgaggatgagtactcccgaggcgtgctctccccaggtcgccacgttcgaacgcgtctctatttcaccagtgagagccatgtccactccctgctcagtgtcttccgttatggaggacttcttgatgagacccaggatgcagaccgggcattgcagacttcaccccagcctcctgagggccctggccttccgaggagatcacccctcattcgtaaccgaaaagctggttccatggaggtactttctgagacttcatcctcgaggcctggtggctaccggctcttttcatcttcacggccacccacagaaatgaagcagagtggcctaggctcacagtgcacagggctgttcagcaccacagtgctgggtggctcctccagtgccccgaatcttcaggactacgcccgcagccatggcaaaaagctaccacctgccagtctgaagcaccgagatgagctcttgtttgtcccggccgtaaaacgattttctgtgtcgtttgcaaagcatccgactaacgggtttgaagggtgttccatggtgcctaccatctaccctctggaaacactgcataatgccctttccctacgtcaagtgccacctatggaaaccagccagccatacgaggaggtcagccagccatgtcaggaggtccctgacatcagccagccatgccaggacatttctgaggcgctcagccagccatgtcagaaggtccctgacatcagccagcaatgccaggagaaccatgacaatggtaaccacacatgccaggaggtccctcacatcagccagccatgccagaagtccagccaactgtgccagaaagtctctgaggaagtttgccagctatgtctggagaactccgaggaggtcagccagccatgccagggggtctctgtggaggttggcaagctggtccataagttccatgtaggggttggtagcttggtccaggaaacccttgtagaagttggcagcccagctgaagagatccctgaggaggtcatccagccataccaggagttctctgtggaggttggcaggctggcccaggagacttctgcgatcaatctgttatctcagggcatccctgagattgataaaccatcccaagagttccctgaggagattgatctgcaggcccaggaggtccctgaggagataaattag

SEQ ID NO: 293728 - DNA, 219 bp, Artificial Sequence
  derived and/or modified sequence
atgtggagcctgaccgccagcgagggcgagagcaccaccgcccacttcttcctgggcgccggcgacgagggcctgggcaccagaggcatcggcatgagacccgaggagagcgacagcgagctgctggaggacgaggaggacgaggtgccccccgagccccagatcatcgtgggcatctgcgccatgaccaagaagagcaagagcaagcccatgacctag

SEQ ID NO: 293729 - DNA, 3588 bp, Artificial Sequence
  derived and/or modified sequence
atgtggagcctgaccgcctccgagggagagtcaacaaccgcacatttctttctcggcgcaggcgacgaggggcttggtactcgaggcatcggtatgcgccccgaggagagtgacagcgaactcctcgaggacgaagaagatgaagtgccccccgaaccgcagattatcgtgggaatttgtgctatgacgaaaaaaagtaagtcaaagccgatgacccagattctcgaaagactgtgtcggttcgactacttaacagtcgtcattttaggagaagacgtgatcctcaatgagcccgtggagaactggcccagctgccactgcctcatttcctttcatagcaagggcttcccacttgataaggctgtggcctattcaaagctccgaaacccctttttgatcaatgatctggccatgcaatactatatccagggagaccgacgggaggtctacagaatcttacaggaagagggcattgacctcccaaggtacgccgttctgaatcgagaccctgcacggcctgaagagtgcaacctgattgaaggggaggatcaggtagaggtaaatggggcagtatttcctaaacctttcgtggaaaagcctgtctctgccgaagatcataatgtctacatctactacccctcatctgcaggcgggggaagccagaggctgtttcgaaaaatcggtagcaggagttctgtttattcaccggaaagttctgttcgcaagactggctcctatatttatgaggagtttatgcctacagacggtacagatgtcaaggtgtatactgtagggccggattacgcccacgccgaggcccggaagagccctgcactggatgggaaggtggagcgcgactccgagggtaaagagatccggtaccccgttatgctcactgcaatggagaagctggttgcaaggaaggtttgcgtggcgttcaagcagacagtgtgtggttttgacctgcttcgcgcaaatggccactcctttgtttgcgatgtgaatggattctcgttcgtcaagaacagtatgaaatactatgacgattgtgcaaagatcctgggtaatactataatgcgggagctggctcctcaattccagattccgtggtcgatcccgacggaagctgaggacattcctatcgttccgaccactagcggaacaatgatggagctgagatgtgtgatagctattatacggcacggcgaccgcactccaaaacagaagatgaagatggaggtcaagcacccacggttctttgccttattcgagaagcacggtggatacaagactggtaagcttaagctaaagcgccccgaacagctacaggaagtcttagacatcacacgcttgcttctggctgaactggaaaaagaacctggcggcgaaattgaggaaaagacaggaaagctggagcaactgaagagcgtcctggagatgtatggccactttagcggcattaatcgcaaggtccaactcacttactatccgcacggagtgaaggcatctaacgaaggtcaggatcctcagcgtgagaccctcgctccatcgttgcttctggtgcttaaatggggtggggaattgacccctgcggggcgagtgcaggcagaggaactgggccgcgcttttcgctgcatgtatccagggggacagggcgattatgctgggttccccggttgtggtctgctgcgcttgcattctaccttccgacatgacttgaagatctatgcctcggacgagggtcgcgtccaaatgaccgctgccgcattcgccaaaggactgttggctctggaaggggagttgactcccattcttgtccagatggttaagtccgctaacatgaacgggctgctggattcagatggtgactccctgagctcttgtcagcaccgcgtgaaagctagacttcaccacattttacagcaggacgctccgttcggcccagaagactatgatcagcttgctcctacgcggtctacgagtctgctcaactccatgaccatcatacagaacccggtaaaagtgtgcgaccaggtgttcgcactaattgagaacctgacccaccagatacgtgagcgcatgcaggaccctcgctcggtcgatttgcagctgtaccattcagagactctggagctgatgctccaacggtggagcaagctcgagagggattttcggcagaagagcggtcgatacgacatttcaaaaatcccggatatttacgactgtgtgaagtacgatgtgcagcataacggctctctgggcttacagggaacggcggagctgttaaggctgtctaaagctctagcagacgtagtgattccccaagagtatggaataagcagggaggagaagctggagattgccgtgggtttttgtctccccttactcaggaaaatcttgctcgatctgcagcggacccatgaggacgaatacagcaggggtgtgctgtcaccaggcaggcatgtcagaacaagattgtacttcactagcgagagtcacgtgcattcactgctcagtgtgtttaggtatgggggccttctggatgagactcaggatgccgacagagcactgcagacatcccctcagccccctgagggcccgggtctgcccaggagatccccccttatcaggaatagaaaagccgggtccatggaagtcctctctgaaactagctccagtcgtccagggggctatcgtctcttttcgagtagccggccacccacggagatgaaacagtctggcttagggtctcaatgtaccgggctattctctacgaccgtcttaggagggtcgtcctctgcgcctaatttgcaggactacgccagaagtcacggcaaaaaactgccccccgcgtcccttaaacatagagatgagttgttatttgtccctgcggtgaaacggttttctgttagcttcgcgaagcaccccactaacggattcgaggggtgttctatggtgccaaccatctatcccttggagactctccacaatgcgctctccctgcgccaggtaccccctatggagacttcacagccttacgaggaggtaagccaaccctgtcaggaggtcccagacatcagccagccgtgccaggatatttcggaggctctgtcccaaccgtgtcagaaggtgccggacatctcccagcagtgtcaggagaatcacgataatggtaaccacacctgccaagaggttccgcatatttcccagccctgtcagaagtcctcgcagctctgtcagaaggtctccgaggaggtttgtcaactctgcctggaaaattccgaggaagtgtcacagccttgtcagggagtgagtgtcgaggtaggtaaactggtgcataaattccacgtgggagtcgggagtttggttcaggaaaccctcgtggaagtcggcagccccgctgaagaaattcctgaggaagtgatccaaccttatcaagaattctctgttgaggtcggcagattggcccaagagacctctgcgattaacttgttgtctcaaggcattcccgaaatcgataaaccgtctcaggaattcccagaagagatagacctgcaggctcaggaggttcccgaagagatcaactag

SEQ ID NO: 293730 - DNA, 219 bp, Artificial Sequence
  derived and/or modified sequence
atgtggagtctgacagctagtgaaggtgagtctactaccgcgcacttcttcctgggggcaggagacgaagggctgggtaccagaggcattggcatgcggcccgaggaatcagacagtgaactgctcgaggacgaagaggacgaggtaccccccgagcctcagattattgtgggtatctgtgcgatgactaaaaagagcaagagtaaacctatgacatag

SEQ ID NO: 293731 - DNA, 3588 bp, Artificial Sequence
  derived and/or modified sequence
atgtggagcctgacagccagcgagggggagagcaccacagcccacttcttcctgggcgctggagatgagggcctgggcacccggggcatcggcatgaggcctgaggagagtgacagcgagctgctggaggatgaggaggatgaggtgcccccagagccccagatcatcgtgggcatctgtgccatgaccaagaagagcaagagcaagcccatgacccagatcctggagcggctgtgccgctttgactacctgactgtggtgatcctgggagaagatgtgatcctgaatgaacctgtggagaactggcccagctgccactgcctgatctccttccacagcaagggcttccccctggacaaggctgtggcctacagcaagctgaggaaccccttcctgatcaatgacctggccatgcagtactacatccagggcgaccggcgggaggtgtaccgcatcctgcaggaggagggcatcgacctgcccaggtatgctgtgctgaacagagatcctgcccggcctgaggagtgcaacctgattgaaggagaggaccaggtggaggtgaatggagctgtgttccccaagccctttgtggagaagcctgtgtctgctgaggaccacaacgtgtacatctactaccccagcagcgctgggggcggcagccagaggctcttcaggaagattggcagccgcagctctgtgtacagccctgagagctctgtgaggaagacaggcagctacatctatgaggagttcatgcccacagatggaacagatgtgaaggtgtacacagtgggccctgactatgcccatgctgaggccaggaagagccctgccctggatggcaaggtggagcgggacagcgagggcaaggagatccgctaccctgtgatgctgacagccatggagaagctggtggccaggaaggtgtgtgtggccttcaagcagacagtgtgtggctttgacctgctgcgggccaacggccacagctttgtgtgtgatgtgaatggcttctcctttgtgaagaacagcatgaagtactatgatgactgtgccaagatcctgggcaacaccatcatgagggagctggccccccagttccagatcccctggagcatccccacagaagctgaggacatccccatcgtgcccaccaccagcggcaccatgatggagctgcgctgcgtcatcgccatcatcagacatggagacaggacccccaagcagaagatgaagatggaggtgaagcacccccgcttctttgccctgtttgagaagcacggcggctacaagacaggcaagctgaagctgaagaggcctgagcagctgcaggaggtgctggacatcacccggctgctgctggccgagctggagaaggagcccggcggggagattgaggagaagacaggcaagctggagcagctgaagtctgtgctggagatgtatggccacttcagcggcatcaacaggaaggtgcagctgacctactacccccacggcgtgaaggccagcaatgaaggccaggacccccagcgggagaccctggcccccagcctgctgctggtgctgaagtggggcggggagctgaccccagctggccgggtgcaggccgaggagctgggccgggccttccgctgcatgtacccaggcggccagggcgactatgccggcttccctggctgcggcctgctgcggctgcacagcaccttcagacatgacctgaagatctatgccagtgatgagggccgggtgcagatgacagctgctgcctttgccaagggcctgctggccctggagggggagctgacccccatcctggtgcagatggtgaagagcgccaacatgaatggcctgctggacagtgatggagacagcctgagcagctgccagcaccgggtgaaggcccggctgcaccacatcctgcagcaggatgcccccttcggcccagaagattatgaccagctggcccccaccaggagcaccagcctgctgaacagcatgaccatcatccagaaccctgtgaaggtgtgtgaccaggtgtttgccctgattgagaacctgacccaccagatccgggagaggatgcaggaccccaggtctgtggacctgcagctgtaccacagcgagaccctggagctgatgctgcagcgctggagcaagctggagcgggacttccggcagaagagcggccgctatgacatcagcaagatcccagacatctatgactgtgtgaagtatgatgtgcagcacaacggcagcctgggcctgcagggcacagctgagctgctgcggctgagcaaggccctggctgatgtggtgatcccccaggagtatggcatcagccgggaggagaagctggagattgctgtgggcttctgcctgcccctgctgaggaagatcctgctggacctgcagaggacccatgaagatgagtacagccggggcgtgctgagccctggaagacatgtgaggacccggctgtacttcaccagcgagagccacgtgcacagcctgctgtctgtgttccgctatggaggcctgctggatgagacccaggatgctgaccgggccctgcagaccagcccccagcccccagagggccctggcctgcccaggaggagccccctcatccggaacaggaaggccggctccatggaggtgctgtctgagaccagcagcagcaggcctgggggctaccgcctcttcagcagcagccggcccccaacagagatgaagcagagcggcctgggcagccagtgcaccggcctcttcagcaccaccgtgctgggcggcagcagcagcgcccccaacctgcaggactatgcccggagccacggcaagaagctgcccccagccagcctgaagcacagagatgagctgctgtttgtgcctgctgtgaagcgcttctctgtgtcctttgccaagcaccccaccaacggctttgagggctgcagcatggtgcccaccatctaccccctggagaccctgcacaatgccctgagcctgcggcaggtgccccccatggagaccagccagccctatgaggaggtgtcccagccctgccaggaggtgcctgacatcagccagccctgccaggacatcagcgaggccctgagccagccctgccagaaggtgcctgacatcagccagcagtgccaggagaaccacgacaatggaaaccacacctgccaggaggtgccccacatcagccagccctgccagaagagcagccagctgtgccagaaggtgtctgaggaggtgtgccagctgtgcctggagaacagcgaggaggtgtcccagccctgccagggcgtgtctgtggaggtgggcaagctggtgcacaagttccacgtgggcgtgggcagcctggtgcaggagaccctggtggaggtgggcagccctgctgaggagatccctgaggaggtgatccagccctaccaggagttctctgtggaggtgggccgcctggcccaggagaccagcgccatcaacctgctgagccagggcatccctgagattgacaagcccagccaggagttccctgaggagattgacctgcaggcccaggaggtgcctgaggagatcaactag

SEQ ID NO: 293732 - DNA, 219 bp, Artificial Sequence
  derived and/or modified sequence
atgtggagcctgacagccagcgagggggagagcaccacagcccacttcttcctgggcgctggagatgagggcctgggcacccggggcatcggcatgaggcctgaggagagtgacagcgagctgctggaggatgaggaggatgaggtgcccccagagccccagatcatcgtgggcatctgtgccatgaccaagaagagcaagagcaagcccatgacctag

SEQ ID NO: 293733 - DNA, 3588 bp, Artificial Sequence
  derived and/or modified sequence
atgtggagcctgaccgccagcgagggcgagagcaccaccgcccacttcttcttgggcgctggggatgaaggccttgggaccaggggtatcgggatgagaccagaagagtcagactccgagctgctcgaggacgaagaagacgaggttcctccagagccacagatcatagtgggcatttgcgccatgaccaaaaagagcaagtcgaagcccatgacccagattctcgagaggctgtgtaggtttgactacctgaccgtggtgatactcggcgaggatgttatcttgaatgagccagtggaaaactggccctcctgtcattgcttaatctcctttcacagcaagggctttcctctggacaaggccgtggcatactcaaaactgcggaacccatttctgattaacgacctggctatgcagtactacattcagggcgacagacgagaagtgtatcggatcctgcaggaggagggcatcgatctgccgcggtacgccgtgttgaatcgagatccggcaagacccgaggaatgtaatctaattgagggcgaggatcaggtcgaggttaacggcgccgttttcccaaagccctttgtcgagaaacccgttagcgccgaggaccacaatgtgtacatctactatccctcgtcagctggaggtggaagtcagcgtctgttcaggaagattggaagtcgctccagcgtgtattcgcctgagagttccgtacgcaagaccggcagttacatctacgaagaatttatgcccaccgatgggactgacgtgaaggtgtatacagtcgggccagattacgctcatgccgaggcccgcaaatcacccgctctcgatggcaaagtggaacgggattctgaggggaaggaaatcaggtaccccgtcatgctaacggctatggagaaactggtcgctaggaaggtatgtgtggcttttaaacagactgtatgcggatttgacctcctccgggcaaacggccattcattcgtgtgcgacgtgaacggctttagctttgtgaagaactcaatgaaatattacgatgattgcgcaaagattttggggaacaccataatgcgtgagttggctccccaattccagataccttggagcattccaactgaagcagaggacatcccaatagtcccaacaacgtcaggaacaatgatggagttgcggtgtgtcatcgcgattattagacatggagatcgcacaccaaagcagaagatgaagatggaagtgaaacacccccggttctttgctcttttcgaaaagcatggaggatataaaaccgggaaactgaaacttaagaggccagagcaattacaagaagtgttagacatcacacgactactcctcgcggagctcgaaaaagagcccgggggagaaatagaagagaaaactgggaaattggagcagctcaagtccgtgctggagatgtatggacatttttcgggaattaaccgaaaagtgcagctgacttattacccacatggcgtcaaggcttcgaacgagggacaggatccgcagcgggaaacgcttgccccatcgctcctcctcgtgcttaaatggggcggggaactgacacctgcaggtagggtacaggccgaagagctgggaagagcgttccgatgtatgtatccaggcgggcagggcgattacgccggctttcctggttgtggtctcctgagacttcatagcacatttagacacgacttaaaaatttacgcttctgacgagggccgtgtacagatgacagctgctgctttcgccaagggcctgctggcgttggaaggtgagctgacgcccattctggtgcagatggttaagtcagctaacatgaatgggctgttagactctgacggagatagcctgagtagctgccaacatcgtgtcaaagctcgactgcaccacattctacagcaggatgccccatttggcccagaggattacgatcaactcgctccgactaggtcaaccagcctgctcaatagtatgactataatccagaatccagtaaaagtgtgtgatcaggtgttcgcacttatcgaaaacctgacacaccagattcgagagagaatgcaggacccaaggagcgtggatctccagctttatcatagcgagaccctggagctgatgctacagagatggagtaaactcgagagggatttccgtcaaaagagtggccgctatgacatatcaaaaatacctgatatctatgactgcgtcaagtacgatgtgcagcacaacggttcactggggttacaaggaacggctgaactgctgcgcctgagcaaggcactggccgatgtggttatccctcaggagtacggtatctctcgcgaggagaaattggaaattgcggtcggcttctgtctcccactgctgcggaagattttactggatctccagcgtactcatgaggatgaatactcaagaggggtgctctcccctggccgacacgtccggacgcgcttatatttcacatccgagtcccacgtgcattcgctgctatccgtgttccgatatgggggtctgctcgacgagactcaggatgcagacagggccctgcaaaccagtccccaacccccggagggaccaggcctgccacggaggagccccctgatccgcaacaggaaggctgggtcgatggaggtactgtcagaaaccagctctagtagacctggaggatacagactgttcagctcctcccgtccccctaccgaaatgaagcagtcaggtctgggctctcagtgcacaggcctgttttccaccacggtgctaggtggttcctcctcggcacctaacctacaggattacgccagatcccacgggaaaaagttgcctcctgcctcattaaaacacagagacgagctgttatttgtacctgccgtaaagcgcttctccgtgagctttgccaaacacccaactaacggattcgagggctgttccatggtgccaacgatttatcctctggaaacactgcacaatgccctttcactgcggcaggtacccccaatggagaccagccagccatacgaagaggtgtctcagccttgccaggaagttcctgatatctcccaaccttgccaagacatttctgaagccctcagccagccatgtcagaaagttcccgatatctctcagcagtgtcaggaaaatcacgataacgggaatcacacatgccaggaggtgccacatatctcacagccctgtcagaagtcgtctcagctctgtcaaaaggttagcgaggaggtttgtcagttgtgtctagaaaactccgaggaagtttcgcaaccatgccagggggttagcgtggaggtggggaagctggttcataaattccatgtaggtgttggctcgctagtgcaagagacactcgttgaggtcggctcaccagccgaggaaatccctgaggaagtgatacagccatatcaagagttctccgttgaggtgggtaggctggcccaggagaccagcgccattaatcttttgtcacaggggattcctgagattgataagcctagccaggagttccccgaagagatcgatctgcaggctcaagaggtgccagaggaaatcaactag

SEQ ID NO: 293734 - DNA, 219 bp, Artificial Sequence
  derived and/or modified sequence
atgtggagcctgaccgccagcgagggcgagagcaccaccgcccacttttttctcggcgccggtgatgaaggcctggggactagaggaattggtatgcgccctgaagaatccgactctgagctgctcgaggacgaggaagacgaggtacccccagagccccaaattattgtgggaatttgcgcgatgacaaagaaatctaaaagtaaaccaatgacatag

SEQ ID NO: 293735 - DNA, 535 bp, Artificial Sequence
  derived and/or modified sequence
cggagggaggcgggactcaagagtagccttcctcgaggacctgcctttcccatttgctgcctgaagttaatgtttcttgctggccaaatcagggacatgccggcattccccacccacagccagggggcttgggttctgagctgatggggtacccccctctgcagagcgggatgagtgggtgttccggcagggatgtggtcattgacggccagtgagggcgagagtaccacggcccacttcttccttggagctggagatgaggggctgggcacccgtggaataggcatgaggccagaagagagtgacagcgagctccttgaggatgaggaggatgaagtgcctcctgaacctcagatcattgttggcatctgtgccatgaccaagaaatccaagtccaagccaatgactcaaatcctagagcgactctgcagatttgactacctgactgttgtcattctgggagaagatgtaatccttaatgaacctgtggaaaactggccatcctgccactgcctcatctctttccactccaaag

SEQ ID NO: 293736 - DNA, 3588 bp, Artificial Sequence
  derived and/or modified sequence
atgtggtccctgaccgccagtgaaggggagtcaactaccgctcacttctttctgggagcgggagacgagggtctggggacccggggtatagggatgcggcctgaagaaagtgactcggaacttctggaagacgaggaggacgaggtgccacctgagccacagatcatcgtgggaatttgtgctatgacgaagaagtcaaaaagtaagccaatgacgcagatcctagagcggttgtgtaggttcgactacctgaccgtggtaattcttggcgaagatgttatccttaacgagcccgttgagaactggccaagctgtcactgcctgatcagcttccacagcaaaggctttccattagacaaggctgtggcctactcaaaactgagaaatccctttctgataaatgacctggctatgcagtactacatacagggtgaccgccgtgaggtttaccggatattgcaagaggaaggcattgacctgcctcggtacgccgtgctgaatcgagatcccgcacgtccagaagaatgtaacctcatcgaaggggaagatcaggtggaggtgaatggagcggtattcccaaagccctttgtggaaaagcctgtcagcgccgaagaccataatgtgtacatttactatccctctagcgccggtggtggctcacagcgtctgtttcgaaagataggctcacgaagttcggtgtattcaccagaaagctccgtgagaaagaccggaagctacatttacgaggagttcatgccaactgacgggacagatgtgaaggtctacaccgtgggccctgactacgcccacgccgaggctcggaagtcgcctgcactcgacggaaaggttgagcgagatagtgaagggaaggaaatcagatatcccgtgatgctcactgccatggaaaaacttgtggccaggaaggtgtgcgtcgcattcaaacaaaccgtctgtggctttgaccttttgagggctaacggccattccttcgtatgtgacgtcaacggattctcttttgtgaaaaactccatgaaatattatgacgattgcgccaagattctcggcaacactattatgcgggagctggctccacaatttcaaattccttggtccatccccaccgaggcagaggacatccctattgtgcccacaacatctggaacaatgatggagcttagatgtgttatagcgatcatccgtcatggtgaccggaccccaaaacaaaaaatgaaaatggaagttaaacatcccagattcttcgccctttttgaaaagcacggcggttacaaaaccggtaaattaaaactgaaacggcctgaacagttgcaggaagtgctggacatcaccaggctgctgctggccgagctcgaaaaggagccaggtggagaaatcgaggagaagacagggaaattggaacagcttaaatctgtgctggaaatgtatggccacttttctggcatcaatcgcaaagtccagctcacctactacccacacggcgttaaggccagcaatgagggccaggatcctcagagagagacacttgcaccatcactactcctggtcttaaagtggggtggcgaactgacgcctgctgggagagtgcaggcggaagaactcggacgggctttccgatgtatgtatccaggaggccaaggagattatgccggattcccgggatgcggattactgcgcctccactcaaccttccgtcacgaccttaaaatttacgcaagcgatgaagggagagtgcaaatgaccgcagccgcatttgctaagggcctcctggccctggagggggaattgacacctatcctagtgcagatggtgaaaagcgcaaacatgaacgggctgcttgacagcgacggcgacagcttatcaagttgccagcaccgggtaaaggccaggttgcatcatatccttcagcaggatgccccattcgggccagaggactatgatcagctggccccaacacgctctacctcactactgaattctatgacaattatacagaacccagtcaaagtctgcgaccaggtgttcgccctgattgaaaacctgactcaccagattagagagaggatgcaggaccctagatctgtggatctgcagctgtaccattctgagacactggagctgatgcttcagaggtggagcaaactggagagagacttccgacagaaatcaggccgatatgatatcagcaagatccctgatatctatgactgcgtgaaatatgacgtgcagcacaacggcagcttgggattgcagggcacagccgaactgctcaggctgtccaaggctctagccgacgtcgtaataccacaggaatacggcatctcacgagaagagaagttagagattgcagtgggcttttgcctcccattgctacggaagattctgctcgaccttcagaggacccacgaagatgagtacagccggggagtcctctcccccggacgacatgtgcgcacgcgtctatactttaccagtgaatcccacgtgcactccctgttgtctgtctttcgctatgggggtctgttggatgaaacccaagatgccgaccgggcactgcagacctctcctcaaccccctgagggacctgggttgcctcggaggagcccattaatacgcaacagaaaggctggcagcatggaagtgttgagcgaaacgtcgtcatcccgacccggagggtatcggctcttttcctccagccgcccaccaacggagatgaaacaatcgggcctgggcagtcagtgcactggcctgttcagcactacggtgctagggggtagttcgagcgcacccaacctgcaggattatgcgcgttcgcatggcaagaagcttccgccagcctccctcaagcaccgggatgaacttttgttcgtgcccgctgtgaagagattctcggtgtcattcgcgaaacacccgacgaatggctttgaaggctgctcaatggttcctacaatttatccacttgaaaccttgcacaacgccctcagtctgcggcaggtgccccctatggaaacctcccagccctatgaggaggtgagtcagccatgtcaggaagtgcccgacatctctcagccttgtcaggatatctcagaggctctttctcagccgtgccagaaggtccctgatatttcacagcagtgtcaggaaaatcacgataatggtaaccatacctgtcaggaagtgccacacatttctcagccctgtcaaaaaagctcacaactgtgccagaaagtgagtgaggaagtctgccagctctgcctggagaactcagaagaagtttcccagccgtgtcagggagtcagcgtggaggtggggaaactggtacataaatttcacgtaggcgttgggagcctcgtgcaagagaccctggtagaagtgggaagtccagccgaagagatccccgaggaagttatccagccttatcaggagttttctgtcgaggttgggcgattggcacaagagacaagtgctatcaatcttctgtcccaaggtatacccgagatcgataagccaagccaggagtttccagaagaaatcgatctccaggctcaggaggtgccagaagaaattaactag

SEQ ID NO: 293737 - DNA, 219 bp, Artificial Sequence
  derived and/or modified sequence
atgtggagcttgactgcctccgagggggagagtacaactgcccacttcttcctcggtgcaggtgacgaaggattagggactcggggaataggcatgcggccagaagaatctgatagcgagctgctggaagatgaagaggacgaggtgcctccggaaccgcagatcatagttggaatctgcgccatgaccaaaaagagcaagagcaagcccatgacatag

SEQ ID NO: 293738 - DNA, 506 bp, Artificial Sequence
  derived and/or modified sequence
ttcgtgacccggagctgtgcgaggagagtaccgaggagggggactcaagagtagccttcctcgaggacctgcctttcccatttgctgcctgaagttaatgtttcttgctggccaaatcagggacatgccggcattagcgggatgagtgggtgttccggcagggatgtggtcattgacggccagtgagggcgagagtaccacggcccacttcttccttggagctggagatgaggggctgggcacccgtggaataggcatgaggccagaagagagtgacagcgagctccttgaggatgaggaggatgaagtgcctcctgaacctcagatcattgttggcatctgtgccatgaccaagaaatccaagtccaagccaatgactcaaatcctagagcgactctgcagatttgactacctgactgttgtcattctgggagaagatgtaatccttaatgaacctgtggaaaactggccatcctgccactgcctcatctctttccactccaaag

SEQ ID NO: 293739 - DNA, 268 bp, Artificial Sequence
  derived and/or modified sequence
cggctgcgcgagcggagggaggcggagcgggatgagtgggtgttccggcagggatgtggtcattgacggccagtgagggcgagagtaccacggcccacttcttccttggagctggagatgaggggctgggcacccgtggaataggcatgaggccagaagagagtgacagcgagctccttgaggatgaggaggatgaagtgcctcctgaacctcagatcattgttggcatctgtgccatgaccaagaaatccaagtccaagccaatgac

SEQ ID NO: 293740 - DNA, 796 bp, Artificial Sequence
  derived and/or modified sequence
ggcggtgggggagtggctggggctgggggcggtatcggaccgggtgggcgcggtagagtgggcttggtgggttcccagggctggggttcgttccgggtgggctccgctttgggaagaggcccagcggaggggccttagtgtcagcgtagggagagtgaggcggcgaaggcgggggcgggcaaaggctagtggagtcgggatgcgagggcggtattcgtgacccggagctgtgcgaggagagtaccgaggagggggtcggcgggagaggagataggactcaagagtagccttcctcgaggacctgcctttcccatttgctgcctgaagttaatgtttcttgctggccaaatcagggacatgccggcattagcgggatgagtgggtgttccggcagggatgtggtcattgacggccagtgagggcgagagtaccacggcccacttcttccttggagctggagatgaggggctgggcacccgtggaataggcatgaggccagaagagagtgacagcgagctccttgaggatgaggaggatgaagtgcctcctgaacctcagatcattgttggcatctgtgccatgaccaagaaatccaagtccaagccaatgactcaaatcctagagcgactctgcagatttgactacctgactgttgtcattctgggagaagatgtaatccttaatgaacctgtggaaaactggccatcctgccactgcctcatctctttccactccaaaggctttcctctggacaaagctgttgcttactccaagcttcgaaacccctttcttatca

SEQ ID NO: 293741 - DNA, 1497 bp, Artificial Sequence
  derived and/or modified sequence
atgcagagccccccccacctggccgtgtgcagaagcaacaagagcccctgggtgtgcctgacctgcagcagcgtgcactgcggcagatacgtgaacggccacgccaagaagcactacgaggacgcccaggtgcccctgaccaaccacaagaagagcgagaagcaggacaaggtgcagcacaccgtgtgcatggactgcagcagctacagcacctactgctacagatgcgacgacttcgtggtgaacgacaccaagctgggcctggtgcagaaggtgagagagcacctgcagaacctggagaacagcgccttcaccgccgacagacacaagaagagaaagctgctggagaacagcaccctgaacagcaagctgctgaaggtgaacggcagcaccaccgccatctgcgccaccggcctgagaaacctgggcaacacctgcttcatgaacgccatcctgcagagcctgagcaacatcgagcagttctgctgctacttcaaggagctgcccgccgtggagctgagaaacggcaagaccgccggcagaagaacctaccacaccagaagccagggcgacaacaacgtgagcctggtggaggagttcagaaagaccctgtgcgccctgtggcagggcagccagaccgccttcagccccgagagcctgttctacgtggtgtggaagatcatgcccaacttcagaggctaccagcagcaggacgcccacgagttcatgagatacctgctggaccacctgcacctggagctgcagggcggcttcaacggcgtgagcagaagcgccatcctgcaggagaacagcaccctgagcgccagcaacaagtgctgcatcaacggcgccagcaccgtggtgaccgccatcttcggcggcatcctgcagaacgaggtgaactgcctgatctgcggcaccgagagcagaaagttcgaccccttcctggacctgagcctggacatccccagccagttcagaagcaagagaagcaagaaccaggagaacggccccgtgtgcagcctgagagactgcctgagaagcttcaccgacctggaggagctggacgagaccgagctgtacatgtgccacaagtgcaagaagaagcagaagagcaccaagaagttctggatccagaagctgcccaaggtgctgtgcctgcacctgaagagattccactggaccgcctacctgagaaacaaggtggacacctacgtggagttccccctgagaggcctggacatgaagtgctacctgctggagcccgagaacagcggccccgagagctgcctgtacgacctggccgccgtggtggtgcaccacggcagcggcgtgggcagcggccactacaccgcctacgccacccacgagggcagatggttccacttcaacgacagcaccgtgaccctgaccgacgaggagaccgtggtgaaggccaaggcctacatcctgttctacgtggagcaccaggccaaggccggcagcgacaagctgtag

SEQ ID NO: 293742 - DNA, 1497 bp, Artificial Sequence
  derived and/or modified sequence
atgcagtcacccccccacctggctgtgtgtcgaagtaacaaatctccgtgggtttgccttacgtgcagctctgtacattgtgggagatatgtgaatggccacgcaaaaaaacactatgaggacgcacaagttcctttgaccaaccacaaaaagtccgaaaagcaggacaaggtgcagcacaccgtctgtatggattgctcttcctattctacgtactgctatcgttgtgatgacttcgtggtgaatgacactaagctcgggctggtgcagaaagttcgcgaacatctccagaatctggaaaattcagccttcacagcagatcgccacaagaagagaaaactgctggaaaactccacactaaacagcaagctgctaaaagtgaacggtagcaccacggcaatctgcgctaccggtctgagaaatctgggcaatacttgctttatgaacgcaatactgcagtctctaagcaacattgagcagttctgttgttattttaaggaactgcccgctgtggaactacggaacggcaagactgccggaaggcggacatatcacacccgcagccagggcgataataacgtctcccttgtcgaagagttccgcaaaacgctgtgtgctttgtggcaaggatcacagacggctttctctcctgagtctctgttttatgtcgtgtggaaaattatgcctaatttccgagggtatcagcagcaagatgcccacgagtttatgagatacctgctagatcacctccacctggaactgcagggcggattcaatggggtgtccaggagcgccatacttcaggagaactcgaccctctccgcctccaacaagtgctgcattaatggcgcaagcaccgtagtgaccgcgatattcggagggatcttgcagaacgaggtcaactgcctcatctgcggtactgagtccaggaaatttgacccctttctcgacttgtcccttgacattccctcacagttccgttcaaagagatctaaaaaccaggagaacggacctgtctgctccctgcgagactgcctgaggagtttcacagatttggaggagctggacgaaacagagttatacatgtgccataagtgcaagaagaagcagaagagcactaagaaattctggattcagaagttaccaaaggttctgtgccttcatttgaaacgctttcactggactgcatatctgcggaacaaggtcgacacctacgtcgagttcccccttagagggctcgacatgaaatgttatctgctggaacccgagaattctggccctgagtcatgcctgtacgacttagctgcagtggttgtgcaccacgggagcggcgtcggatcaggccattacacagcctacgctacccacgagggaagatggtttcattttaatgatagtaccgtcacgctcactgatgaggagacagttgtcaaggccaaggcatacatattgttctacgtagagcaccaggctaaggctggcagtgataaactttag

SEQ ID NO: 293743 - DNA, 1497 bp, Artificial Sequence
  derived and/or modified sequence
atgcagagccccccccacctggccgtgtgccgcagcaacaagagcccctgggtgtgcctgacctgcagctctgtgcactgcggccgctacgtgaatggccacgccaagaagcactatgaagatgcccaggtgcccctgaccaaccacaagaagtctgagaagcaggacaaggtgcagcacacagtgtgcatggactgcagcagctacagcacctactgctaccgctgtgatgactttgtggtgaatgacaccaagctgggcctggtgcagaaggtgcgggagcacctgcagaacctggagaacagcgccttcaccgctgacagacacaagaagaggaagctgctggagaacagcaccctgaacagcaagctgctgaaggtgaatggcagcaccacagccatctgtgccaccggcctgaggaacctgggcaacacctgcttcatgaatgccatcctgcagagcctgagcaacatcgagcagttctgctgctacttcaaggagctgcctgctgtggagctgagaaatggcaagacagctggaagaaggacctaccacaccaggagccagggcgacaacaacgtgtccctggtggaggagttcaggaagaccctgtgtgccctgtggcagggcagccagacagccttcagccctgagagcctcttctacgtggtgtggaagatcatgcccaacttccggggctaccagcagcaggatgcccacgagttcatgagatacctgctggaccacctgcacctggagctgcagggcggcttcaatggagtgagccgcagcgccatcctgcaggagaacagcaccctgagcgccagcaacaagtgctgcatcaacggggccagcacagtggtgacagccatctttggaggcatcctgcagaatgaggtgaactgcctgatctgtggcacagagagcaggaagtttgaccccttcctggacctgagcctggacatccccagccagttccgcagcaagaggagcaagaaccaggagaatggacctgtgtgcagcctgcgggactgcctgcggagcttcacagacctggaggagctggatgaaacagagctgtacatgtgccacaagtgcaagaagaagcagaagagcaccaagaagttctggatccagaagctgcccaaggtgctgtgcctgcacctgaagcgcttccactggacagcctacctgaggaacaaggtggacacctacgtggagttccccctgcggggcctggacatgaagtgctacctgctggagccagaaaattctggccctgagagctgcctgtatgacctggccgctgtggtggtgcaccacggcagcggcgtgggcagcggccactacacagcctatgccacccatgagggccgctggttccacttcaatgacagcacagtgaccctgacagatgaggagaccgtggtgaaggccaaggcctacatcctcttctacgtggagcaccaggccaaggccggcagtgacaagctgtag

SEQ ID NO: 293744 - DNA, 1497 bp, Artificial Sequence
  derived and/or modified sequence
atgcagagccccccccacctggccgtgtgccggagcaacaagagcccatgggtatgtttgacatgttccagcgttcactgcggaagatacgtgaatggccatgccaagaaacactacgaggatgcgcaggttcctctcaccaatcacaagaagtcggaaaagcaggacaaagtacagcacacagtatgcatggactgctcaagctactctacctattgctaccgctgcgacgatttcgttgtcaatgacacaaagctaggcctcgtgcagaaggttcgcgaacacttgcaaaacttagaaaactccgcatttacagcagatagacacaaaaaacgtaagctcctggaaaatagcacattgaacagtaagttactcaaggtgaatggctcaaccaccgcgatttgcgccaccgggctccgcaacctaggaaacacctgcttcatgaacgcaattctccagtctctctctaatatcgaacaattttgttgctacttcaaggaattgccagctgtagaactacgcaatgggaaaaccgcaggaagacgaacataccataccagatcgcagggcgacaataacgtgagtttggtcgaggagttccggaagaccctctgcgctttgtggcagggcagccagacagccttctcccccgagtccttgttctatgttgtctggaaaataatgcccaactttaggggctaccagcaacaggatgctcacgaattcatgcgatatctattagatcacctgcatctggagttgcagggaggatttaatggggtgagtcgctctgccatattacaggaaaactcgacactttctgcctcgaacaagtgttgtataaacggagcatcgacagtggtcaccgccatttttggtggaatccttcagaatgaggtgaactgtcttatttgcgggactgaatctcgcaagttcgacccctttctggatctgtctctagacattccatcacagttcaggtcaaaacgttccaagaatcaggagaatggccccgtctgctccctgcgcgactgtctgcgatccttcaccgacttggaagaactcgatgaaacagagttgtacatgtgtcacaaatgcaagaaaaaacagaagtcaacaaagaagttttggatacagaaactgccaaaggtgctctgtctccacctgaaaaggtttcactggacagcatacctgcggaacaaggtggatacctacgtagagtttcctctgcgcggactggacatgaagtgttacctattagaaccagaaaattctgggccggagagctgcctgtacgacctcgccgccgttgttgtgcaccatggtagtggggtggggtccgggcactataccgcgtatgccacacacgaaggtcgctggttccatttcaatgacagcacggtgacgctgactgacgaggaaactgtcgtcaaagctaaggcatatattctattctacgtggagcaccaagccaaagcagggtcggacaaattgtag

SEQ ID NO: 293745 - DNA, 1497 bp, Artificial Sequence
  derived and/or modified sequence
atgcaaagccccccacacctggccgtatgtcgctccaataaatcaccctgggtctgcttaacctgtagctccgtgcattgtggcagatacgttaatggacatgccaagaagcactacgaggacgcacaggtgcccctcacaaatcacaaaaagagcgaaaaacaggacaaagtgcaacataccgtttgcatggattgttcttcctacagcacgtattgctatcgatgtgacgatttcgtggtgaatgatactaaattgggcctggtgcagaaggttagagagcatcttcaaaacctcgaaaatagcgccttcaccgccgatcggcacaagaagcgaaaactactggagaacagtacgctcaactcaaaactgttaaaggtgaacggtagtactacagccatatgcgccacgggacttcgcaatctcgggaatacatgctttatgaatgccattctgcagtctctatctaacattgagcagttctgctgttacttcaaagagctcccggctgtagaactgaggaatggcaaaacagcgggaaggcgaacctaccataccagatctcaaggggacaataacgtctctctggtagaagagttccgcaaaacgctttgtgcactctggcagggcagtcaaacagctttcagtcccgagtctctgttttatgtggtgtggaagattatgccaaattttcgcggttaccaacaacaggatgctcacgaatttatgcgatatctgttagaccatttgcacctggaactccaggggggttttaatggagtttcaagatccgcgatccttcaggagaatagtaccttgtccgccagtaataaatgctgtattaacggtgcgtcgactgtggtcaccgctatatttggtggaattctgcagaatgaggtcaactgccttatctgcgggaccgagtcaaggaagttcgatcccttccttgatttgtcactagatatcccgtcccagtttcgcagcaagaggtccaagaatcaggaaaatggtcctgtttgctcccttagggattgcctgcggagtttcacggatttggaggagctggatgagaccgagctgtacatgtgtcacaagtgtaagaaaaaacagaagtcaaccaaaaagttctggattcagaagctgccaaaagtactgtgcctgcaccttaagaggttccactggacagcctatctgaggaacaaggtcgacacctacgtcgagttcccacttagaggactggatatgaagtgctaccttttagagccggagaactctgggccagagagctgtttatatgatttggcagctgtcgttgtccatcacggaagcggggtgggaagcggacattacacagcttatgccacccacgaggggagatggttccactttaatgacagcacagtgactctgaccgatgaggagacagtcgtgaaggcaaaggcctatattctgttctatgtggagcatcaagcaaaagcaggcagtgacaaattatag

SEQ ID NO: 293746 - protein, 962 aa, Artificial Sequence
  derived and/or modified sequence
MDTRPKVSSLLNRMANYTNLTQGAKEHEEAENITEGKKKPTKTMLTAISMSAIATNGVVPAGGSYFMISRALGPEFGGAVGLCFYLGTTFAAAMYILGAIEIFLVYIVPRAAIFHSDDALKESAAMLNNMRVYGTAFLVLMVLVVFIGVRYVNKFASLFLACVIVSILAIYAGAIKSSFAPPHFPVCMLGNRTLSSRHIDVCSKTKEINNMTVPSKLWGFFCNSSQFFNATCDEYFVHNNVTSIQGIPGLASGIITENLWSNYLPKGEIIEKPSAKSSDVLGSLNHEYVLVDITTSFTLLVGIFFPSVTGIMAGSNRSGDLKDAQKSIPIGTILAILTTSFVYLSNVVLFGACIEGVVLRDKFGDAVKGNLVVGTLSWPSPWVIVIGSFFSTCGAGLQSLTGAPRLLQAIAKDNIIPFLRVFGHSKANGEPTWALLLTAAIAELGILIASLDLVAPILSMFFLMCYLFVNLACALQTLLRTPNWRPRFRYYHWALSFMGMSICLALMFISSWYYAIVAMVIAGMIYKYIEYQGAEKEWGDGIRGLSLSAARFALLRLEEGPPHTKNWRPQLLVLLKLDEDLHVKHPRLLTFASQLKAGKGLTIVGSVIVGNFLENYGEALAAEQTIKHLMEAEKVKGFCQLVVAAKLREGISHLIQSCGLGGMKHNTVVMGWPNGWRQSEDARAWKTFIGTVRVTTAAHLALLVAKNISFFPSNVEQFSEGNIDVWWIVHDGGMLMLLPFLLKQHKVWRKCSIRIFTVAQLEDNSIQMKKDLATFLYHLRIEAEVEVVEMHDSDISAYTYERTLMMEQRSQMLRHMRLSKTERDREAQLVKDRNSMLRLTSIGSDEDEETETYQEKVHMTWTKDKYMASRGQKAKSMEGFQDLLNMRPDQSNVRRMHTAVKLNEVIVNKSHEAKLVLLNMPGPPRNPEGDENYMEFLEVLTEGLERVLLVRGGGSEVITIYS

SEQ ID NO: 293747 - DNA, 2889 bp, Artificial Sequence
  derived and/or modified sequence
atggatacgcggccgaaagtgtcgtcgctcctaaatcgtatggctaactacaccaacctcacacagggggccaaagaacacgaggaggcggaaaatattaccgaaggaaagaaaaagccaaccaaaacaatgctcacagctatttccatgtccgccatagccaccaacggtgttgtgccagccggaggcagctactttatgatttcgcgtgcactcggcccagagttcggcggcgccgtggggctgtgcttctacctcgggactacattcgcagctgccatgtacatcctgggcgcaatcgagattttccttgtttacattgtgccccgcgccgccattttccatagtgatgacgcccttaaagagagcgcggcgatgctaaacaatatgagagtgtacgggacggccttcttagtgctgatggttctggttgtcttcatcggcgttaggtatgtaaacaaattcgcaagtctgtttttagcatgtgttattgtgtccatcctggctatctatgccggagccatcaagtcatccttcgcccctccccattttcctgtgtgcatgctcggaaatcggactctctcgagtcgacatattgacgtgtgctctaagactaaggagattaacaacatgacggttcccagcaaactatggggattcttctgtaattctagtcagtttttcaatgcaacctgtgatgaatacttcgtgcacaataatgtgacttcaattcaaggcatcccaggcctggccagtggcatcataacagaaaacctctggtcaaactacctccccaagggagagattattgagaagccaagcgccaaatcttcggacgtgctgggaagcctaaaccatgaatatgtgctggttgatattaccaccagtttcacactgctcgtggggatcttcttcccttctgtaacgggtataatggcagggtccaatcggtccggcgatttaaaggatgcccaaaagtctattcccatcgggaccatattggctatccttacaaccagctttgtttacctgtccaatgtggttttgtttggtgcctgcattgaaggcgttgtactgagagataagttcggagatgctgttaaagggaacttggtggtgggaaccctttcttggcccagtccatgggtgattgtgatcggctcctttttcagtacctgcggcgctggtctgcagagcctgactggggcccctaggttgctgcaagctatcgccaaagacaatatcattccattccttcgagtgttcggtcatagtaaggccaatggtgaacccacctgggctctcctgcttaccgcagctatagccgaactgggcatcctgattgcgagcctcgacctagtggcacctatcttgtctatgttcttcctgatgtgttatctattcgtgaacctggcgtgcgccctccaaacactcctccggacaccaaattggagaccccggttccggtattaccactgggccctaagttttatgggtatgagcatctgcctggccctcatgttcataagttcctggtactacgcaatcgtagcgatggtgattgctgggatgatctacaaatatattgaataccagggggccgagaaagagtggggcgatggtatcagagggctgtcgctgtcggccgctcgcttcgccttacttcggctcgaggaaggcccccctcatactaagaactggaggccacagctgctggtcctgctgaaactagatgaagacctccatgtgaaacacccgaggctcctcacattcgccagccagctgaaggctggcaaaggcctgactattgtgggatccgttattgtgggcaatttccttgaaaattacggggaagcattggcagcagaacagaccatcaagcacctgatggaagctgagaaggtgaaaggattttgtcaactggtggtggcggctaagctgagagagggcatctcacacctgatccagagctgcgggctaggcggcatgaaacataacaccgttgtcatgggctggcccaatggctggagacagagcgaagacgcaagggcctggaagaccttcatcggcacggtgcgcgtgacaaccgccgcccacttggccctcctagtggcgaaaaatatctctttcttcccctctaacgtggagcagttctccgaggggaacattgacgtgtggtggatagtgcacgacggggggatgctcatgctgcttccattcctgctgaaacagcacaaggtctggagaaagtgcagcattagaatttttaccgttgcacagcttgaggataacagtattcagatgaagaaggatctcgcgacatttttgtaccaccttcggatcgaagccgaagtcgaggtcgttgagatgcacgacagcgatatatccgcatacacatacgagaggaccctcatgatggaacagaggtcccagatgctgcgccacatgcgtctgtctaagaccgagcgagatagagaggcacaactggtgaaagatcggaacagcatgctgagacttacgtcaatcggctctgatgaagatgaggagacagaaacctaccaggagaaggtacacatgacttggaccaaggataagtatatggcaagccgaggccaaaaggcaaaatctatggagggattccaggacctgcttaatatgcggcctgaccaatcgaatgttaggcggatgcatacagcagtgaaactgaatgaggtgatcgtgaataaaagtcatgaagccaagttggttttgctcaatatgccaggccctccccggaatcctgagggcgacgaaaattatatggagtttctggaagtcctgaccgaaggtctggagagggtattgctggtgaggggcggaggatcggaggtgattacgatatacagttag

SEQ ID NO: 293748 - DNA, 2889 bp, Artificial Sequence
  derived and/or modified sequence
atggacaccaggcctaaggtctcaagtctgttgaacagaatggccaactataccaacctcacacagggtgctaaagagcatgaggaggccgaaaacatcaccgaaggcaagaaaaaacccactaaaacgatgctcactgctattagcatgagcgccatcgctacaaatggggtggtgcctgcaggagggagctacttcatgattagccgcgccctggggccggaattcggtggtgccgtgggcttgtgtttttacctcggcacaacatttgctgcggctatgtatattttgggagccatcgagattttcttagtttacatcgtaccccgcgctgccatcttccactccgacgatgctctgaaagaatctgccgctatgctgaataacatgcgcgtctatggcactgcctttctggtgctgatggttctcgtggtcttcattggcgtacgttacgtgaacaagtttgcctcactttttctggcttgcgtcatcgtgtcgatcctggccatctatgctggcgccatcaagagcagctttgccccgccacatttccctgtgtgtatgctgggcaaccgcaccctgtcatcgagacacatagatgtgtgctcaaaaactaaggaaatcaacaatatgactgtgcctagtaaactgtgggggttcttttgcaactccagccaattctttaacgctacttgcgacgagtactttgtgcataacaatgtgacctctatacagggcatacctggtctggcatcggggatcattaccgagaacctgtggagcaattacttgccaaagggtgaaataatagaaaaaccgagcgctaaaagcagcgacgtcttgggctccttaaaccacgagtacgtcttggtggatattactacctcttttacgctactagtcggcatttttttcccatcggtgacaggtatcatggctggctcaaaccggagtggtgatctcaaggacgcgcagaaatcaatccctatcggtaccattctcgccattttgactacctcattcgtatacctatcaaacgtcgtgctgttcggagcttgtatagaaggggttgtactgagagataaattcggcgacgcggtcaagggcaacctagttgtgggcacattatcatggcccagcccatgggtgattgttataggtagctttttcagcacgtgcggcgccggattacagtcactgactggagcacctaggctgcttcaggcaatagctaaagacaatattatcccattcttacgcgtctttggtcacagtaaagcgaacggggaacctacttgggcactgctcctcaccgccgccattgcagagctcggaatcctgatagcttccctggatctggtggctcctatcctgagtatgttcttccttatgtgctatttgttcgtcaatttggcctgtgcactgcagacactccttagaacgcccaattggcggccacgctttcggtactaccactgggccttgtcttttatgggtatgagcatctgtctggcgctgatgttcatatcctcctggtattacgcaatcgtcgctatggtcattgctggcatgatttataaatatatagagtatcaaggcgcggaaaaagaatggggagacggcattagaggcctctcactatctgctgctcgattcgcacttctgaggttggaagaggggccaccgcataccaagaactggaggcctcagcttctggtcctgctcaaactggatgaggatctgcacgtgaagcacccaagactcttgacatttgcttcacagctcaaggctggaaaaggcctgaccattgtgggctcagtcatagtgggcaacttcctggaaaactatggagaagctctggctgctgagcagactataaaacacctgatggaagccgagaaagtcaaagggttttgccaactggttgtggccgcaaaactccgggaagggattagccacttgatccagtcatgcggcttgggaggaatgaaacacaacactgtcgtcatgggctggcccaatggatggcgtcaatccgaggacgcccgcgcatggaagacattcattggaacagtacgcgtcactaccgccgcgcatcttgccctgctagtggccaagaatatctcattcttcccctccaatgttgaacagttctccgaggggaatatcgacgtgtggtggatagtgcatgatggaggcatgcttatgctgctgcccttcctgctgaaacagcataaggtctggcgcaaatgttctatccggatttttactgtggcccagcttgaagacaatagtattcagatgaaaaaagaccttgccaccttcctatatcacctgcgtatcgaagctgaagtggaggtcgtggagatgcacgattccgacatcagcgcctatacttacgagcggactctcatgatggagcagcgcagtcagatgctgcgccacatgagactgagcaaaactgagagggatcgggaagcgcagctagtgaaagaccggaactcaatgctccggctcacatccatcggctccgatgaagacgaggagaccgagacttaccaggaaaaggtccacatgacatggactaaggataagtacatggctagcagagggcaaaaagctaagagcatggaggggttccaggacctgctgaacatgagacctgatcagtcaaacgtccgacgaatgcacaccgccgttaagctcaacgaagtcatcgtcaacaagtctcacgaggcaaaactggtcctgctgaatatgccggggccaccgaggaatcctgaaggagacgagaattacatggaattccttgaagtcctaaccgaaggtcttgagagggtgttgcttgtgaggggtgggggcagcgaggtgatcacgatttattcatag

SEQ ID NO: 293749 - DNA, 2889 bp, Artificial Sequence
  derived and/or modified sequence
atggacacccggcccaaggtgagcagcctgctgaacaggatggccaactacaccaacctgacccagggcgccaaggagcacgaggaggccgagaacatcacagagggcaagaagaagcccaccaagaccatgctgacagccatctccatgtctgccatcgccaccaacggggtggtgcctgctgggggcagctacttcatgatcagccgggccctgggccctgagtttggaggagctgtgggcctgtgcttctacctgggcaccacctttgctgctgccatgtacatcctgggcgccatcgagatcttcctggtgtacatcgtgcccagggctgccatcttccacagtgatgatgccctgaaggagagcgctgccatgctgaacaacatgagggtgtatggaacagccttcctggtgctgatggtgctggtggtgttcatcggcgtgcgctacgtgaacaagtttgccagcctcttcctggcctgcgtcatcgtgtccatcctggccatctatgctggggccatcaagagcagctttgccccaccccacttccctgtgtgcatgctgggcaacagaaccctgagcagccgccacattgatgtgtgcagcaagaccaaggagatcaacaacatgacagtgcccagcaagctgtggggcttcttctgcaacagcagccagttcttcaatgccacctgtgatgagtactttgtgcacaacaacgtgaccagcatccagggcatccctggcctggccagcggcatcatcacagagaacctgtggagcaactacctgcccaagggggagatcatcgagaagcccagcgccaagagcagtgatgtgctgggcagcctgaaccacgagtatgtgctggtggacatcaccaccagcttcaccctgctggtgggcatcttcttccccagcgtgacaggcatcatggccggcagcaacagaagtggggacctgaaggatgcccagaagagcatccccatcggcaccatcctggccatcctgaccaccagctttgtgtacctgagcaatgtggtgctgtttggagcctgcatcgagggcgtggtgctgcgggacaagtttggagatgctgtgaagggcaacctggtggtgggcaccctgtcctggcccagcccctgggtgattgtcatcggcagcttcttcagcacctgtggggccggcctgcagagcctgactggagccccccggctgctgcaggccatcgccaaggacaacatcatccccttcctgcgggtgtttggccacagcaaggccaacggggagcccacctgggccctgctgctgacagctgccatcgccgagctgggcatcctgattgccagcctggacctggtggcccccatcctgtccatgttcttcctgatgtgctacctgtttgtgaacctggcctgtgccctgcagaccctgctgcggacccccaactggaggccccgcttccgctactaccactgggccctgtccttcatgggcatgagcatctgcctggccctgatgttcatcagctcctggtactatgccatcgtggccatggtgattgctggcatgatctacaagtacatcgagtaccagggcgctgagaaggagtggggagatggcatccggggcctgagcctgtctgctgccaggtttgccctgctgcggctggaggagggccccccccacaccaagaactggaggccccagctgctggtgctgctgaagctggatgaggacctgcacgtgaagcacccccggctgctgacctttgccagccagctgaaggccggcaagggcctgaccatcgtgggcagcgtcatcgtgggcaacttcctggagaactacggggaggccctggccgctgagcagaccatcaagcacctgatggaggccgagaaggtgaagggcttctgccagctggtggtggccgccaagctgcgggagggcatcagccacctgatccagagctgtggcctgggcggcatgaagcacaacacagtggtgatgggctggcccaacggctggaggcagagtgaagatgcccgggcctggaagaccttcatcggcaccgtgcgggtgaccacagctgcccacctggccctgctggtggccaagaacatctccttcttccccagcaatgtggagcagttcagcgagggcaacattgatgtgtggtggatcgtgcatgatggcggcatgctgatgctgctgcccttcctgctgaagcagcacaaggtgtggaggaagtgcagcatccgcatcttcaccgtggcccagctggaggacaacagcatccagatgaagaaggacctggccaccttcctgtaccacctgagaattgaagctgaggtggaggtggtggagatgcatgacagcgacatcagcgcctacacctatgaaagaaccctgatgatggagcagaggagccagatgctgcggcacatgaggctgagcaagacagagcgggaccgggaggcccagctggtgaaggacagaaattccatgctgcggctgaccagcatcggcagtgatgaagatgaggagacagagacctaccaggagaaggtgcacatgacctggaccaaggacaagtacatggccagccggggccagaaggccaagtccatggagggcttccaggacctgctgaacatgaggccagaccagagcaatgtgcggaggatgcacacagctgtgaagctgaatgaagtcatcgtgaacaagagccatgaggccaagctggtgctgctgaacatgcctggccccccaagaaatccagaaggagatgagaactacatggagttcctggaggtgctgacagagggcctggagcgggtgctgctggtgcggggcggcggcagcgaggtgatcaccatctacagctag

SEQ ID NO: 293750 - DNA, 2889 bp, Artificial Sequence
  derived and/or modified sequence
atggacacccggcccaaggtgagcagcctgctgaaccggatggccaactacactaatctgactcagggggccaaggaacacgaggaggccgagaatataaccgaaggcaaaaagaagccaaccaagaccatgctcactgccatcagcatgtctgctatcgctacaaatggagttgttcccgcggggggaagctatttcatgattagtagagctctgggacccgaattcggtggagcagtgggactgtgtttctatcttggaactaccttcgcggccgcaatgtacattctgggggctatcgaaatctttctggtgtacattgtgccccgtgccgcaatctttcattcagatgacgccctgaaagagtccgctgctatgctgaacaacatgagagtttacgggaccgctttcctcgtattgatggtgctagtcgtgttcataggagtgagatacgtgaataagttcgcatcactgttcttggcatgcgtgattgtgtcgattctggcaatctatgccggcgcgattaagagcagtttcgccccacctcatttccccgtgtgcatgctggggaaccggaccctcagcagtaggcacatcgacgtatgctcaaaaactaaagaaattaacaacatgaccgttccttcaaagctgtggggttttttttgtaattcttctcagttcttcaacgccacatgtgatgaatacttcgtacataataatgtgactagtattcagggcattccaggcctcgcgtccggaatcataactgaaaatttatggagcaactacttgcccaagggggaaatcatcgaaaaaccttcagccaagtcttccgacgtactgggatccctcaaccatgaatacgtgttagtggatatcaccacatcctttacccttcttgtaggcatattcttccctagcgtgactggaattatggctggatctaataggtccggagatctgaaggacgcccaaaagagcatcccgatcggcacaatcttggccattctgaccaccagcttcgtctacctctccaatgtggttctctttggagcctgcattgaaggagtggtccttcgggacaaattcggtgacgccgtgaagggcaacctcgtggtcggtacactgagttggccttcaccttgggtgatcgtaatagggtccttcttcagcacctgcggcgcggggttacagtctctgaccggagcaccgcgcctcctgcaggctatcgccaaggataacattatcccgttcctgagggtattcggccattcgaaagctaacggcgagccgacatgggccctgctgctgacagccgcgattgccgagctgggcatcctcattgcaagtctggacctggttgctccaattctgagcatgttcttcctgatgtgctacctgttcgttaacttggcatgtgccctccagacattgttacgcactcccaattggagaccacgtttccgatactatcattgggcactgagcttcatgggcatgtctatttgtctagcattaatgttcatcagcagctggtactacgccatcgttgcaatggtcattgccggtatgatttacaagtatatcgaatatcaaggagctgaaaaggaatggggagatggcattaggggcctgagcctctctgccgccagatttgctttacttagattggaggaggggcctccgcatacaaaaaattggaggccgcaactccttgttctcctgaagctggatgaagacctccacgtcaagcatccccggttactgacgtttgccagccagctgaaggctggaaagggcctgactatcgtgggtagcgtcatagtaggtaacttccttgaaaattatggggaggcactagcggcggaacaaacaatcaagcatctgatggaggcagagaaggtgaaaggcttttgccagttggtggttgccgcaaaactgcgcgagggcatttcacatctgattcaatcttgcgggcttggcgggatgaaacacaatacagtggtgatgggatggcccaacggctggagacaaagcgaggacgccagagcttggaagacattcataggcacagtgcgcgtgaccaccgctgctcatctcgcactgctcgtcgccaagaatatctcctttttcccatcaaatgtggaacagtttagcgagggcaatattgatgtgtggtggatcgttcatgacggagggatgctcatgctgctgccatttctgctgaagcagcacaaagtgtggcgtaaatgctctattaggatctttaccgtggcccagctcgaggataatagcattcagatgaaaaaagatctagccactttcctttatcatctgcgcatcgaagccgaggtcgaggtagttgagatgcacgactctgacatcagcgcttatacttacgaacgcaccctgatgatggaacagcgatcccagatgctgaggcacatgcgcctcagtaagacagagcgtgatcgagaggcccagcttgtgaaagaccgcaattctatgcttaggttgacatcaattggtagcgacgaagatgaggagaccgagacatatcaggaaaaagttcacatgacatggaccaaagacaagtacatggcgagtcgaggacagaaagctaagagcatggagggattccaagaccttctgaatatgcgcccagaccaatcaaatgtgagacgcatgcacacggctgttaaactgaacgaggtcatcgttaacaagtctcacgaggccaaactggtactcctgaacatgccgggaccgcctaggaaccccgagggggacgagaactatatggaattcctggaggtgttgactgaaggactggagcgcgttttgctcgtgagggggggtggctccgaggtgataacaatatactcttag

SEQ ID NO: 293751 - DNA, 2889 bp, Artificial Sequence
  derived and/or modified sequence
atggacacccggcccaaggtgagcagcctgctgaaccggatggccaattacactaatcttacacagggcgccaaggagcatgaggaggctgagaatatcaccgagggaaagaaaaaaccaactaagacgatgcttaccgcaattagcatgagcgccattgcgaccaatggggttgtgccagccggcggttcttactttatgatttcccgggcccttggcccagagtttgggggtgcagttggtctctgtttctacctggggaccacttttgcagctgctatgtatattctgggcgcgattgaaattttcttagtgtacatcgtacctagagcagccatcttccactctgatgatgctctgaaggaatcagcagccatgttaaacaacatgagggtgtatggtacagcctttctggttctaatggttctcgtggtgttcatcggggtgcgatatgtgaacaaattcgcatctcttttcttagcatgcgtgatagtgagtatcctcgctatttacgcaggtgccataaaaagctcctttgctcctccccatttccccgtgtgtatgctggggaatcggaccttaagctcccgccacatcgatgtgtgctcaaaaacaaaagagatcaataatatgaccgtgccctccaaattgtggggatttttttgtaactccagccaattcttcaacgctacatgtgacgaatactttgtacataacaacgtgacatcaatccaaggaatccctggactcgcatccgggatcatcacagaaaacctctggtccaactatcttccaaagggcgagattatcgaaaagccttctgcaaagtcatccgacgtgttgggctccctgaatcatgagtacgtgctcgtggatattacgacttccttcacactgctggtgggtatattttttcctagcgttactggaattatggcgggatcgaacagaagcggtgatctgaaggatgctcagaaaagcattcccatagggaccattctggccatccttaccaccagtttcgtgtacctctctaacgtcgtgctgttcggcgcctgtatagaaggtgtcgtcttacgagacaagtttggcgatgcagtcaagggcaaccttgtagtgggtactttaagctggcccagtccctgggtcattgtcatcggatctttcttctctacctgcggcgccgggctgcagtcactcaccggagctcccaggctgctacaggcaatcgccaaggacaatattatcccatttctccgggtctttggacactccaaagcaaatggcgaaccaacgtgggcactgctcttgaccgcagctatcgccgagcttggcattctgatcgcttccctggacctcgtcgcacctattctgagcatgttcttccttatgtgctacctgtttgtgaacctggcctgcgcactgcaaacccttttaagaacaccaaactggcgccccagattccgatactatcactgggcccttagcttcatgggcatgagtatatgcctggcccttatgtttatttcttcttggtactacgccatcgtcgcaatggtgattgctggtatgatttacaaatacatagaatatcaaggggccgagaaggaatggggggacggtattagaggcctgagcctgtccgcggcccgattcgccctccttagactggaggagggcccgccgcacacaaagaattggaggccccagctccttgtgcttctcaagttggacgaagatctacacgtcaagcatcctcgccttctgacctttgcaagccagctcaaggccggaaaagggttgaccatagtgggctccgtgatcgtgggtaatttcttggagaactacggagaagcactggccgctgagcagacaattaagcaccttatggaagccgagaaggtaaagggtttttgtcagctggtcgtggcggcaaagctgagggaggggatttcccatctgatccagtcatgtggacttggtggtatgaagcataatacagtggtgatgggatggcctaatggatggcgtcagtccgaagacgctagagcctggaagacgttcatcggcaccgtgagagtcacaaccgctgcccatttagccctccttgtggccaaaaacatctcttttttcccttcgaacgtggaacagttttccgaggggaatatagacgtgtggtggatagttcacgacgggggcatgctgatgcttctgccatttcttttgaagcagcacaaagtttggaggaagtgctccatccggattttcactgtcgcacaattagaggataacagcatccagatgaaaaaagatttggcaactttcctgtatcatctgcggatcgaagccgaggttgaggtcgtcgaaatgcacgacagcgatatttccgcgtatacctatgaacgaaccctaatgatggagcagcgatcgcaaatgttgcgccacatgcgtctgagcaaaaccgaaagagacagagaagcacagttggtcaaggaccgcaattcaatgctccggctgacctctataggaagtgacgaggatgaggagacagaaacgtatcaagagaaggttcatatgacatggacaaaggacaaatacatggccagcagaggccagaaagccaagtcaatggagggcttccaagatctgctcaatatgcgacctgatcagagcaatgtgcggcgaatgcacacagctgtgaagctaaatgaggtcattgtaaataaatcccatgaggcaaagctggtgttattaaatatgcctggacccccacgcaatcccgaaggggacgaaaattacatggaattcctggaagtactgaccgagggtttagagcgtgtgctcctcgtgcgcggaggcggatcagaggtgataacaatttactcttag

SEQ ID NO: 293752 - DNA, 2889 bp, Artificial Sequence
  derived and/or modified sequence
atggacacacggccaaaagtgagttcgcttctgaacaggatggcgaattacaccaacctcacccagggcgcaaaagaacacgaagaagcagaaaacattacagagggtaagaagaagcctactaagacaatgttgacggctataagcatgagcgctatcgccaccaatggggtggtgcctgcaggaggcagttacttcatgatttcaagagccctgggaccggaattcggcggtgcagttggattgtgcttttacctaggaaccacatttgcagctgccatgtacattttgggggctatagaaatctttctggtctacatcgtgccaagggcagcaatattccactccgacgacgcccttaaggaaagcgccgcaatgttgaataatatgcgagtttacggcacagcgttcctggtcctcatggtgttggtggtgttcatcggtgttcgatatgttaataagtttgcatccctgtttctcgcatgtgtcattgtatctattctggcaatctatgcgggtgccatcaaatctagctttgcgccaccacacttcccggtctgcatgctggggaatagaactcttagttccaggcacattgacgtctgctctaaaacaaaagagattaataacatgacagtgccatcaaagctctggggattcttctgtaattcatcacagttcttcaatgctacttgtgatgagtattttgtgcataacaacgtaaccagtattcaagggataccaggactggctagcggcatcatcacagagaacctgtggtccaattacctgccaaagggagagatcatcgagaagcctagcgctaagtcatccgacgtccttggaagcctgaatcacgaatatgttcttgtggatattacaacgagtttcacccttcttgtggggattttctttcccagtgtgacaggtattatggccggttcaaacagatccggagacctcaaggacgcacaaaaatcgatacccatcggcactatattggccattttgacgacaagcttcgtttacctcagcaatgtagtgttgtttggcgcttgcatcgaaggagttgtgctccgcgataagtttggcgatgcggtgaaaggtaatttggttgtggggacccttagctggccatctccctgggtgatcgtgatcggtagcttcttttccacgtgcggggcaggtctgcagtccctcacaggagcccctagactgctgcaggccattgcgaaagataatattattccttttctcagggtgttcgggcacagcaaggccaacggggaaccaacatgggcgctgctgctgaccgccgcaatcgccgaactgggcattcttattgcaagcctggatctggttgccccaatactgtcgatgttctttctcatgtgctatctctttgttaatctagcatgcgccttacagacactactaagaactcctaactggcgtcctcggttcagatactaccattgggctctgtccttcatgggcatgtcaatctgcctagccctcatgttcatctcctcctggtactacgcaatcgttgctatggtaatcgccggtatgatctataaatacattgagtatcaaggtgcagagaaagagtggggcgatgggatcagggggctgtcccttagcgcagctagatttgccctgctgcgcttggaagagggccctccacatacaaaaaactggcgaccacagctcttggtcctcctgaagctggacgaagacttgcacgtgaagcatcctcgcctactcaccttcgcatctcaactcaaagcgggtaaaggtctcacgattgtggggagcgttatagtcgggaatttcctcgagaactacggggaagccctcgcagccgagcaaacaatcaagcatttaatggaagcagagaaggtcaaaggcttctgccaactggtggtggctgccaagttgagggaggggatatcccatctgattcagagctgcgggctcggtggaatgaagcataatacagtggtgatgggctggccaaacggatggcgccagagtgaggacgccagggcctggaaaacttttatcgggacggtacgcgtgactacagccgctcacctggctttgcttgtggccaagaacattagtttctttcccagcaatgtagagcagtttagcgagggtaacatcgacgtgtggtggattgtccacgacggcggaatgctgatgctcctcccctttctccttaaacagcacaaggtgtggaggaaatgctccatcaggatctttactgtggctcagttggaggataacagcattcagatgaaaaaagacctggcgacttttttgtatcatctccgaatcgaggcggaagtcgaagtagtggagatgcacgactccgacatctcggcctacacgtatgagagaacactgatgatggagcagcgctcccagatgttgagacacatgcgcctgtcgaagaccgagagggaccgagaggcgcagttagttaaagaccgtaactcaatgctgcggttgacaagtatcggctctgatgaggatgaggaaaccgagacataccaggagaaagtgcatatgacttggaccaaagacaaatacatggccagccgaggacagaaagcgaaaagcatggagggatttcaggacctgctcaacatgaggccagatcaatccaatgtgaggcgcatgcacactgcggttaagctcaacgaggtgatcgttaacaagtctcacgaggcaaagttagtcctgctcaatatgcctggaccgccacggaaccccgaaggggatgagaactacatggagttcctggaagttctaactgaggggctcgagcgagtactgctggtccggggtggcggatctgaggttattaccatctactcctag

SEQ ID NO: 293753 - DNA, 2889 bp, Artificial Sequence
  derived and/or modified sequence
atggatactcgacctaaggtatcctccctactgaacaggatggctaattataccaatctgacccaaggcgcaaaggagcacgaagaggccgaaaacattacagagggaaaaaagaagccgaccaaaaccatgttgactgcaatctcaatgagtgctatcgctacaaatggcgtcgtcccagcaggagggtcttactttatgatcagtcgcgctctgggaccagagtttggtggcgcagtcgggctgtgtttctacctgggcaccacgttcgcggcagctatgtatattttgggagccatagaaatatttctcgtctacatcgtcccaagagctgctattttccactccgatgacgccctgaaagaaagtgccgcaatgctgaacaacatgcgcgtgtatggaactgcatttctggtgcttatggtcttagtagtctttatcggagtgcgatatgttaacaagttcgctagcctgtttctggcttgtgtaatagtgtcaattctggctatctacgctggcgctattaagagcagtttcgctccaccccattttccagtttgcatgctggggaatcgcactctcagcagtcgccacatcgacgtctgcagcaaaaccaaagagattaataacatgacagtgccctctaagctctggggatttttctgcaattcttctcagttcttcaatgccacttgcgatgaatatttcgtacacaacaatgttacgtctattcaggggattcctggcctggccagtggcatcattactgaaaacttatggtctaattacttacccaagggagagataatagagaaaccctccgccaagtcctcagacgtccttggttcgctcaaccacgagtacgtattagttgatatcaccacatccttcaccctcctggtaggaattttcttcccaagtgtgacgggtatcatggcagggagcaaccggagcggtgacttgaaggatgctcagaagtcgatccccataggaactatcttagccatcctgactacgagctttgtgtatctttcgaatgtcgtcctcttcggagcgtgtatcgaaggtgtggtcctacgggacaaattcggcgacgcggtcaagggaaacctggtggtgggcacactcagttggccttcaccttgggttattgtcataggttcctttttcagcacctgcggcgctggactccagtccttgacaggagctcctcgactattgcaggctattgcgaaagacaatatcattccgtttcttcgggtgtttggtcatagtaaggccaatggtgagcctacttgggcactcctcctcacagctgccatagctgagctgggcatattaatcgccagcttagatttggttgctccaatcctcagtatgttctttcttatgtgctacctgttcgtcaacttagcctgcgcgcttcagaccctgctgaggactccaaactggcggcctagatttcgctattatcactgggctttgagcttcatgggcatgagcatttgcttggccctgatgtttatctcgagctggtattacgccattgtggctatggttatagcaggtatgatttataagtacatcgagtatcaaggtgctgagaaggagtggggagacggtatcagaggcctctccctgtcggcggctcggttcgcactgctgcgcttggaggagggccctccccataccaaaaactggagaccacagcttctggtcctgcttaagcttgacgaagatctacacgtgaagcatcccaggctgttgacgtttgcttcccagctcaaagccggaaagggtttgaccatagtgggctcagtaattgtagggaacttcctagagaactacggcgaggcgctagctgccgagcagactatcaagcacttgatggaggcggaaaaagtaaaaggcttctgccagctcgtcgttgccgctaagctcagggaagggattagccatctaatacaatcctgtggccttggaggaatgaagcacaacacggttgtgatgggttggcctaacggatggagacagagcgaagatgcaagagcctggaaaacctttatagggacagtgagagttactacagcggctcacctagctctgctagtggccaagaacatctcattctttcctagtaatgtagagcagttttcagaaggaaatatcgacgtttggtggatagtgcacgatggcggaatgctaatgctcctgccattcctgctcaaacagcataaggtgtggagaaagtgtagcatcaggatttttacagtggcacagcttgaagataattcaatccagatgaagaaggatctggcaacatttctgtatcatttacggatcgaggctgaggtcgaagtggtggagatgcacgattcagacatctccgcatacacttacgaaagaacgttgatgatggagcagagatctcagatgttgagacatatgcgacttagcaaaaccgaacgggacagagaggcccagttggtcaaagacaggaacagcatgctccggctcactagcatcggcagtgatgaggatgaagagaccgagacctaccaggaaaaggtgcatatgacctggactaaggacaagtacatggctagtcgtggacagaaagctaaatccatggaaggatttcaggacctgcttaatatgaggcccgaccagtccaatgttagaagaatgcacactgcggtgaagctgaacgaagtcattgtgaacaagtcacacgaagccaagctggtgctgctcaacatgcctggtccgcctagaaatcctgagggggacgagaattacatggaattcctcgaagtgttaacagagggtctggaacgggtgttgcttgtgaggggcggaggcagcgaggttattacgatctattcctag

SEQ ID NO: 293754 - DNA, 3660 bp, Artificial Sequence
  derived and/or modified sequence
tttcagacctgagtcagaactccatcacaggggaacacagccaactgttagacgacggacataagaaagctcgaaatgcttatctcaataattccaattatgaagaaggagatgaatattttgataaaaatttggcactctttgaggaagaaatggacaccagaccgaaggtgtcttccctcctcaaccgcatggccaattacactaatctgactcaaggagcaaaggaacatgaagaggcagaaaacatcactgaagggaaaaagaagcccaccaagacaatgttgactgctatctccatgagtgccattgccactaatggagtggtgccagctgggggctcatactttatgatttcccgggcactgggcccagagtttggtggggctgttggcctctgcttttatcttggtaccacatttgcagcagccatgtacatccttggtgccattgaaatctttctggtctatatcgtcccccgagctgccatctttcacagtgatgacgcactcaaggaatcagcagccatgctaaataacatgcgtgtctacggcacagctttcttggtccttatggtattagtggtatttatcggcgtacgctatgtgaacaagtttgcctcacttttcctggcctgtgtcattgtgtccatcttggccatctatgctggagccatcaagtcttcttttgctcctccacacttcccggtctgcatgctgggtaaccgcaccctttcatcaagacacattgacgtttgctctaagaccaaggaaattaacaacatgacagtcccatcaaagttatggggattcttctgtaactcgagtcaatttttcaatgccacctgtgatgaatactttgttcacaataacgtcacttcaatccagggcattcctggattggctagtggtataattacagagaatctttggagtaattacctacccaagggagagatcatcgaaaagccttcagccaaatcttctgatgtcttaggcagcttaaaccatgaatatgttcttgttgacatcaccacctccttcacgcttctggtgggaatcttctttccctctgttacaggtatcatggctggatcaaacagatctggagatctgaaagatgctcagaagtctattccgattggtactatccttgccatcctgaccacctcctttgtttatttaagcaatgttgtcctttttggtgcatgtattgaaggggttgttctcagagacaagttcggtgatgctgtgaaaggtaatttggtggtaggcaccttatcttggccatccccatgggtgattgttattggctccttcttttcaacatgtggggctggacttcagagcctcacaggtgcaccgaggctgctacaagctattgccaaggataacatcataccgtttctgagggtttttggccacagcaaagccaatggggaacctacctgggctttacttctaactgctgccattgcagagcttggaatactcattgcctccctggatcttgtggccccaattctttccatgttttttctcatgtgttacctctttgtaaacttggcatgtgccttgcaaacattacttcgaacacccaactggagaccccgattccgctactaccattgggccctttctttcatgggaatgagtatctgtctggctctgatgttcatttcttcctggtattatgccattgtagccatggtaatagctggtatgatctacaagtacattgaataccaaggagctgagaaagaatggggtgatggtatccgtgggctgtccctcagtgcagcccggtttgctttgcttcgattggaggaaggacctccacacactaaaaactggaggcctcagttgcttgtattactgaaactagatgaagacttacatgtcaagcatcctcgcctcctcacctttgcctcacagctcaaagcaggaaaaggtctcactattgtgggctctgtcatcgtggggaacttcctagagaactacggtgaagctttagctgctgagcagaccataaagcacctaatggaggcagagaaggtaaaaggattctgccagctggtggtggccgccaagctgagagagggcatttcccacctcatccagtcatgtggccttgggggcatgaagcacaacacggtggtgatgggctggcctaatggctggcgtcaaagcgaagatgcccgcgcttggaagacttttattggcacagttcgagtgacaactgctgcccatcttgcactgctggtggctaaaaacatctccttctttcccagcaatgtggagcaattttctgagggcaacattgatgtgtggtggattgtgcatgatggggggatgcttatgctactaccattcctactgaaacagcacaaggtgtggcgaaagtgcagcatacggatcttcacagtagcccaattagaagacaacagtatccaaatgaagaaggacctagccaccttcctatatcacttacgcattgaggcggaggtagaagtggtggagatgcatgacagtgatatatcagcatatacttacgagcgcactttgatgatggaacaaaggtcccagatgctccggcacatgcggctatccaaaacagagcgagacagagaggcacaattggtgaaagaccgaaactcaatgctacgattgaccagcattggctctgatgaggacgaagagacagaaacctatcaggagaaggtgcacatgacttggacaaaagacaagtacatggcatcccggggacaaaaagcgaagtcaatggaaggattccaggacctgcttaacatgcgtccggaccagtccaatgtgaggcggatgcatacagcagtgaaactcaacgaggttatagttaacaagtcccatgaagcaaagctggttttattgaatatgccagggccaccccgaaaccctgagggtgatgaaaactacatggagttcctagaggtgcttaccgagggactagagcgagtcctacttgtccggggtggtggcagtgaagtgatcaccatttattcataacctactctgaatgaccgtgcttgacctgttttcttaaaaggcctacgtcctccatggaagtgccagctcattactaccactcccactcaactagaagcctgtgttctgtacacatcatactgaactcttgatgagctgagcctcaagtacctgtgtaaaagagctcccatctgatctgcagtcattacagaaaaagcaaatattccctcaacatcagaacaatgctcaagtctttcaagccacgtctgagcagtcaaaggcaaattagaattaacaagctgagccaataaatgaattggtaaaagggatgctagaaattcaactgaagaaaaaaagcaagtcaagtacgtattcagcattaaagatgaatctcagaagtcatggttcaatgttgacactgtgaggataacaactagagacagcttcatcttactaaagaatttatggtcaagtatatttggacctattatcctcggcaagccaagatgcaaacattttttagctatatttctttagtatacccactgctgtaattttatattaggatactaacttgaaacatggctgcagcctctacttcttcaaaaacatccccccaaaataccagatttaaatatcc

SEQ ID NO: 293755 - DNA, 3744 bp, Artificial Sequence
  derived and/or modified sequence
agttacctagcaaacaatcttcatgttaagactgagctcaaataccacttcttccttaatggtccctgtgatcactccaggaaatgtaatacctgagtcagaactccatcacaggggaacacagccaactgttagacgacggacataagaaagctcgaaatgcttatctcaataattccaattatgaagaaggagatgaatattttgataaaaatttggcactctttgaggaagaaatggacaccagaccgaaggtgtcttccctcctcaaccgcatggccaattacactaatctgactcaaggagcaaaggaacatgaagaggcagaaaacatcactgaagggaaaaagaagcccaccaagacaatgttgactgctatctccatgagtgccattgccactaatggagtggtgccagctgggggctcatactttatgatttcccgggcactgggcccagagtttggtggggctgttggcctctgcttttatcttggtaccacatttgcagcagccatgtacatccttggtgccattgaaatctttctggtctatatcgtcccccgagctgccatctttcacagtgatgacgcactcaaggaatcagcagccatgctaaataacatgcgtgtctacggcacagctttcttggtccttatggtattagtggtatttatcggcgtacgctatgtgaacaagtttgcctcacttttcctggcctgtgtcattgtgtccatcttggccatctatgctggagccatcaagtcttcttttgctcctccacacttcccggtctgcatgctgggtaaccgcaccctttcatcaagacacattgacgtttgctctaagaccaaggaaattaacaacatgacagtcccatcaaagttatggggattcttctgtaactcgagtcaatttttcaatgccacctgtgatgaatactttgttcacaataacgtcacttcaatccagggcattcctggattggctagtggtataattacagagaatctttggagtaattacctacccaagggagagatcatcgaaaagccttcagccaaatcttctgatgtcttaggcagcttaaaccatgaatatgttcttgttgacatcaccacctccttcacgcttctggtgggaatcttctttccctctgttacaggtatcatggctggatcaaacagatctggagatctgaaagatgctcagaagtctattccgattggtactatccttgccatcctgaccacctcctttgtttatttaagcaatgttgtcctttttggtgcatgtattgaaggggttgttctcagagacaagttcggtgatgctgtgaaaggtaatttggtggtaggcaccttatcttggccatccccatgggtgattgttattggctccttcttttcaacatgtggggctggacttcagagcctcacaggtgcaccgaggctgctacaagctattgccaaggataacatcataccgtttctgagggtttttggccacagcaaagccaatggggaacctacctgggctttacttctaactgctgccattgcagagcttggaatactcattgcctccctggatcttgtggccccaattctttccatgttttttctcatgtgttacctctttgtaaacttggcatgtgccttgcaaacattacttcgaacacccaactggagaccccgattccgctactaccattgggccctttctttcatgggaatgagtatctgtctggctctgatgttcatttcttcctggtattatgccattgtagccatggtaatagctggtatgatctacaagtacattgaataccaaggagctgagaaagaatggggtgatggtatccgtgggctgtccctcagtgcagcccggtttgctttgcttcgattggaggaaggacctccacacactaaaaactggaggcctcagttgcttgtattactgaaactagatgaagacttacatgtcaagcatcctcgcctcctcacctttgcctcacagctcaaagcaggaaaaggtctcactattgtgggctctgtcatcgtggggaacttcctagagaactacggtgaagctttagctgctgagcagaccataaagcacctaatggaggcagagaaggtaaaaggattctgccagctggtggtggccgccaagctgagagagggcatttcccacctcatccagtcatgtggccttgggggcatgaagcacaacacggtggtgatgggctggcctaatggctggcgtcaaagcgaagatgcccgcgcttggaagacttttattggcacagttcgagtgacaactgctgcccatcttgcactgctggtggctaaaaacatctccttctttcccagcaatgtggagcaattttctgagggcaacattgatgtgtggtggattgtgcatgatggggggatgcttatgctactaccattcctactgaaacagcacaaggtgtggcgaaagtgcagcatacggatcttcacagtagcccaattagaagacaacagtatccaaatgaagaaggacctagccaccttcctatatcacttacgcattgaggcggaggtagaagtggtggagatgcatgacagtgatatatcagcatatacttacgagcgcactttgatgatggaacaaaggtcccagatgctccggcacatgcggctatccaaaacagagcgagacagagaggcacaattggtgaaagaccgaaactcaatgctacgattgaccagcattggctctgatgaggacgaagagacagaaacctatcaggagaaggtgcacatgacttggacaaaagacaagtacatggcatcccggggacaaaaagcgaagtcaatggaaggattccaggacctgcttaacatgcgtccggaccagtccaatgtgaggcggatgcatacagcagtgaaactcaacgaggttatagttaacaagtcccatgaagcaaagctggttttattgaatatgccagggccaccccgaaaccctgagggtgatgaaaactacatggagttcctagaggtgcttaccgagggactagagcgagtcctacttgtccggggtggtggcagtgaagtgatcaccatttattcataacctactctgaatgaccgtgcttgacctgttttcttaaaaggcctacgtcctccatggaagtgccagctcattactaccactcccactcaactagaagcctgtgttctgtacacatcatactgaactcttgatgagctgagcctcaagtacctgtgtaaaagagctcccatctgatctgcagtcattacagaaaaagcaaatattccctcaacatcagaacaatgctcaagtctttcaagccacgtctgagcagtcaaaggcaaattagaattaacaagctgagccaataaatgaattggtaaaagggatgctagaaattcaactgaagaaaaaaagcaagtcaagtacgtattcagcattaaagatgaatctcagaagtcatggttcaatgttgacactgtgaggataacaactagagacagcttcatcttactaaagaatttatggtcaagtatatttggacctattatcctcggcaagccaagatgcaaacattttttagctatatttctttagtatacccactgctgtaattttatattaggatactaacttgaaacatggctgcagcctctacttcttcaaaaacatccccccaaaataccagatttaaatatcc

SEQ ID NO: 293756 - DNA, 2889 bp, Artificial Sequence
  derived and/or modified sequence
atggacaccagacccaaggtgagcagcctgctgaacagaatggccaactacaccaacctgacccagggcgccaaggagcacgaggaggccgagaacatcaccgagggcaagaagaagcccaccaagaccatgctgaccgccatcagcatgagcgccatcgccaccaacggcgtggtgcccgccggcggcagctacttcatgatcagcagagccctgggccccgagttcggcggcgccgtgggcctgtgcttctacctgggcaccaccttcgccgccgccatgtacatcctgggcgccatcgagatcttcctggtgtacatcgtgcccagagccgccatcttccacagcgacgacgccctgaaggagagcgccgccatgctgaacaacatgagagtgtacggcaccgccttcctggtgctgatggtgctggtggtgttcatcggcgtgagatacgtgaacaagttcgccagcctgttcctggcctgcgtgatcgtgagcatcctggccatctacgccggcgccatcaagagcagcttcgcccccccccacttccccgtgtgcatgctgggcaacagaaccctgagcagcagacacatcgacgtgtgcagcaagaccaaggagatcaacaacatgaccgtgcccagcaagctgtggggcttcttctgcaacagcagccagttcttcaacgccacctgcgacgagtacttcgtgcacaacaacgtgaccagcatccagggcatccccggcctggccagcggcatcatcaccgagaacctgtggagcaactacctgcccaagggcgagatcatcgagaagcccagcgccaagagcagcgacgtgctgggcagcctgaaccacgagtacgtgctggtggacatcaccaccagcttcaccctgctggtgggcatcttcttccccagcgtgaccggcatcatggccggcagcaacagaagcggcgacctgaaggacgcccagaagagcatccccatcggcaccatcctggccatcctgaccaccagcttcgtgtacctgagcaacgtggtgctgttcggcgcctgcatcgagggcgtggtgctgagagacaagttcggcgacgccgtgaagggcaacctggtggtgggcaccctgagctggcccagcccctgggtgatcgtgatcggcagcttcttcagcacctgcggcgccggcctgcagagcctgaccggcgcccccagactgctgcaggccatcgccaaggacaacatcatccccttcctgagagtgttcggccacagcaaggccaacggcgagcccacctgggccctgctgctgaccgccgccatcgccgagctgggcatcctgatcgccagcctggacctggtggcccccatcctgagcatgttcttcctgatgtgctacctgttcgtgaacctggcctgcgccctgcagaccctgctgagaacccccaactggagacccagattcagatactaccactgggccctgagcttcatgggcatgagcatctgcctggccctgatgttcatcagcagctggtactacgccatcgtggccatggtgatcgccggcatgatctacaagtacatcgagtaccagggcgccgagaaggagtggggcgacggcatcagaggcctgagcctgagcgccgccagattcgccctgctgagactggaggagggccccccccacaccaagaactggagaccccagctgctggtgctgctgaagctggacgaggacctgcacgtgaagcaccccagactgctgaccttcgccagccagctgaaggccggcaagggcctgaccatcgtgggcagcgtgatcgtgggcaacttcctggagaactacggcgaggccctggccgccgagcagaccatcaagcacctgatggaggccgagaaggtgaagggcttctgccagctggtggtggccgccaagctgagagagggcatcagccacctgatccagagctgcggcctgggcggcatgaagcacaacaccgtggtgatgggctggcccaacggctggagacagagcgaggacgccagagcctggaagaccttcatcggcaccgtgagagtgaccaccgccgcccacctggccctgctggtggccaagaacatcagcttcttccccagcaacgtggagcagttcagcgagggcaacatcgacgtgtggtggatcgtgcacgacggcggcatgctgatgctgctgcccttcctgctgaagcagcacaaggtgtggagaaagtgcagcatcagaatcttcaccgtggcccagctggaggacaacagcatccagatgaagaaggacctggccaccttcctgtaccacctgagaatcgaggccgaggtggaggtggtggagatgcacgacagcgacatcagcgcctacacctacgagagaaccctgatgatggagcagagaagccagatgctgagacacatgagactgagcaagaccgagagagacagagaggcccagctggtgaaggacagaaacagcatgctgagactgaccagcatcggcagcgacgaggacgaggagaccgagacctaccaggagaaggtgcacatgacctggaccaaggacaagtacatggccagcagaggccagaaggccaagagcatggagggcttccaggacctgctgaacatgagacccgaccagagcaacgtgagaagaatgcacaccgccgtgaagctgaacgaggtgatcgtgaacaagagccacgaggccaagctggtgctgctgaacatgcccggcccccccagaaaccccgagggcgacgagaactacatggagttcctggaggtgctgaccgagggcctggagagagtgctgctggtgagaggcggcggcagcgaggtgatcaccatctacagctag

SEQ ID NO: 293757 - DNA, 996 bp, Artificial Sequence
  derived and/or modified sequence
atggagcaggccctggccggcgccagcagcggcagagagctgggcagacccaaggagctgcagcccaagaagctgcacctgtgccccctgtgcggcaagaacttcagcaacaacagcaacctgatcagacaccagagaatccacgccgccgagagactgtgcatgggcgtggactgcaccgagatcttcggcggcaaccccagattcctgagcctgcacagagcccacctgggcgaggaggcccacaagtgcctggagtgcggcaagtgcttcagccagaacacccacctgaccagacaccagagaacccacaccggcgagaagccctaccagtgcaacatctgcggcaagtgcttcagctgcaacagcaacctgcacagacaccagagaacccacaccggcgagaagccctacaagtgccccgagtgcggcgagatcttcgcccacagcagcaacctgctgagacaccagagaatccacaccggcgagagaccctacaagtgccccgagtgcggcaagagcttcagcagaagcagccacctggtgatccacgagagaacccacgagagagagagactgtaccccttcagcgagtgcggcgaggccgtgagcgacagcacccccttcctgaccaaccacggcgcccacaaggccgagaagaagctgttcgagtgcctgacctgcggcaagagcttcagacagggcatgcacctgaccagacaccagagaacccacaccggcgagaagccctacaagtgcaccctgtgcggcgagaacttcagccacagaagcaacctgatcagacaccagagaatccacaccggcgagaagccctacacctgccacgagtgcggcgacagcttcagccacagcagcaacagaatcagacacctgagaacccacaccggcgagagaccctacaagtgcagcgagtgcggcgagagcttcagcagaagcagcagactgatgagccaccagagaacccacaccggctag

SEQ ID NO: 293758 - DNA, 996 bp, Artificial Sequence
  derived and/or modified sequence
atggaacaggcccttgcaggcgcatcctcaggtcgtgagctcggccgccctaaggagctgcagccgaagaaattgcatttatgtcccttatgcggaaaaaactttagtaataactcaaaccttatccggcaccagcgtattcatgctgcagagcggctttgcatgggcgtcgattgtaccgagatctttggcggaaaccccaggttcttgagcctgcatcgggcccatctcggcgaggaggcccataaatgcctggagtgtggaaagtgctttagccagaacacgcatcttactcgccaccagaggactcacactggtgagaagccttatcagtgtaatatctgtggaaagtgcttcagctgtaactccaatctgcatcgacatcaacgcacccacactggcgaaaagccctacaagtgtcctgaatgcggagagatcttcgctcactcatccaacttgttacggcatcagagaatccacaccggagagcgcccttacaaatgcccggaatgcggcaagtcattttcccggtcctcccacctcgtcattcatgagcggacacatgagcgagagcggctctacccttttagcgagtgtggggaggcggtgagtgattccacaccctttctcactaaccatggagcccataaagcggaaaagaaacttttcgagtgcctaacatgcgggaagagcttcaggcagggaatgcaccttactcgacaccagcgaacacacaccggtgagaaaccgtataaatgtaccctctgcggcgaaaattttagccaccgttctaacttaattcggcaccagcggattcatacaggcgagaaaccttacacatgccatgaatgcggcgacagcttttctcacagctctaaccgaatcaggcacctgagaacacacacaggcgagcgcccttacaagtgcagtgagtgtggcgagtctttttcccgctcgtcaagactgatgagccaccaacgtacgcacaccggatag

SEQ ID NO: 293759 - DNA, 996 bp, Artificial Sequence
  derived and/or modified sequence
atggagcaggccctggccggggccagcagcggccgggagctgggccggcccaaggagctgcagcccaagaagctgcacctgtgccccctgtgtgggaagaacttcagcaacaacagcaacctgatccgccaccagagaattcatgctgctgagcggctgtgcatgggcgtggactgcacagagatctttggaggcaacccccgcttcctgagcctgcaccgggcccacctgggggaggaggcccacaagtgcctggagtgtgggaagtgcttcagccagaacacccacctgaccaggcaccagaggacccacactggagagaagccctaccagtgcaacatctgtgggaagtgcttcagctgcaacagcaacctgcaccgccaccagaggacccacactggagagaagccctacaagtgcccagaatgtggggagatctttgcccacagcagcaacctgctgcggcaccagaggatccacactggagagcggccctacaagtgcccagaatgtgggaagagcttcagccgcagcagccacctggtgatccacgagaggacccatgagcgggagcggctgtaccccttctctgaatgtggggaggccgtgtctgacagcacccccttcctgaccaaccacggggcccacaaggccgagaagaagctgtttgagtgcctgacctgtgggaagagcttccggcagggcatgcacctgaccaggcaccagaggacccacactggagagaagccctacaagtgcaccctgtgtggggagaacttcagccacaggagcaacctgatccgccaccagaggatccacactggagagaagccctacacctgccatgaatgtggggacagcttcagccacagcagcaaccgcatccgccacctgcggacccacactggagagcggccctacaagtgcagtgaatgtggggagagcttcagccgcagcagccggctgatgagccaccagaggacccacactggatag

SEQ ID NO: 293760 - DNA, 996 bp, Artificial Sequence
  derived and/or modified sequence
atggagcaggccctggccggcgccagcagcggccgggagctgggccgtccaaaggagctccagcccaagaagctgcacctttgtccgttgtgcggcaaaaacttcagcaataatagcaatctcatccgccaccagagaatccacgccgctgagcgcctgtgcatgggagtggactgcactgagatcttcgggggaaatccaagattcctttccctccaccgcgctcacctaggcgaagaagcacataagtgcctggagtgtggaaagtgcttttcgcagaacactcacctgacacggcatcaaagaacccatacaggagagaagccttatcagtgcaacatttgcggcaagtgtttctcctgtaacagcaacttgcacagacatcagagaactcatactggggagaaaccctacaaatgtccggagtgtggtgagatctttgcccatagtagtaatctgctgcggcaccaacggatccataccggagagaggccgtataaatgccctgaatgcggcaagagctttagccgttccagccatctcgtgatccatgagcggactcacgagagggaaagactgtacccgttcagtgagtgcggtgaagcggtgagcgatagcacaccctttctaaccaatcatggcgcgcataaagccgagaagaaactgttcgagtgtttgacctgcggcaagagtttccgtcaaggtatgcacctgactaggcatcagagaacccacaccggcgaaaaaccttacaagtgtacactgtgcggcgaaaatttctcccaccgtagcaacctgattagacaccaacggatccacacaggagagaaaccctacacctgccatgagtgtggagattccttttcgcatagcagcaaccggataaggcacctgcggacacatacaggggaaagaccttacaagtgtagcgaatgcggtgagtcattcagccggtcctctcgacttatgagtcaccagcgcacacacacagggtag

SEQ ID NO: 293761 - DNA, 996 bp, Artificial Sequence
  derived and/or modified sequence
atggagcaggcccttgcgggagcatcatccggtagggagctgggacgtcctaaagagttacaacctaaaaaactgcacctgtgccctttgtgcggcaagaactttagtaataatagtaatttaatccggcaccaacggatccatgcggcagagcggttgtgcatgggcgtggattgcactgaaatttttggaggcaacccccgatttttatccctccacagggcacacctgggggaggaggcccataaatgtttagagtgcgggaagtgtttctcacaaaatacacacttgacgaggcaccaacggacccacacaggagaaaaaccttaccagtgcaatatctgtggtaagtgttttagttgtaatagcaatctgcaccgacaccaaagaacccacactggcgagaaaccttataaatgtcccgagtgcggcgagatatttgcacactccagcaatctgctccgtcaccagaggattcatacaggtgagcggccttataaatgccctgagtgtggtaagagcttcagccgttctagccacctggtgatacacgagagaacccatgagagggagagattgtatccattcagcgagtgcggggaggcagtgagcgattctaccccatttttaacaaatcacggcgctcataaagcagagaagaaactgttcgaatgtctgacgtgcgggaaaagcttcaggcagggtatgcacctgaccaggcaccagcgcactcacacgggagagaaaccctacaagtgtacgttgtgcggcgaaaattttagccatcgctctaatctgatcaggcatcagagaatccataccggagagaaaccctatacatgccatgaatgcggggactctttttcacattccagtaatcggatacgacacttgaggacccacactggcgaacgtccctacaaatgctctgagtgtggtgagtctttttcccgatcgtctcgtcttatgagtcaccagagaacacacactggctag

SEQ ID NO: 293762 - DNA, 1721 bp, Artificial Sequence
  derived and/or modified sequence
ctgttttgcaacttcttgtttatgagcctggaagccacgaagtggtgggaaatacgagattcaaatatctggtggccgtgtgacgagaagagaaatttgagaacctggaaggtgttccgtctgtatgctctgagaacatccaccctcaggtgctgcttcctgaccaggcccgaggggaggtgccctggagtcctgagctgggaagacctcatgaccggtcgcaaggggattgggcgcctcccccagagggtggaatggagcaggccttggcaggagcctcaagtggcagagaactggggcgaccgaaggaactgcagccaaagaaactccatttatgtcccttgtgtggcaaaaatttctctaacaactcaaacctaattaggcaccagagaatacatgcagctgaaagactgtgtatgggtgtggactgcactgaaatctttggtgggaacccacgtttcctgtcactacacagagcacacctgggagaggaggcccacaagtgccttgaatgtgggaaatgcttcagtcagaacacccatctgactcgccaccaacgcacccacacgggtgagaagccctatcagtgcaacatttgcggaaaatgtttctcctgcaactccaacctccacaggcaccagagaacgcacactggggagaagccctacaagtgccctgagtgtggggagatctttgctcacagttccaacctccttcggcaccagagaattcacactggagagcgaccttataagtgtcccgagtgtgggaaaagtttctctcggagttcacacctcgtcattcacgaaagaactcatgagagagagagactttaccccttctctgagtgtggggaagctgtgagtgacagcaccccctttcttacaaaccatggagcccataaggcagagaagaagctctttgaatgtttgacttgtgggaaaagcttccggcagggcatgcacctcaccagacatcagagaacacacacaggagagaaaccgtataaatgtaccctttgtggggaaaacttctctcatagatccaatttaatcaggcaccagagaatccacacaggagaaaaaccctatacctgtcatgagtgcggagacagcttctctcacagctccaatcggattcgccacctgagaacgcatacgggagagagaccctataaatgttctgaatgtggagaaagcttctctcggagttcccgtcttatgagtcatcagagaactcacacaggttagtaacagtggggtttctctttgccccaggtgaggtggcatattcagaggagcctgttggcaagagctggtattccctgcccagccgaccaaatgacctctgcattcttcaggtaatgggggctcattgtgagggaggtgcagaggcagcagaggattggcataaaactgaaaaggagttctgtctgcatgagaaaggatggcaagtctctgaggtgacctcagggtggaattctctgttaagtccaccctgccccagggtgctcctaccctcttggtctttttaaagccaaggtgcgatttgggcacctgactgtccagtttaccttaacaagtttgggaatccatgtgatgtttttgatacttcttcctcatttgggacattcagtaggagcatttgggcttccggggcccctgagaccaaagaagaggggccaagtaccctgggaaatcagctgaaggtcaacaaaagac

SEQ ID NO: 293763 - protein, 702 aa, Artificial Sequence
  derived and/or modified sequence
MAAAVTIPGPRIGALQSSGLTLLLSLAAHCSGPQAKVLSPGGLDASGANLWASANCSLLQGFWCQPASQLPRDQLSALIQRLALLQVPLQAWQLSCLANLASRCGLQDDFTLHPPNLLLFYNLSQVREADCRAFIRRAAQGDVELLSHLPDQRVALWRAAVACLVGAGLRLSASDQQLLGALVCDMDASSIGAADPHMLENLRRCPRLTAAQRIALNSLLAGGKTSLGPPGSWTLEGLQALGPLATYISPHLWAQVQEAVGLGFFRSVVASCQVGRLGQREARCFVTSFLESKTKPVSSRPRLSTGNITAATLRDDLFLVHYDCAELESCLDGCILRTNLDTLLQHLLPTECQHVVKAKLAQIYPQGLPEDQLRLITSLVYLYSRTEIGQWSITSQDTVMALLASDVALENQTEAVLQKFLEHNGTVSGALLLAIGGTRLCWMSPHQIQTIHPQELRLAGALDLSSCPQSRKDVLYTKAHETFGSSGTLAAYYRLMRPYLGGSPGGAQPPSPVPPGGAPVEELRHLAHANISMDIDTFTSLNPLELQSLDVGNVTALLGHNVGDLQKARSHPTVRAWLRSLNSSTLGQLGLDASPTSPTGPAHGTRGPPSTTHQVLHLVHTSGLPTNDAQASTSGSLWAPLGYLPLAMALPCSLLCLLHWGTCILVSVDSVASGWLGSQGSGAGKTEVLDSAGRPLGLTGQL

SEQ ID NO: 293764 - protein, 622 aa, Artificial Sequence
  derived and/or modified sequence
MALPTARPLLGSCGTPALGSLLFLLFSLGWVQPSRTLAGETGQEAAPLDGVLANPPNISSLSPRQLLGFPCAEVSGLSTERVRELAVALAQKNVKLSTEQLRCLAHRLSEPPEDLDALPLDLLLFLNPDAFSGPQACTRFFSRITKANVDLLPRGAPERQRLLPAALACWGVRGSLLSEADVRALGGLACDLPGRFVAESAEVLLPRLVSCPGPLDQDQQEAARAALQGGGPPYGPPSTWSVSTMDALRGLLPVLGQPIIRSIPQGIVAAWRQRSSRDPSWRQPERTILRPRFRREVEKTACPSGKKAREIDESLIFYKKWELEACVDAALLATQMDRVNAIPFTYEQLDVLKHKLDELYPQGYPESVIQHLGYLFLKMSPEDIRKWNVTSLETLKALLEVNKGHEMSPQVATLIDRFVKGRGQLDKDTLDTLTAFYPGYLCSLSPEELSSVPPSSIWAVRPQDLDTCDPRQLDVLYPKARLAFQNMNGSEYFVKIQSFLGGAPTEDLKALSQQNVSMDLATFMKLRTDAVLPLTVAEVQKLLGPHVEGLKAEERHRPVRDWILRQRQDDLDTLGLGLQGGIPNGYLVLDLSMQEALSGTPCLLGPGPVLTVLALLLASTLA

SEQ ID NO: 293765 - DNA, 1869 bp, Artificial Sequence
  derived and/or modified sequence
atggcactgcccacagcccggccattgctcggaagctgtggcactcctgcccttggctcactgctgtttcttctcttctctttaggctgggttcagccctcccgcacccttgcgggggagactggacaggaggctgcccccctcgacggtgtgctggcaaaccctccaaacatttcctccctgagcccgcgacaactactggggtttccttgtgctgaagtttcagggctttctactgagcgcgtgcgtgaactggctgttgcgctggcccagaagaatgtgaagttaagcacagagcagctgaggtgcctagctcacaggttgtccgagccccctgaggatctggacgcacttcctttggatctgctgcttttcctcaatcctgatgccttctctggcccccaggcctgtacgcgcttcttcagccgtattacgaaagctaacgtggacttgctgcctaggggggcccccgagcggcagagactgctgccagcagcccttgcatgctggggggttcggggaagccttttgagcgaggcggacgtccgggccctcggaggtctggcctgcgacctccctggtcgcttcgtggcagagtccgccgaagttctgctgcctcgcctcgtgtcctgtccgggccccctcgaccaggaccagcaagaggctgcacgcgcagcactgcaggggggtggccccccctacggtccaccctcaacatggtctgtcagtacaatggacgctttgaggggacttctcccagtactgggccaaccaattatcaggtcgattccccaaggaatcgtcgcggcatggcggcagcgaagcagtcgagacccctcctggaggcagcctgaacgtacgatcctccgcccgagatttaggcgggaggttgagaagaccgcttgtcccagcggtaaaaaagcaagagaaattgacgaaagcctaatcttctacaaaaaatgggagttagaggcctgtgttgatgcagctctcctcgcaacacagatggacagggtgaacgctattccttttacttatgaacagctcgatgtgttgaaacacaagttagacgagctctatccgcaaggctatcctgagagtgtgatccagcacctgggatacctttttctaaagatgagtccagaggacatccgcaagtggaacgtcactagcctggagacactaaaagccctgctggaggtgaataaggggcacgaaatgtcaccccaggttgctactctgattgatagattcgtgaaaggtcggggccagctcgacaaagacaccttagacactctgacagctttttatcctggctacctctgctctctaagtcccgaggagctttcttctgtgccacccagcagtatttgggccgtgaggccgcaagacttggatacatgtgacccccgccagctggatgtgctgtatccgaaagctaggcttgctttccagaacatgaacggcagtgagtatttcgttaaaatacagtcctttctggggggtgcacccaccgaggacctcaaagccctctctcagcagaatgtgtcaatggatctggcaaccttcatgaagctcaggaccgatgctgtgttaccacttactgtggcagaggtgcagaagctgctgggaccccacgttgaaggtctcaaggctgaggaacgacacagaccagtcagggactggatcttgaggcagaggcaggacgatctagataccctgggattaggccttcagggagggatccccaatggatacctggttctcgacctgagcatgcaagaggccttgtccggaaccccatgtttattgggtcctggcccagtgttgactgtcctggctctcctcctggcatctaccctcgcatag

SEQ ID NO: 293766 - DNA, 1869 bp, Artificial Sequence
  derived and/or modified sequence
atggcactccccactgccagaccgctcctgggcagttgcgggacaccagcactgggcagcctcctcttcctgctgttctcactcggctgggtgcagcctagcagaactctggccggcgagaccggccaggaagctgcgcccctcgatggcgtgctcgccaatccacccaatatcagctcgctcagcccgaggcagctcctgggctttccttgtgctgaagtcagtggactgtccacagaacgggtgagggagcttgccgtggcattagcacagaaaaatgtcaagctctcgaccgaacagctgcgatgcttggcacacagactgagcgaaccccccgaggacctggacgctcttccactggacttactcctgtttctgaatcccgatgccttttcaggtccgcaggcctgtactcggttcttttcccggattaccaaagcaaatgtggatcttctgcccaggggagctcccgagagacagcggctcctcccagcagcgctggcctgctggggcgttaggggttccctcctgagcgaagcagacgttcgtgccctcggtggactagcttgcgacctgccagggcggttcgtggccgagagtgccgaggtgttgctgcctagactcgtcagctgtccaggccccttggatcaggaccagcaggaggcagctcgggccgctttgcagggcggtgggccaccttacgggcctcctagtacatggtccgtctctaccatggatgccttgcgcgggctgctgccggtgctggggcagcccataatacgttcgattccccagggcattgttgccgcatggcgccagcgaagcagccgtgaccccagttggcgccagccagagcgaactattctcaggccacgcttcaggcgggaagtggagaagaccgcttgtccaagtggcaagaaggccagggagatcgatgagagcttaatattttataagaaatgggagttggaggcttgtgtcgacgcagccctgttggcaacccagatggaccgggtgaacgctatcccgtttacttacgaacagctagatgttctgaaacacaaattggatgagctgtaccctcagggctatccggaatccgtcattcagcacctggggtacctattcctgaagatgtccccggaggacatcagaaagtggaatgtgactagcctagagaccctcaaagccttactggaggtcaacaagggccatgagatgagcccacaagtggcgacactgatcgaccgcttcgtaaagggcagaggccaactggacaaggataccttggacacactcaccgccttctatcctggttacctctgctcactgtcccccgaggagctgagtagcgttcccccgagctctatctgggctgtacggccccaggaccttgacacctgtgatcctcggcagctggacgtcctttacccaaaagctagactggccttccaaaatatgaacggctccgaatatttcgtaaaaattcaatcctttttgggcggggcacccacagaagatttgaaggcgttgagtcagcagaacgtgtctatggatttggctacctttatgaagctcagaacagacgcagtgctgccactgaccgtggcagaagtgcagaagctgttaggcccccatgtcgaagggcttaaagcagaggaacggcatcggccagtccgggactggatcctcaggcagaggcaggatgatttagacacattaggcttgggattgcaggggggtatccccaatggctatctcgtgctggacctttctatgcaggaggctctgagtggaacgccatgccttctgggcccaggtccagtgttgacagtactggccctgctattagcaagcacgttggcttag

SEQ ID NO: 293767 - DNA, 1869 bp, Artificial Sequence
  derived and/or modified sequence
atggcgctgccgaccgctaggcccctgcttggaagctgtgggacacccgccctcggcagcttattgttcctcctgttttcccttggttgggtgcagccatcccgcacattggcaggagagaccggccaggaggctgcccccctcgatggggttctggcgaatccccccaatatttcctctttatcccctagacagttgctgggtttcccctgtgccgaagtttccgggctctctaccgagcgagtccgcgagctggccgtggctctggctcagaagaacgtgaaactcagcacggagcaactgaggtgtctcgcacatagactgagtgagccacctgaggatcttgacgccctcccattggaccttcttctgttcttgaatccagacgcattttctgggcctcaagcatgtacacgcttcttttcacgcatcacaaaggccaatgtggacttgttgccccgaggagcccccgagcggcagaggctcctgccagctgctctggcttgttggggagtgcggggatcactcctgagtgaggctgatgtcagagcacttgggggcctggcttgtgaccttcccggcaggttcgtggctgaatcagccgaagtgcttctaccccggttagtatcatgtccaggccccttggaccaggatcagcaggaagcggcaagggccgctctccagggtggcggaccaccctatggcccgccctctacttggtccgtgagtaccatggacgcgttacgtggcctactgccagttctgggccagcccatcattcgaagcatccctcagggtatcgtggcagcatggcgacagaggagttccagagaccccagctggcggcagccagaacggacgatattgagaccaagatttcgccgagaagtcgaaaagacagcctgccccagtggaaaaaaggccagagaaattgacgagtccttgattttttacaagaaatgggaactagaggcttgcgtggacgcggccctactagccacccagatggatcgcgtgaacgccatcccatttacctatgagcagttggacgttcttaagcataagctagacgagttatatccccaaggctacccagagtccgtcattcagcacctcggctacctctttttaaagatgagtcctgaggatatcaggaagtggaatgtgacctccttggaaaccctcaaggcactactggaggtcaacaaggggcacgaaatgtctccacaggtggccacgctcattgaccggtttgtgaaaggccgcgggcagctggacaaagataccttggataccctgactgccttctatcccggctatctgtgctcactctctcctgaggagctttcctccgtgccccccagctccatctgggccgtccgcccccaggatctcgacacatgcgatccgcggcagctggacgtcttgtacccaaaggccaggctcgccttccagaacatgaatggctctgaatatttcgtcaagatccagagcttcctcggcggcgcgcccaccgaagacctgaaggctctgtcgcaacagaatgttagcatggatttggcaaccttcatgaaactcaggaccgatgcggtgcttcccttgaccgtggccgaagtacagaagctgctgggccctcatgtggaaggactgaaggccgaggaaaggcacagaccagtgcgggactggatcctaagacaacggcaggacgaccttgacaccctggggctggggctgcagggaggcataccaaatgggtatttggtgctggacctttcaatgcaggaggctttatccggaacaccatgtctgctggggcccggaccagttctaacggttttggctttacttctggcctcaacccttgcctag

SEQ ID NO: 293768 - DNA, 1869 bp, Artificial Sequence
  derived and/or modified sequence
atggccctgcccacagcccggcccctgctgggcagctgtggcaccccagccctgggcagcctgctcttcctgctcttcagcctgggctgggtgcagcccagcaggaccctggccggggagaccggccaggaggccgcccccctggatggagtgctggccaacccccccaacatcagcagcctgagcccccggcagctgctgggcttcccctgtgccgaggtgtctggcctgagcacagagcgggtgcgggagctggccgtggccctggcccagaagaatgtgaagctgagcacagagcagctgcgctgcctggcccaccggctgtctgagcccccagaggacctggatgccctgcccctggacctgctgctcttcctgaacccagatgccttcagcggcccccaggcctgcacccgcttcttcagccgcatcaccaaggccaacgtggacctgctgcccaggggggcccctgagcggcagaggctgctgcctgctgccctggcctgctggggcgtgcggggcagcctgctgtctgaggctgatgtgcgggccctgggcggcctggcctgtgacctgcccggccgctttgtggccgagagcgctgaggtgctgctgccccggctggtgtcctgccccggccccctggaccaggaccagcaggaggccgcccgggccgccctgcagggcggcggccccccctacggcccccccagcacctggagcgtgtccaccatggatgccctgcggggcctgctgcctgtgctgggccagcccatcatccgcagcatcccccagggcatcgtggccgcctggaggcagaggagcagccgggaccccagctggaggcagcctgagaggaccatcctgcggccccgcttccggcgggaggtggagaagacagcctgccccagcggcaagaaggcccgggagattgatgagagcctcatcttctacaagaagtgggagctggaggcctgtgtggatgctgccctgctggccacccagatggacagagtgaatgccatccccttcacctatgagcagctggatgtgctgaagcacaagctggatgagctgtacccccagggctacccagagagcgtcatccagcacctgggctacctgttcctgaagatgagccctgaggacatcaggaagtggaatgtgaccagcctggagaccctgaaggccctgctggaggtgaacaagggccacgagatgagcccccaggtggccaccctgattgacagatttgtgaagggccggggccagctggacaaggacaccctggacaccctgacagccttctacccaggctacctgtgcagcctgagccctgaggagctgagctctgtgccccccagcagcatctgggccgtgcggccccaggacctggacacctgtgacccccggcagctggatgtgctgtaccccaaggcccggctggccttccagaacatgaatggcagcgagtactttgtgaagatccagagcttcctgggcggggcccccacagaggacctgaaggccctgagccagcagaatgtgtccatggacctggccaccttcatgaagctgaggacagatgctgtgctgcccctgactgtggccgaggtgcagaagctgctgggcccccacgtggagggcctgaaggccgaggagcggcacaggcctgtgcgggactggatcctgcggcagaggcaggatgacctggacaccctgggcctgggcctgcagggcggcatccccaacggctacctggtgctggacctgtccatgcaggaggccctgagcggcaccccctgcctgctgggccctggccctgtgctgactgtgctggccctgctgctggccagcaccctggcctag

SEQ ID NO: 293769 - DNA, 2092 bp, Artificial Sequence
  derived and/or modified sequence
ctctacttcccaggggaggaaaccgaggcacacctgtagccagggagcagggggtcccatcctgagtcactgccctccacagacacagaccatggccttgccaacggctcgacccctgttggggtcctgtgggacccccgccctcggcagcctcctgttcctgctcttcagcctcggatgggtgcagccctcgaggaccctggctggagagacagggcaggaggctgcgcccctggacggagtcctggccaacccacctaacatttccagcctctcccctcgccaactccttggcttcccgtgtgcggaggtgtccggcctgagcacggagcgtgtccgggagctggctgtggccttggcacagaagaatgtcaagctctcaacagagcagctgcgctgtctggctcaccggctctctgagccccccgaggacctggacgccctcccattggacctgctgctattcctcaacccagatgcgttctcggggccccaggcctgcacccgtttcttctcccgcatcacgaaggccaatgtggacctgctcccgaggggggctcccgagcgacagcggctgctgcctgcggctctggcctgctggggtgtgcgggggtctctgctgagcgaggctgatgtgcgggctctgggaggcctggcttgcgacctgcctgggcgctttgtggccgagtcggccgaagtgctgctaccccggctggtgagctgcccgggacccctggaccaggaccagcaggaggcagccagggcggctctgcagggcgggggacccccctacggccccccgtcgacatggtctgtctccacgatggacgctctgcggggcctgctgcccgtgctgggccagcccatcatccgcagcatcccgcagggcatcgtggccgcgtggcggcaacgctcctctcgggacccatcctggcggcagcctgaacggaccatcctccggccgcggttccggcgggaagtggagaagacagcctgtccttcaggcaagaaggcccgcgagatagacgagagcctcatcttctacaagaagtgggagctggaagcctgcgtggatgcggccctgctggccacccagatggaccgcgtgaacgccatccccttcacctacgagcagctggacgtcctaaagcataaactggatgagctctacccacaaggttaccccgagtctgtgatccagcacctgggctacctcttcctcaagatgagccctgaggacattcgcaagtggaatgtgacgtccctggagaccctgaaggctttgcttgaagtcaacaaagggcacgaaatgagtcctcaggtggccaccctgatcgaccgctttgtgaagggaaggggccagctagacaaagacaccctagacaccctgaccgccttctaccctgggtacctgtgctccctcagccccgaggagctgagctccgtgccccccagcagcatctgggcggtcaggccccaggacctggacacgtgtgacccaaggcagctggacgtcctctatcccaaggcccgccttgctttccagaacatgaacgggtccgaatacttcgtgaagatccagtccttcctgggtggggcccccacggaggatttgaaggcgctcagtcagcagaatgtgagcatggacttggccacgttcatgaagctgcggacggatgcggtgctgccgttgactgtggctgaggtgcagaaacttctgggaccccacgtggagggcctgaaggcggaggagcggcaccgcccggtgcgggactggatcctacggcagcggcaggacgacctggacacgctggggctggggctacagggcggcatccccaacggctacctggtcctagacctcagcatgcaagaggccctctcggggacgccctgcctcctaggacctggacctgttctcaccgtcctggcactgctcctagcctccaccctggcctgagggccccactcccttgctggccccagccctgctggggatccccgcctggccaggagcaggcacgggtggtccccgttccaccccaagagaactcgcgctcagtaaacgggaacatgccccctgcagacacgt

SEQ ID NO: 293770 - DNA, 2169 bp, Artificial Sequence
  derived and/or modified sequence
tgccaggctctccacccccacttcccaattgaggaaaccgaggcagaggaggctcagcgccacgcactcctctttctgcctggccggccactcccgtctgctgtgacgcgcggacagagagctaccggtggacccacggtgcctccctccctgggatctacacagaccatggccttgccaacggctcgacccctgttggggtcctgtgggacccccgccctcggcagcctcctgttcctgctcttcagcctcggatgggtgcagccctcgaggaccctggctggagagacagggcaggaggctgcgcccctggacggagtcctggccaacccacctaacatttccagcctctcccctcgccaactccttggcttcccgtgtgcggaggtgtccggcctgagcacggagcgtgtccgggagctggctgtggccttggcacagaagaatgtcaagctctcaacagagcagctgcgctgtctggctcaccggctctctgagccccccgaggacctggacgccctcccattggacctgctgctattcctcaacccagatgcgttctcggggccccaggcctgcacccgtttcttctcccgcatcacgaaggccaatgtggacctgctcccgaggggggctcccgagcgacagcggctgctgcctgcggctctggcctgctggggtgtgcgggggtctctgctgagcgaggctgatgtgcgggctctgggaggcctggcttgcgacctgcctgggcgctttgtggccgagtcggccgaagtgctgctaccccggctggtgagctgcccgggacccctggaccaggaccagcaggaggcagccagggcggctctgcagggcgggggacccccctacggccccccgtcgacatggtctgtctccacgatggacgctctgcggggcctgctgcccgtgctgggccagcccatcatccgcagcatcccgcagggcatcgtggccgcgtggcggcaacgctcctctcgggacccatcctggcggcagcctgaacggaccatcctccggccgcggttccggcgggaagtggagaagacagcctgtccttcaggcaagaaggcccgcgagatagacgagagcctcatcttctacaagaagtgggagctggaagcctgcgtggatgcggccctgctggccacccagatggaccgcgtgaacgccatccccttcacctacgagcagctggacgtcctaaagcataaactggatgagctctacccacaaggttaccccgagtctgtgatccagcacctgggctacctcttcctcaagatgagccctgaggacattcgcaagtggaatgtgacgtccctggagaccctgaaggctttgcttgaagtcaacaaagggcacgaaatgagtcctcaggtggccaccctgatcgaccgctttgtgaagggaaggggccagctagacaaagacaccctagacaccctgaccgccttctaccctgggtacctgtgctccctcagccccgaggagctgagctccgtgccccccagcagcatctgggcggtcaggccccaggacctggacacgtgtgacccaaggcagctggacgtcctctatcccaaggcccgccttgctttccagaacatgaacgggtccgaatacttcgtgaagatccagtccttcctgggtggggcccccacggaggatttgaaggcgctcagtcagcagaatgtgagcatggacttggccacgttcatgaagctgcggacggatgcggtgctgccgttgactgtggctgaggtgcagaaacttctgggaccccacgtggagggcctgaaggcggaggagcggcaccgcccggtgcgggactggatcctacggcagcggcaggacgacctggacacgctggggctggggctacagggcggcatccccaacggctacctggtcctagacctcagcatgcaagaggccctctcggggacgccctgcctcctaggacctggacctgttctcaccgtcctggcactgctcctagcctccaccctggcctgagggccccactcccttgctggccccagccctgctggggatccccgcctggccaggagcaggcacgggtggtccccgttccaccccaagagaactcgcgctcagtaaacgggaacatgccccctgcagacacgt

SEQ ID NO: 293771 - DNA, 2109 bp, Artificial Sequence
  derived and/or modified sequence
ggctgccaggctctccacccccacttcccaattgaggaaaccgaggcagaggaggctcagagagctaccggtggacccacggtgcctccctccctgggatctacacagaccatggccttgccaacggctcgacccctgttggggtcctgtgggacccccgccctcggcagcctcctgttcctgctcttcagcctcggatgggtgcagccctcgaggaccctggctggagagacagggcaggaggctgcgcccctggacggagtcctggccaacccacctaacatttccagcctctcccctcgccaactccttggcttcccgtgtgcggaggtgtccggcctgagcacggagcgtgtccgggagctggctgtggccttggcacagaagaatgtcaagctctcaacagagcagctgcgctgtctggctcaccggctctctgagccccccgaggacctggacgccctcccattggacctgctgctattcctcaacccagatgcgttctcggggccccaggcctgcacccgtttcttctcccgcatcacgaaggccaatgtggacctgctcccgaggggggctcccgagcgacagcggctgctgcctgcggctctggcctgctggggtgtgcgggggtctctgctgagcgaggctgatgtgcgggctctgggaggcctggcttgcgacctgcctgggcgctttgtggccgagtcggccgaagtgctgctaccccggctggtgagctgcccgggacccctggaccaggaccagcaggaggcagccagggcggctctgcagggcgggggacccccctacggccccccgtcgacatggtctgtctccacgatggacgctctgcggggcctgctgcccgtgctgggccagcccatcatccgcagcatcccgcagggcatcgtggccgcgtggcggcaacgctcctctcgggacccatcctggcggcagcctgaacggaccatcctccggccgcggttccggcgggaagtggagaagacagcctgtccttcaggcaagaaggcccgcgagatagacgagagcctcatcttctacaagaagtgggagctggaagcctgcgtggatgcggccctgctggccacccagatggaccgcgtgaacgccatccccttcacctacgagcagctggacgtcctaaagcataaactggatgagctctacccacaaggttaccccgagtctgtgatccagcacctgggctacctcttcctcaagatgagccctgaggacattcgcaagtggaatgtgacgtccctggagaccctgaaggctttgcttgaagtcaacaaagggcacgaaatgagtcctcaggtggccaccctgatcgaccgctttgtgaagggaaggggccagctagacaaagacaccctagacaccctgaccgccttctaccctgggtacctgtgctccctcagccccgaggagctgagctccgtgccccccagcagcatctgggcggtcaggccccaggacctggacacgtgtgacccaaggcagctggacgtcctctatcccaaggcccgccttgctttccagaacatgaacgggtccgaatacttcgtgaagatccagtccttcctgggtggggcccccacggaggatttgaaggcgctcagtcagcagaatgtgagcatggacttggccacgttcatgaagctgcggacggatgcggtgctgccgttgactgtggctgaggtgcagaaacttctgggaccccacgtggagggcctgaaggcggaggagcggcaccgcccggtgcgggactggatcctacggcagcggcaggacgacctggacacgctggggctggggctacagggcggcatccccaacggctacctggtcctagacctcagcatgcaagaggccctctcggggacgccctgcctcctaggacctggacctgttctcaccgtcctggcactgctcctagcctccaccctggcctgagggccccactcccttgctggccccagccctgctggggatccccgcctggccaggagcaggcacgggtggtccccgttccaccccaagagaactcgcgctcagtaaacgggaacatgccccctgcagaca

SEQ ID NO: 293772 - DNA, 1869 bp, Artificial Sequence
  derived and/or modified sequence
atggccctgcccaccgcccggcccctgctgggcagctgcggcacccctgcactgggaagcctcctgttcttgctcttcagtctcggctgggtgcagccaagcagaaccctcgccggagaaacaggccaggaggctgccccactggatggcgtgctggccaatcccccaaacattagcagcctctctcctaggcagctgttgggtttcccttgcgcagaggtgtccggactttctaccgagcgggtgagggagctggccgtagccctggcccagaaaaacgttaaattgagtaccgagcagctgagatgcttggcacaccgactcagcgaaccacccgaagatttggacgcgcttcccctcgaccttctcctattcctcaatccggacgccttctcgggaccccaggcctgtactcgcttcttcagcaggattacaaaagccaatgtcgatctactccctcggggagctccggaacgccaacgcctgctacctgcagcactggcttgctggggggtgcgtggctctctcctgagtgaagccgatgtacgggcactagggggtttggcctgtgatctgcccggcaggtttgtcgctgagagcgccgaggttttactaccccgactagtgagctgcccaggccccctggaccaggatcagcaggaagccgctcgggctgcattacagggcggcggcccaccatacggaccaccctctacatggtcagttagcaccatggatgctcttcgtgggttactgcccgtgttgggacagcccatcattaggagcatccctcagggtattgtggctgcatggcggcagagatcatctagggacccttcttggagacagcccgaaagaacaatactaagacccaggtttcgcagggaagtggagaaaacagcctgcccaagcggtaagaaggccagagagattgatgaatctctgatattttataagaagtgggaactcgaagcctgcgtagacgcagccctcctggccactcaaatggacagggttaacgctatcccctttacgtacgaacaactcgatgtcctcaagcataaactagatgagctgtaccctcagggctatccggaaagtgtgattcagcacctggggtacctatttctgaagatgagtcctgaggatatcagaaagtggaatgtcacatccctggaaaccctgaaagcgctactggaagtgaacaaaggtcacgagatgtctccgcaagtggctactcttattgatcgcttcgtgaagggcagagggcagctcgataaagacactctggatacactgaccgccttctaccccggatatctgtgctcattaagccctgaagaactgagcagcgtccccccctcgagcatctgggccgtgcggccacaagacctggatacctgtgatccgcggcaactggacgttctctatcccaaagctcgcctggccttccaaaacatgaacggatcagagtattttgtgaaaattcaatcgttcctcggaggggctccgacagaggaccttaaagccttgtctcaacaaaatgtgtctatggacctggccactttcatgaaactgcgtaccgacgcggtgcttcctttgaccgtggccgaagtccaaaagttactcggaccacacgtggaagggctgaaagccgaggaacgccaccgccccgtgcgggactggatactgcgacagcgccaagatgatcttgatactcttgggctgggtctgcagggggggattcccaacggttacctggtcctggacttgagtatgcaggaagcactgagtgggactccttgcctactcgggcctggaccggtgctgaccgtgctcgctttgttactggcgtcgactctcgcatag

SEQ ID NO: 293773 - DNA, 1869 bp, Artificial Sequence
  derived and/or modified sequence
atggccctgcccaccgcccggcccctgctgggcagctgcggcacccctgctctgggatccctcctgttcctgctgttctccttgggttgggtgcagccttcacgcaccttggcaggcgagaccggacaggaagctgctcctctagacggggtgcttgctaaccctccaaacattagcagcctgagcccgagacagctgctgggtttcccttgcgctgaagtgagcggcctcagcacggaaagagtgagggagctcgccgttgcccttgctcagaaaaacgtgaagcttagcaccgagcagcttagatgtctggcccatcgactcagtgaaccccctgaagatctggatgccctccctctggacctgctcctgtttctgaatcctgacgctttttctggcccccaggcctgtacacgcttttttagccggatcaccaaggccaatgtggacctgctgccccggggcgcccccgagcggcaacgattgctgccagcggctctggcgtgctggggagtgcgcggatcccttttgagcgaagccgacgtgcgagctctgggcggcctggcgtgtgatctgccaggacgctttgtggcggaatctgccgaagttctcctccccaggctcgttagctgtccaggaccactcgaccaggatcagcaggaggccgcccgggcggcgcttcaggggggaggccctccttatggtcccccctctacctggtctgtgtccaccatggatgcattacggggactgctcccagtgctcggacagccaattatccgatccattccgcaggggatcgtggcagcttggcgccagaggtcgtctcgcgatccctcctggcggcagcctgagcgcaccattttgagacccagatttagaagagaggtggagaagacagcctgccctagtggaaagaaggccagggaaatcgatgagtcccttatcttttataaaaaatgggagttggaagcctgtgtcgatgcagcactgctggccactcagatggaccgggtcaatgctattccgtttacctatgagcagctggacgtgctaaagcacaaacttgatgaactgtacccccagggatacccagagagcgtcattcagcacctgggctatttgttcctgaagatgtctcccgaggacatcagaaagtggaatgttaccagcctggaaacattaaaggctttgctcgaggtcaataagggccacgagatgtcaccccaggttgccacgctgatcgacagatttgttaaaggccgaggccagcttgacaaagacactctggacacactgactgccttctatcctggatatctgtgctctttgtctcctgaggagctgtcttccgtgcctcccagttccatctgggcagtgcgcccccaggatctggacacttgtgaccctcgccagcttgacgtgttgtacccgaaagctcggttagctttccagaacatgaatggatccgagtacttcgtgaagatacagtcatttctgggtggcgctccaaccgaggacctgaaggctcttagccaacagaacgtgtctatggacctggccacttttatgaaactaagaacagacgccgtgcttcctctcactgtcgcggaagtacaaaagctgctgggacctcacgtcgaaggcctgaaggccgaggagaggcatcgacccgtccgcgactggatcttacgccagcggcaggatgacttggacacactgggccttggactgcagggcggcattccaaatggctacttagtacttgatctgtctatgcaagaggcactttccggcactccttgcctgttagggccagggcccgtattgaccgttttagcactgctgctggcgagcacactcgcctag

SEQ ID NO: 293774 - DNA, 1869 bp, Artificial Sequence
  derived and/or modified sequence
atggccctgcccaccgcccggcccctgctgggcagctgcggcacccctgccctgggttctctcctcttcttgttgtttagccttgggtgggttcaaccgtccaggaccttggcgggcgaaacagggcaagaagctgccccccttgatggggttctggcgaaccctcccaatatctcgagcctgagccctcgccagctgcttggctttccttgcgccgaggtgtcagggttgtccacagaacgggtacgggagttagccgtcgctctcgctcagaagaacgtgaaactgtctacggagcagcttcgctgcttagcccaccgcctgagtgagcccccagaggatttggacgcgctcccgctcgatctgctgcttttcttgaaccccgacgctttctctggccctcaggcgtgcacaaggttcttttcaaggatcacaaaggccaacgtggacttgttgcctagaggggcccccgagagacagagactgctgccagccgccttggcatgttggggggtacgggggtccctgctatcagaagcagacgtgagagcgctcggggggttggcgtgcgaccttcctggcagatttgtagctgagtcagctgaggtgctgttgccccgcctagtgtcgtgcccagggcctctggatcaggatcaacaggaagccgccagagcggctctacagggcgggggcccgccctacggcccccccagtacttggtctgtcagtaccatggatgcactgcgcggacttctaccagtcttagggcagcctataatcagatctatcccacaaggcattgttgccgcatggcgtcagcgttcaagcagggatccttcatggcgccagcccgaaaggacaatactgcgtcctcggttccgacgggaggtagagaagaccgcctgtccctcaggaaagaaggccagagaaatagatgagtcccttattttctataagaaatgggaattagaagcctgcgttgacgccgccttgctcgcgacgcagatggaccgtgtgaatgccattccatttacctacgagcagctagatgttctgaaacacaagctcgacgagctttaccctcagggctaccccgagtctgttattcagcacctggggtacctgtttctcaagatgagccccgaagatataaggaaatggaacgttactagcttagagacccttaaggcattgctggaggtgaataaaggtcatgagatgtcccctcaggtggctacgttgatcgatcgcttcgtgaagggtagggggcagctcgataaagatactttggatactctcacggctttttatcccgggtatttgtgtagcctcagtcctgaggagctaagtagtgtccctccaagttcgatctgggcagtgaggcctcaggacttggatacatgtgatccccggcagctggacgtgctgtaccccaaggcccgactcgcctttcaaaatatgaatgggtccgaatatttcgtaaagattcaatctttcttaggcggcgctccaaccgaggacctcaaagccctcagccagcaaaatgtatccatggacctagcaactttcatgaagctaaggacggacgcagtcctcccactcaccgtcgctgaggtccagaagctgcttgggccccacgttgaggggttgaaggctgaagaacgccaccgcccagtcagagattggatcctccgccagagacaggatgatctcgatacacttggtctggggcttcaaggcggaatccccaatggctacctggtactcgacttaagtatgcaggaggctctgagcggtactccttgtcttctggggccagggcccgtcctcacagtgctggctctgctgctagccagcaccttagcctag

SEQ ID NO: 293775 - DNA, 1869 bp, Artificial Sequence
  derived and/or modified sequence
atggccctccccaccgccaggccactgctcggatcgtgcggaactccagcccttggtagcttgttattcctgttattttccctcggttgggttcaaccaagtcggacgttggccggagagacaggccaggaggcagctccactggacggcgtgctggctaatccacccaatatcagttctttgtcccccagacaacttcttggtttcccctgcgcagaagtttcaggcctatctaccgaacgagtacgcgaattggcagtggcactggctcaaaagaacgttaagctgagcacggaacagctaagatgtctggcacaccggttgtctgaacctccggaggacctggacgcgctgccgctggacctgcttctgtttctgaatcctgacgcattctccggcccacaggcatgcacaagattttttagtaggatcacgaaagctaacgtggatctgttgccgaggggcgctcccgagaggcagagactacttcctgcagcccttgcctgttggggagtcaggggatccctcctttctgaggccgatgttcgcgctctcgggggtttggcctgcgacttgcctgggcgtttcgtggctgagagtgcggaagttttgctaccccgacttgtatcctgcccaggacctcttgatcaagaccagcaggaggcagcccgtgccgctctgcaagggggtggaccgccttacggccctccatccacctggtctgtaagtaccatggatgctctgcgcggattgctgcccgttctgggccagcccattatccggtcgatcccacagggcatcgttgccgcttggagacagcgctctagtcgtgatccttcttggcgccagccagaaagaacaatcctaagaccgcgttttcgaagggaagtagagaagaccgcatgcccatccggcaagaaagcccgagaaatcgatgagtcgttgatattttacaagaagtgggagctggaggcctgtgtggacgctgcactcctcgctactcagatggacagagttaacgctattcctttcacctacgagcagctggatgtactgaagcataagctagatgagctgtatccacagggatacccagagagcgttattcagcatctgggatacttgttcctaaagatgtctcctgaggacattagaaaatggaacgtcacatcccttgagacgcttaaagcgctcctggaagttaacaaagggcacgagatgtctccacaggttgctacactgatcgatcgattcgttaaaggcagggggcaacttgacaaagacaccctagacaccctcaccgctttttaccccggatatctgtgtagtctatctcctgaagagttatcctctgtcccaccatcatccatctgggcggtccggcctcaagacctggatacctgcgaccctaggcagctcgatgtgctgtacccaaaggccagactagcattccagaacatgaacgggagtgaatatttcgtgaaaatccagtcttttctaggcggagctccaacagaagatctgaaggctctcagccagcagaacgtgtccatggatttggccacttttatgaaactcagaacagatgcggttctgcctttgaccgtagcggaagttcagaagctcctggggcctcacgtggagggcttgaaggccgaggagcgccaccgcccagtgcgcgattggattcttaggcagcgccaagacgacttagacactctgggattaggactccagggcggaattcctaacggatatctagtgttagatcttagtatgcaagaagctctcagcggcacaccatgccttctgggccctggaccagtgttaaccgtgctcgctctgcttcttgcctctactttagcgtag

SEQ ID NO: 293776 - DNA, 1869 bp, Artificial Sequence
  derived and/or modified sequence
atggccctgccgacggccaggcccctgctgggatcttgcggcacacctgcccttggcagtttgctgttcctattgttcagtctcgggtgggtccagccgtcccgcaccctcgcgggtgaaacagggcaggaggccgcacccctcgacggggtcttggccaatcctccgaatatctcatccctaagtccccgtcagctgttgggctttccatgcgcggaagtaagcggcctgagcacagagagagtgagggagctagccgtggccctggcacagaaaaatgtgaaactttccacagaacagcttcgctgtctggcacatcgcctctctgagccccctgaggatctcgacgcattgcctctcgatctgttattgttcttaaatcccgacgcgttctctggacctcaggcttgtacgcgttttttttcaaggatcaccaaagctaacgtcgacctactccccagaggggcacctgagaggcagagactcttacctgcagccctcgcatgctggggcgtgaggggctccctgctatccgaagcagacgtgcgcgcactcggtggtttggcttgtgacctgcccggacgattcgtcgctgagagcgcggaggtgctgctgccgaggttggtgtcatgtcctgggcctctggatcaggatcagcaagaagctgctcgagcggcactgcagggcggaggccctccgtacggccctcccagcacatggtctgtgtcgacaatggatgccctgaggggcctgttgccggtgttgggccaacccattattcgtagcatcccccaagggattgttgcggcttggagacaacggagcagcagggacccatcttggcggcagccagaacgcacgatcttgaggcccagatttagaagagaggtggaaaagaccgcttgtcctagcggtaaaaaagcaagggaaattgatgagagtctgatattttacaagaaatgggaattagaggcctgcgtcgacgccgctttgcttgcaacacagatggatcgtgtgaacgccattccattcacatacgagcaactggatgtcctgaaacacaaattggacgagttatatccccaggggtatccagagtcagttatccagcatttaggctacctgtttcttaagatgtcgccagaagacatccggaagtggaacgttacgagcctggaaaccctgaaggccctccttgaggtcaataaagggcacgaaatgagcccgcaggttgcaaccctgatcgatcgtttcgtaaagggcagaggccagttggacaaggatactcttgatactcttactgcattctatcctgggtacttgtgcagcttgagtcccgaggaactgagttccgttcccccaagctcgatctgggctgtgaggccacaggatctggatacttgtgacccacgccagctggacgtgctctatcccaaagcaaggctggcattccagaacatgaacggtagcgagtattttgtgaagatccagtcgtttctgggtggcgctccaactgaggacctgaaggcgctgagccagcagaacgtctccatggatctggctaccttcatgaagctccgtactgacgctgtgcttccacttaccgttgccgaagtgcaaaagcttctagggcctcacgttgaaggactaaaggcagaggaacgtcatcggccagtgcgggattggatcctgaggcagcggcaggacgatctggacacactggggcttggactccaaggtggaatccccaacgggtatctggtgttagacctgtctatgcaggaggcattgtccggaaccccttgcctcttgggccctggacccgtgctgaccgtcttggcactcctcctggcttctactttggcctag

SEQ ID NO: 293777 - DNA, 1869 bp, Artificial Sequence
  derived and/or modified sequence
atggcccttccaacagcgaggccactgttagggagctgcggtactcctgcccttggaagtctcctgttcctgctgtttagcctcggatgggtgcaaccgagtagaactctggccggagaaacgggacaggaggcagccccactggacggagtccttgctaacccacccaacatcagcagcctgtcacctcgccaactgctggggtttccttgcgccgaggtgagtgggttaagcaccgagcgcgttagagagctggcagtcgctcttgcccaaaagaacgtcaaattatctaccgagcagctgcggtgcttggcccaccggctctcggagcctcctgaagatctggatgctttacctctggatttgttgttgttccttaaccccgacgccttctctgggcctcaagcttgcacacgtttcttctcacgcataaccaaggctaacgtggacttgctgccacggggagctcccgagaggcagcggctgttgccagcagcattagcctgctggggagtgcgaggctctcttttaagcgaggcagatgtgcgagctctgggcggtctggcttgcgatcttcctggccgttttgttgccgagtccgctgaagtgcttcttcctcggctcgtgagctgcccgggtccactcgaccaagaccagcaagaagccgctcgcgctgccctccagggcggaggtcccccttatggacctccgtctacgtggtctgtctccaccatggatgctttacgcggactgctgcctgttctgggacagccaattatacggtcaatccctcaaggaatagtggccgcatggaggcagcggtctagccgcgacccatcgtggcggcagcccgaacgcaccatattgcgccctcggttcaggagggaagtcgagaaaactgcctgtcccagtggaaagaaagcacgcgaaattgacgagagtctgattttctataagaagtgggaattggaggcatgtgtagatgcagccctgctggccacccagatggatcgtgtgaacgccatcccatttacatacgaacagctggacgtactcaagcacaaactcgacgaactctacccacagggctacccagagtcggtgatccagcatttgggatatctgttcttaaaaatgtcacccgaggatatcagaaagtggaatgttacatccttggaaaccctcaaagctctcctggaggtcaataaagggcatgagatgtccccccaggtggccactctcatagaccgattcgtgaaagggagagggcaactcgataaggacaccctggatactttaacagccttctaccccggttatctgtgttctttatctccagaggagctttcctccgtgcccccttcctccatttgggctgtgcgcccacaggatctcgacacctgtgacccacgccaactggatgtcctgtaccccaaggcaagattagcttttcagaatatgaatgggtccgagtactttgttaagatccagtccttcctggggggagcccctacagaagatctaaaggccctttctcagcaaaacgtgtctatggatctcgctaccttcatgaaacttcggaccgacgccgtgctgccactcacggtggctgaagtgcagaaactcctaggcccacacgtggaggggcttaaagccgaggaacgccatagaccggttcgcgactggattctccggcagcgccaggatgatctggacacgctcgggctgggcctccagggtggtatccccaacgggtacctggtgctggacctctctatgcaagaagctctctcgggaactccatgcttgctcggcccaggtccagtgctcactgtacttgcccttctactggcgtccacactggcatag

SEQ ID NO: 293778 - DNA, 1869 bp, Artificial Sequence
  derived and/or modified sequence
atggccctgcccaccgccagacccctgctgggcagctgcggcacccccgccctgggcagcctgctgttcctgctgttcagcctgggctgggtgcagcccagcagaaccctggccggcgagaccggccaggaggccgcccccctggacggcgtgctggccaacccccccaacatcagcagcctgagccccagacagctgctgggcttcccctgcgccgaggtgagcggcctgagcaccgagagagtgagagagctggccgtggccctggcccagaagaacgtgaagctgagcaccgagcagctgagatgcctggcccacagactgagcgagccccccgaggacctggacgccctgcccctggacctgctgctgttcctgaaccccgacgccttcagcggcccccaggcctgcaccagattcttcagcagaatcaccaaggccaacgtggacctgctgcccagaggcgcccccgagagacagagactgctgcccgccgccctggcctgctggggcgtgagaggcagcctgctgagcgaggccgacgtgagagccctgggcggcctggcctgcgacctgcccggcagattcgtggccgagagcgccgaggtgctgctgcccagactggtgagctgccccggccccctggaccaggaccagcaggaggccgccagagccgccctgcagggcggcggccccccctacggcccccccagcacctggagcgtgagcaccatggacgccctgagaggcctgctgcccgtgctgggccagcccatcatcagaagcatcccccagggcatcgtggccgcctggagacagagaagcagcagagaccccagctggagacagcccgagagaaccatcctgagacccagattcagaagagaggtggagaagaccgcctgccccagcggcaagaaggccagagagatcgacgagagcctgatcttctacaagaagtgggagctggaggcctgcgtggacgccgccctgctggccacccagatggacagagtgaacgccatccccttcacctacgagcagctggacgtgctgaagcacaagctggacgagctgtacccccagggctaccccgagagcgtgatccagcacctgggctacctgttcctgaagatgagccccgaggacatcagaaagtggaacgtgaccagcctggagaccctgaaggccctgctggaggtgaacaagggccacgagatgagcccccaggtggccaccctgatcgacagattcgtgaagggcagaggccagctggacaaggacaccctggacaccctgaccgccttctaccccggctacctgtgcagcctgagccccgaggagctgagcagcgtgccccccagcagcatctgggccgtgagaccccaggacctggacacctgcgaccccagacagctggacgtgctgtaccccaaggccagactggccttccagaacatgaacggcagcgagtacttcgtgaagatccagagcttcctgggcggcgcccccaccgaggacctgaaggccctgagccagcagaacgtgagcatggacctggccaccttcatgaagctgagaaccgacgccgtgctgcccctgaccgtggccgaggtgcagaagctgctgggcccccacgtggagggcctgaaggccgaggagagacacagacccgtgagagactggatcctgagacagagacaggacgacctggacaccctgggcctgggcctgcagggcggcatccccaacggctacctggtgctggacctgagcatgcaggaggccctgagcggcaccccctgcctgctgggccccggccccgtgctgaccgtgctggccctgctgctggccagcaccctggcctag

SEQ ID NO: 293779 - protein, 287 aa, Artificial Sequence
  derived and/or modified sequence
MHSVAHPHPGVPPWVPATLIITGKRRGAAAGGAGLEHGGSGRAHLREVSAETWRTRGVGAGRLVTGPALASGPPCSQLYNGQGSPRTISWGLGHTRVGVASLLMLESLSGLALWFSPPPAASRPPGPGLSLYTDGSKAWGAPQEHGGAHASLTHSQVSPPGSGNLTQHGHVCPCVTMPALKTTPPFLSPHRGLDAASWAQIHQKLRDFSRSTQVGGKGWPRPILTPCPSSWLTSPCQAELERERAQLLVRATMAEEQLSELQEYVDQHLGRWAEGAGCDPRALVWLE

SEQ ID NO: 293780 - protein, 167 aa, Artificial Sequence
  derived and/or modified sequence
MLVLLAFIIAFHITSAALLFIATVDNAWWVGDEFFADVWRICTNNTNCTVINDSFQEYSTLQAVQATMILSTILCCIAFFIFVLQLFRLKQGERFVLTSIIQLMSCLCVMIAASIYTDRREDIHDKNAKFYPVTREGSYGYSYILAWVAFACTFISGMMYLILRKRK

SEQ ID NO: 293781 - DNA, 504 bp, Artificial Sequence
  derived and/or modified sequence
atgctcgtcctgcttgccttcattatcgccttccacatcacttccgccgctctcttattcattgcgacagtggacaatgcttggtgggtcggcgacgagttttttgccgacgtgtggcggatctgtaccaacaatactaactgtacggtaatcaatgactcgtttcaggagtatagcacgctacaggccgtccaggcgacaatgattctgtctacaatcctatgttgtatcgcctttttcatttttgtactgcagctattcaggcttaagcaaggagagcgattcgtactgacctccattattcaactcatgagctgcctgtgcgttatgattgccgcttctatctatactgacagacgcgaggacatccacgataaaaatgccaagttctatccggtaacccgagaaggtagctacggctactcatatatcctcgcatgggtcgctttcgcctgcacattcatcagcgggatgatgtatctgattctcagaaagaggaagtag

SEQ ID NO: 293782 - DNA, 504 bp, Artificial Sequence
  derived and/or modified sequence
atgctggtcttgctggcatttatcatcgccttccatatcacctccgccgctctgttattcattgccacagtagataacgcctggtgggtgggagacgagttcttcgccgacgtgtggcggatttgtactaataatactaactgtacagtgataaacgattccttccaggagtactcaactttacaggccgtccaggcaaccatgattctatctacaatattatgctgtatagccttctttatcttcgtgctgcaactcttccgcctgaagcagggcgaacgttttgtattaaccagtataatccagctcatgtcctgcctgtgcgtcatgatcgcggcttccatctacaccgaccgcagggaggatatccacgataagaatgccaagttttatcctgtgacccgggagggaagttatggatacagttacattctggcttgggtcgccttcgcatgtacattcatctccgggatgatgtacctcattttgcgaaagcgcaaatag

SEQ ID NO: 293783 - DNA, 504 bp, Artificial Sequence
  derived and/or modified sequence
atgctggtgctgctggccttcatcatcgccttccacatcaccagcgctgccctgctcttcatcgccaccgtggacaatgcctggtgggtgggagatgagttctttgctgatgtgtggaggatctgcaccaacaacaccaactgcaccgtcatcaatgacagcttccaggagtacagcaccctgcaggccgtgcaggccaccatgatcctgagcaccatcctgtgctgcatcgccttcttcatctttgtgctgcagctgttccggctgaagcagggcgagagatttgtgctgaccagcatcatccagctgatgagctgcctgtgtgtgatgattgctgccagcatctacacagacagaagagaggacatccatgacaagaatgccaagttctaccctgtgacccgggagggcagctatggctacagctacatcctggcctgggtggcctttgcctgcaccttcatcagcggcatgatgtacctgatcctgaggaagaggaagtag

SEQ ID NO: 293784 - DNA, 504 bp, Artificial Sequence
  derived and/or modified sequence
atgctggtgctgctggccttcatcatcgccttccacatcaccagcgccgcacttttgttcattgctaccgtcgacaacgcatggtgggtgggagacgaattcttcgcggatgtgtggagaatttgcaccaacaacaccaattgcacggtaatcaacgattcgttccaggagtacagcaccttgcaggcagtacaggctaccatgatcctctctaccattctatgttgcatcgccttctttattttcgtgctgcaactctttaggttgaaacagggtgagaggttcgttttgacctcaatcatacagttaatgtcttgcctctgtgttatgattgccgctagtatttatacagaccgtagagaagacattcacgataaaaacgctaagttttatccagttactcgggaagggagttacggttactcttatattttggcatgggtcgccttcgcatgtacgtttatctctggcatgatgtacctgatactgcgcaagagaaagtag

SEQ ID NO: 293785 - DNA, 504 bp, Artificial Sequence
  derived and/or modified sequence
atgctggtgctgctggccttcatcatcgccttccacatcaccagcgctgcactgctttttatcgcaaccgtcgacaatgcatggtgggtgggagacgaattctttgcagatgtatggcgtatatgtactaataacactaactgcacagtcatcaatgacagctttcaggagtactccactcttcaggctgtgcaggctaccatgatcctgtccacaatcctgtgctgcatcgcgttttttatttttgtgctgcagctgtttaggctgaaacagggcgaaagattcgtcctgacatccataatccagttgatgtcttgtctttgcgttatgatcgcagccagcatctataccgataggcgtgaagacatccatgacaaaaacgccaagttttaccctgtcacccgcgaaggaagttacggctattcctacatcctggcctgggtggccttcgcttgtacgtttatttcaggcatgatgtacctgattcttcgtaaacgtaaatag

SEQ ID NO: 293786 - DNA, 504 bp, Artificial Sequence
  derived and/or modified sequence
atgctggtcctcctggccttcattatcgcgttccacattactagcgccgctcttctgttcattgcgacagttgacaacgcctggtgggtgggagacgaatttttcgcggacgtctggcggatttgtacaaataatactaactgcacggtgatcaacgactctttccaggaatattctactctgcaagccgtccaggctaccatgattctctctaccatcctatgttgtatagctttcttcatttttgtgctgcagctttttagacttaaacaaggagaaaggttcgttctgacttcgatcattcagctcatgagctgcctgtgtgttatgattgctgctagcatttatactgaccggagggaagacattcatgacaagaatgccaaattctatcccgtgaccagggaggggtcctacggttactcatatattctagcctgggtcgcttttgcgtgtaccttcatcagcggaatgatgtacttgatactaagaaagcggaaatag

SEQ ID NO: 293787 - DNA, 504 bp, Artificial Sequence
  derived and/or modified sequence
atgctcgtgcttttagccttcattatcgcgttccacatcacttctgctgccctgctctttattgccactgttgacaacgcctggtgggtcggcgatgaattttttgccgatgtctggcggatctgcacgaataatacgaattgtacagtgatcaatgattcctttcaggagtactctacactccaagcggttcaggccactatgatcttgagcacaattctctgttgcattgcctttttcattttcgtgctgcagctttttcgactgaaacagggagagcgctttgtgctgacttccattatccagctcatgagctgtctgtgcgttatgatcgccgcttccatatatactgacagacgcgaggacatccatgataaaaatgcaaagttttaccctgtaaccagggagggctcctatggatacagctatattctcgcctgggtcgcttttgcgtgtacctttatttcagggatgatgtacctcattctgaggaaaaggaagtag

SEQ ID NO: 293788 - DNA, 504 bp, Artificial Sequence
  derived and/or modified sequence
atgctggtgctgctggccttcatcatcgccttccacatcaccagcgccgccctgctgttcatcgccaccgtggacaacgcctggtgggtgggcgacgagttcttcgccgacgtgtggagaatctgcaccaacaacaccaactgcaccgtgatcaacgacagcttccaggagtacagcaccctgcaggccgtgcaggccaccatgatcctgagcaccatcctgtgctgcatcgccttcttcatcttcgtgctgcagctgttcagactgaagcagggcgagagattcgtgctgaccagcatcatccagctgatgagctgcctgtgcgtgatgatcgccgccagcatctacaccgacagaagagaggacatccacgacaagaacgccaagttctaccccgtgaccagagagggcagctacggctacagctacatcctggcctgggtggccttcgcctgcaccttcatcagcggcatgatgtacctgatcctgagaaagagaaagtag

SEQ ID NO: 293789 - DNA, 5197 bp, Artificial Sequence
  derived and/or modified sequence
ggcgggatcggggaaggaggggccccgccgcctagagggtggagggagggcgcgcagtcccagcccagagcttcaaaacagcccggcggcctcgcctcgcacccccagccagtccgtcgatccagctgccagcgcagccgccagcgccggcacatcccgctctgggctttaaacgtgacccctcgcctcgactcgccctgccctgtgaaaatgttggtgcttcttgctttcatcatcgccttccacatcacctctgcagccttgctgttcattgccaccgtcgacaatgcctggtgggtaggagatgagttttttgcagatgtctggagaatatgtaccaacaacacgaattgcacagtcatcaatgacagctttcaagagtactccacgctgcaggcggtccaggccaccatgatcctctccaccattctctgctgcatcgccttcttcatcttcgtgctccagctcttccgcctgaagcagggagagaggtttgtcctaacctccatcatccagctaatgtcatgtctgtgtgtcatgattgcggcctccatttatacagacaggcgtgaagacattcacgacaaaaacgcgaaattctatcccgtgaccagagaaggcagctacggctactcctacatcctggcgtgggtggccttcgcctgcaccttcatcagcggcatgatgtacctgatactgaggaagcgcaaatagagttccggagctgggttgcttctgctgcagtacagaatccacattcagataaccattttgtatataatcattattttttgaggtttttctagcaaacgtattgtttcctttaaaagccaaaaaaaaaaaaaaaaaaaaaaaaaaaagaaaaaagaaaaaaaaaatccaaaagagagaagagtttttgcattcttgagatcagagaatagactatgaaggctggtattcagaactgctgcccactcaaaagtctcaacaagacacaagcaaaaatccagcaatgctcaaatccaaaagcactcggcaggacatttcttaaccatggggctgtgatgggaggagaggagaggctgggaaagccgggtctctggggacgtgcttcctatgggtttcagctggcccaagcccctcccgaatctctctgctagtggtgggtggaagagggtgaggtggggtataggagaagaatgacagcttcctgagaggtttcacccaagttccaagtgagaagcaggtgtagtccctggcattctgtctgtatccaaaccagagcccagccatccctccggtatcggggtgggtcagaaaaagtctcacctcaatttgccgacagtgtcacctgcttgccttaggaatggtcatccttaacctgcgtgccagatttagactcgtctttaggcaaaacctacagcgccccccccctcaccccagacctacagaatcagagtcttcaagggatggggccagggaatctgcatttctaacgcgctccctgggcaacgcttcagatgcgttgaagttggggaccacggtgcctgggccaggtcagcagagctgcctcgtaaatgctggggtatcgtcatgtggagatggggaggtgaatgcaacccccacagcaggccaaaaccttggcctccatcgccacagctgtctacatctagggccccaaaactccattcctgagccatgtgaactcatagacaccttcagggtgtggggtacagcctccttcccatcttatcccagaaggcctctcccttcttgtccagcccttcatgctacacctggctggcctctcacccctatttctagagcctcagaggacccatccaccattcattcattcattcattcattcattcattcattcattcatcaacataaatcataacttgcatgcatgtgccaggcacaggggataccctctagagacaatctcctcctagggctcatggcctagtggaggagacagattaaaacttaattagaaaaactggctgggtacagtggctcatgcttgtaatcccagcactttgggaggctgaggcgggtggatcacctgaggtcaggagttcaagaccagcctggccaaaatggtaaaacctgtctctactaaaaatacaaaaatgagctgggcgtggtggtgcatgcctgtaatcccagctatcaggtggctgaggcaggagaatcacttgaaatgggaggtggaggttgcagtgagccgagaccgtgccactgcactccagcctgggtgacagagtgagactccatctcaaaaaaagaaaaaaaagaaaagaaactaattacacactgtgatggaggctgcaaagaacaccactaagaattcaaaatcagctgggtgcggtggctcacacctgtaatcccagcactttgggaggctgaggcaggtggatcacaaggtcaggagttcaagaccagcctggccaacatggtgaaaccccgtctctaccgaaaatacaacaaaattagcccggtgtggtggcaggtgcctgtaatcccagctacttaggaggctgaggcaggagaatcgcttgaaactgggaggcggaggtcgcagtgagccgagattcaccactgcactccagcccaggcgacagtctgagactccgtctcaaaaataaaacgattcaaaatcgaggcctgtggcatggtagggaggctgctttacgcgtgcctattattaaatgctcctggaggcatttaggtatttagatcagtctaaatatagctccattcagttcgtgcagatgacagttattgggcagtacctgtctgtgtaacacccagaaaacatgtctgtggaggggcccatggtcccgacagtaaatgcggtgagagggtcccatagagctggagttttcaagctttaggggttcccgtgctgcttgggacaggctgattcagagggtctgggtgaatgatttccaggtgattttaagactgtgctgagaaatagggcttttggggccttgtccttcaggatcaaagcatgatgctgtgtggcaatgcagaccacccaggaaccatcccaggagataagctctttgcacctcattgtctttttctgcttatgttggagcaggatgctgggggctgtcctgggatggggtgtgggacctcgtgctatttaaatacttttgcacttgaccttctgctgagtggagtggtggtttgccatcagctcagttccagtggagctgaagagacatctggtttgagtagttttagggccaccatggatatctcttcaatgcaggattggctctttccatctgctctttcattcatttgtttttgacagatagtattaaatgtttaccatgttccaggcactgtgtgaggctctgaaaatacaggggtgagcaaatccagatatcctccctgccatcatgaagtttggagtctatgagataggaccccctccctatggagaagccaccaatgcagtacagggtgacctggggccagagacaggacaaatgtcacctcctgcctccatgagatactctcactagtcatattgtgggcaagaatgtggcttacacccctagggttaacaggatgctacccaagctcatggaggaagttgaatcttaagttcccttgaaactttctaccttggtggcttttctataattttcttttttctttttcttttttttttttttttttgagactgagttttgctcttgttgcccaggctggagtgcagtggcaccatcttggctcaccgcaacctctgcctcctgggttcaagtgattctcctgcctcagcctcccgagtagctgggattacaggcatgtcccaccatgcccagctaatttttgtatttttagtagagatggggtttctccatgttggtcaggctggtttcgaactcccaacctcaggtgatccgcccacctcagccttccaaagtgctgggattacaggcatgagccactgcgtctggccttctataattttctggtagtcacgatggaaacaaacaaaacaccttagaaccagagatcgaccccctcaagcaatacatcaattcccttcacaagaaacgtcggggctacatgagtatctgtgttgaatgcggtctgaaatgatcctatggattttcccggctggttgccactgctgtacaacattcagtgcccacatccacctgtgccattaagcttttttgagacatgagagatgcctcttccctgctgtatgacatgcatttgggaagttggaaagaaatgacaaaatcagggagaaaacatccaagcttcttacctgtagatagaatcagccctcacttggtgcttattaccagttattcaagaacaataacaacaacaaaattagtagacatccaagaagcacatattaggaccaaagatagcatcaactgtatttgaaggaactgtagtttgcgcattttatgacatttttataaagtactgtaattctttcattgaggggctatgtgatggagacagactaactcattttgttatttgcattaaaattattttgggtctctgttcaaatgagtttggagaatgcttgacttgttggtctgtgtgaatgtgtatatatatatacctgaatacaggaacatcggagacctattcactcccacacactctgctatagtttgcgtgcttttgtggacacccctcatgaacaggctggcgctctaggacgctctgtgttcactgatgatgaagaaacctagaactccaagcctgtttgtaaacacactaaacacagtggcctagatagaaactgtatcgtagtttaaaatctgcctcgcgggatgttactaaactcgctaatagtttaaaggttacttacaatagagcaagttggacaattttgtggtgttggggaaatgttagggcaaggcctagaggttcattttgaatcttggtttgtgactttagggtagttagaaactttctacttaatgtacctttaaaatagtccattttctatgttttgtataatctgaaactgtacatggaaaataaagtttaaaaccagattgcccagagcaagactctaatgttcccaacggtgatgacatctagggcagaatgctgccattttgaggggcagggggtcagctgatttctcatcaagataataatgtatggtttttacactaagcaactgataaatggacaatttatcactgga

SEQ ID NO: 293790 - DNA, 781 bp, Artificial Sequence
  derived and/or modified sequence
ggcctgggagtccttgcagggtggcctgggtgactgctcaccagcccggccctccccagggttctgggccagagcctccctggccgttggagcgggagctgtgggtggaacacttctgaattgggagattgcctcggacctccagacgccgaacatctcagcacatcccgctctgggctttaaacgtgacccctcgcctcgactcgccctgccctgtgaaaatgttggtgcttcttgctttcatcatcgccttccacatcacctctgcagccttgctgttcattgccaccgtcgacaatgcctggtgggtaggagatgagttttttgcagatgtctggagaatatgtaccaacaacacgaattgcacagtcatcaatgacagctttcaagagtactccacgctgcaggcggtccaggccaccatgatcctctccaccattctctgctgcatcgccttcttcatcttcgtgctccagctcttccgcctgaagcagggagagaggtttgtcctaacctccatcatccagctaatgtcatgtctgtgtgtcatgattgcggcctccatttatacagacaggcgtgaagacattcacgacaaaaacgcgaaattctatcccgtgaccagagaaggcagctacggctactcctacatcctggcgtgggtggccttcgcctgcaccttcatcagcggcatgatgtacctgatactgaggaagcgcaaatagagttccggagctgggttgcttctgctgcagtacagaatccacattcagataaccat

SEQ ID NO: 293791 - protein, 247 aa, Artificial Sequence
  derived and/or modified sequence
MRTEAIARPLEINETEKVMRIAIKEILTQVQKTKDLLNNVASDEANLEAKIEKRKLELERNRKRLETLQSVRPCFMDEYEKTEEELQKQYDTYLEKFQNLTYLEQQLEDHHRMEQERFEEAKNTLCLIQNKLKEEEKRLLKSGSNDDSDIDIQEDDESDSELEERRLPKPQTAMEMLMQGRPGKRIVGTMQGGDSDDNEDSEESEIDMEDDDDEDDDLEDESISLSPTKPNRRVRKSEPLDESDNDF

SEQ ID NO: 293792 - protein, 191 aa, Artificial Sequence
  derived and/or modified sequence
MDEYEKTEEELQKQYDTYLEKFQNLTYLEQQLEDHHRMEQERFEEAKNTLCLIQNKLKEEEKRLLKSGSNDDSDIDIQEDDESDSELEERRLPKPQTAMEMLMQGRPGKRIVGTMQGGDSDDNMEAAPALLGKCKTSSSKKQEDSEESEIDMEDDDDEDDDLEDESISLSPTKPNRRVRKSEPLDESDNDF

SEQ ID NO: 293793 - protein, 346 aa, Artificial Sequence
  derived and/or modified sequence
MEDSGKTFSSEEEEANYWKDLAMTYKQRAENTQEELREFQEGSREYEAELETQLQQIETRNRDLLSENNRLRMELETIKEKFEVQHSEGYRQISALEDDLAQTKAIKDQLQKYIRELEQANDDLERAKRATIMSLEDFEQRLNQAIERNAFLESELDEKENLLESVQRLKDEARDLRQELAVQQKQEKPRTPMPSSVEAERTDTAVQATGSVPSTPIAHRGPSSSLNTPGSFRRGLDDSTGGTPLTPAARISALNIVGDLLRKVGALESKLASCRNLVYDQSPNRTGGPASGRSSKNRDGGERRPSSTSVPLGDKGLGKRLEFGKPPSHMSSSPLPSAQGVVKMLL

SEQ ID NO: 293794 - DNA, 1041 bp, Artificial Sequence
  derived and/or modified sequence
atggaggactccggaaaaactttcagttccgaggaagaggaagcgaattactggaaagaccttgccatgacgtataagcaacgggccgagaatacccaggaagaactcagggagtttcaggagggaagtcgagagtacgaggctgaattggagacacagttgcaacagattgagacacgtaaccgggacttgctttctgaaaataatcgactgaggatggagctggaaactataaaggagaaatttgaggtgcagcactctgagggttacaggcaaattagcgccctagaggacgatttggcccagacaaaggccataaaagatcagctgcagaaatacatcagagagttagagcaagcaaacgacgacctcgagagggctaagcgcgccactatcatgtccctggaagattttgagcagcgtctgaatcaggcgattgagaggaacgcctttctggaatcggagctcgacgaaaaggaaaatctcctggagtcggtgcaaaggctcaaggatgaggccagagatctcaggcaagagctggctgtccagcagaagcaagagaagccaaggactcccatgccctcatccgtagaagcagaacgtacagacacggctgtgcaagctaccggcagcgtccccagtacaccaatcgcccatcgtggtcccagctctagtcttaacacccccggctctttcaggagaggcctggatgacagcaccgggggaactcctctgactccagccgccagaatctctgcattgaatatcgtcggggaccttctgcgcaaagtgggggcactggaaagcaaactggcttcctgcagaaatctcgtatacgatcagagtcccaaccgcaccgggggaccagcatcaggcaggagctcgaagaaccgggacgggggagagcgtcgccccagctccacatctgtacccttgggggataagggattaggtaaaagactggaatttggaaaacctccttcccatatgtcaagctctcctctccctagtgctcagggggttgtgaaaatgctgctctag

SEQ ID NO: 293795 - DNA, 1041 bp, Artificial Sequence
  derived and/or modified sequence
atggaggacagcggcaagaccttcagcagcgaggaggaggaggccaactactggaaggacctggccatgacctacaagcagagagctgagaacacccaggaggagctgcgggagttccaggagggcagccgggagtatgaggccgagctggagacccagctgcagcagatcgagaccaggaacagagacctgctgtctgagaacaaccggctgaggatggagctggagaccatcaaggagaagtttgaggtgcagcacagcgagggctaccggcagatcagcgccctggaggatgacctggcccagaccaaggccatcaaggaccagctgcagaagtacatccgggagctggagcaggccaatgatgacctggagcgggccaagagggccaccatcatgagcctggaggactttgagcagaggctgaaccaggccatcgagagaaatgccttcctggagagcgagctggatgagaaggagaacctgctggagagcgtgcagaggctgaaggatgaggcccgggacctgcggcaggagctggccgtgcagcagaagcaggagaagcccaggacccccatgcccagctctgtggaggccgagaggacagacacagctgtgcaggccactggatctgtgcccagcacccccatcgcccaccggggccccagcagcagcctgaacaccccaggcagcttcagaagaggcctggatgacagcactggaggcacccccctgaccccagctgcccgcatcagcgccctgaacatcgtgggggacctgctgaggaaggtgggcgccctggagagcaagctggccagctgcaggaacctggtgtatgaccagagccccaacagaactggaggccctgccagcggccgcagcagcaagaacagagatggaggagagcggcggcccagcagcacctctgtgcccctgggggacaagggcctgggcaagaggctggagtttgggaagccacccagccacatgagcagcagccccctgcccagcgcccagggcgtggtgaagatgctgctgtag

SEQ ID NO: 293796 - DNA, 1041 bp, Artificial Sequence
  derived and/or modified sequence
atggaggacagcggcaagaccttcagcagcgaggaggaggaggccaattactggaaggatctggccatgacatacaaacagagggcagagaatacacaagaggaattgcgcgaatttcaggaaggttcacgcgagtacgaggcagagctggagacccagctgcagcagattgaaacccggaacagagacctcctgagcgagaataaccggttacgcatggagttggagacgatcaaagaaaagtttgaagtccagcattcagagggttataggcaaatctcagcgctcgaggacgatctcgctcagacaaaagcaattaaagatcaattgcagaagtatatacgcgagcttgaacaggctaacgacgacctggaacgcgccaagcgcgccacaataatgtcactggaagacttcgagcagcggcttaatcaggctattgagagaaatgccttcctcgaatccgaactggacgagaaagaaaatcttctggagagcgtacagagattgaaggatgaggcccgggacttacggcaggaactagccgtgcagcagaagcaggagaaaccccgcaccccaatgccctcttccgtggaggcagagagaactgacaccgctgtccaggctacagggagtgtcccaagcacaccaatcgctcatagaggcccgtcatcttcacttaacacgcctggctctttcagaaggggcctagacgactccacaggaggcacccccctgacgcctgccgctcgcatttccgcactgaacattgttggtgatctcctcaggaaggtgggagctctcgagagcaaactggccagctgtagaaatctggtctacgatcagtcccccaatcgcaccggcggtccagcctctggtcggtcctctaagaaccgagacggtggagaaagacgcccatcctccacttctgtgccacttggtgataaaggcttaggcaagagactggaatttggtaagccgcctagccacatgtcttcttcacccttgccttccgcgcagggggtggtgaagatgctgttgtag

SEQ ID NO: 293797 - DNA, 3162 bp, Artificial Sequence
  derived and/or modified sequence
ctctcctagacaccatgccacaaggagagtgatctcttcccctgttttcacaatggaggactccggaaagactttcagctccgaggaggaagaagctaactattggaaagatctggcgatgacctacaaacagagggcagaaaatacgcaagaggaactccgagaattccaggagggaagccgagaatatgaagctgaattggagacgcagctgcaacaaattgaaaccaggaacagagacctcctgtccgaaaataaccgccttcgcatggagctggaaaccatcaaggagaagtttgaagtgcagcactctgaaggctaccggcagatctcagccttggaggatgacctcgcgcagaccaaagccattaaagaccaattgcagaaatacatcagagagctggagcaagcaaatgacgacctggaaagagccaagcgcgccacgatcatgtctctcgaagactttgagcagcgcttgaatcaggccatcgaaagaaatgccttcctggaaagtgaacttgatgaaaaagagaatctcctggaatctgttcagagactgaaggatgaagccagagatttgcggcaggaactggccgtgcagcagaagcaggagaaacccaggacccccatgcccagctcagtggaagctgagaggacagacacagctgtgcaggccacgggctccgtgccgtccacgcccattgctcaccgaggacccagctcaagtttaaacacacctgggagcttcagacgtggcctggacgactccaccggggggacccccctcacacctgcggcccggatatcagccctcaacattgtgggagacctactgcggaaagtcggggcactggagtccaaactcgcttcctgccggaacctcgtgtacgatcagtccccaaaccgaacaggtggcccagcctctgggcggagcagcaagaacagagatggcggggagagacggccaagcagcaccagcgtgcctttgggtgataaggggttggacacgagttgccgctggttgtccaaatcaacaaccaggtcgtccagctcctgctgaagcctgttcttggtcttttccagtttatcataagcggccgccttctcctcgtactgctgggtgaggttctcgatctccttctggaacctcttcttcccctcttccagagcttccacggtgctggcaaagtcctgcagcttcttcttcgagtcggagagctacaaggacagcgtccagggtagggtgagagggggaccatgagtggcccctgtccctggccccacagactctgagaagcgaagaccatgtctcctcgttggagaaacccaatagcaggggaagctggggggtcaagcaccatcgcaccaacactccaccgcgatctgcctgcgggggatctcagcgcagagaagttgagaggacccatgaaggaagcaaggacacggggcaggcacctggatgttgagagtggagatgtggcgctccaggttctgcttggcctccatctcctcgtccagctggtcttgcaggctgttccgctcctcctccagctggcgcagcttcgtagacacgttgagcttctgccgggtttcttcttgaagcagctcctgcaaaagggatgcaaagaggtcccagggacctgccccgaggaaggccaccccccaggtcccctggatgatgtggcaggacactcacctgggtgtcctggagctgggaactgagggacgccacgtccttggccagcttaatggccttcccctcggcctcgttaagcatccctgtgacgctctcaacttcattctaagggtgccaagagactggttagtcaaagcctctagaaggggatcctcgttgaaaggagccctttttactcaaaacacatgggctagtacttgaggtgttcactgattgagaaaatacccgtgaggtatgggactctgataaaaaaaaaaaaaaacacacacacacacaaaaaaaacagaatctgtggcttgaagggaactccgtcacctatgagttgggaccctggccctagactctgtggttctaagaacttatttgagccccaatggtattgactgggacctgatcccactaaatggatcctagatccctgccaaggttggtagagacaaagcagcaggtctgagagtccagacgaggtgctctggctggtccactctctaaggctggagaagggagaccaggatggtacttgaacgtcccagggatgctgtcccatcccttccttcctcactcctactctttgaccctgatggccaaagccagagacgcaggccctaaaggtaaaaacgtcctctctgtattctctggcttttactccctagtgtctctgcataagtccctttgaggctgttagcctacccctccatctcttccattgacaaggaggatatgaatgatcttgacactgcttatatgagggcggcaaaagccctgctctcaactgcatgtgagaaaaaaacatctcacttaattcttccctcgccccttggtccctggctgtggacatgttaaacatttgtgaaaactttggccacgtccccatgagtggcaaggcagggtaaatggctatgccaagtgaaagaagaccaaagacaaaaagaccatgtcattcagcagcttaaaacccctcaacagcttcacattgcccagagtaaggatcaacatacatgtaataggttctcaaaagccctacatcatctgggtacaagctccccctccaaccccactctgtactatctccccctacccccaaccccagctgggcactccagctctactggctgtatgtctctctcctaatttttctacttaccacagggcctttgcacacgctgttccctctgcctggtagacttatccatgctccttagggaagcctttcgtggctcctcctcccccaggttaggccccctggttatttacacttgggcatcatgtgccttccctttgctgcatcatttgacattcatttgtgtgattattcatgtctttcccttcccttcccttccccttactcggctggagtcctactggggcagcgacagtgtctcttcttccttgctgttggatctcaggattaagcacagtgcctggcatacagcaggtgctcaataaatacttatcaaattggaaaa

SEQ ID NO: 293798 - DNA, 1867 bp, Artificial Sequence
  derived and/or modified sequence
ggggggggcggggcctcgcggccctgcagcctcgtcaggctcagtcccctcccgataaacccctaaatagggactttcccggggggtgaccctggcttttttggcgaaaacccccagtttaaggaggccttccccctggcttcacgttgtggagtcgaaaggaaccttgaagcggagaatgagctcgtgacgtggacccgaggaaaaaacctgccaaccaggatttaatagaattcagctctttcaggctttggagggaaggcgatttgaacgggatttcaatgaaaaaccctgtcccttcggctttttttttttcctctctcgggtctcgtcacgtgatggtcctactttatttttaaaaattaaatggcgcatattccccagcatcctaaatctagtgcaacctagtggcaagtggagaaaaaaataactgccaacctggcttcctacgaggtcccccggagttctcgcaaagttgcgacccagttggcaaaaatacagtgtgtgcaaagactcaactggacattgccaccaagaatcaagagatttttggggactttagcaagaaaacgttatttttaaaagccctgctccaaagctggttacaaatgaatactgcgtttccagtgacaggttgggcgagcagaaaggaaatcttacgacggagtcttgccctgtcgcctaggctagagtgcagtggtgtgatctcggctcactgcaaccgccacctcccggtttcccgtgattctcctgcctcagcctcctgagtagctgggattacagacaccatgccacaaggagagtgatctcttcccctgttttcacaatggaggactccggaaagactttcagctccgaggaggaagaagctaactattggaaagatctggcgatgacctacaaacagagggcagaaaatacgcaagaggaactccgagaattccaggagggaagccgagaatatgaagctgaattggagacgcagctgcaacaaattgaaaccaggaacagagacctcctgtccgaaaataaccgccttcgcatggagctggaaaccatcaaggagaagtttgaagtgcagcactctgaaggctaccggcagatctcagccttggaggatgacctcgcgcagaccaaagccattaaagaccaattgcagaaatacatcagagagctggagcaagcaaatgacgacctggaaagagccaagcgcgccacgatcatgtctctcgaagactttgagcagcgcttgaatcaggccatcgaaagaaatgccttcctggaaagtgaacttgatgaaaaagagaatctcctggaatctgttcagagactgaaggatgaagccagagatttgcggcaggaactggccgtgcagcagaagcaggagaaacccaggacccccatgcccagctcagtggaagctgagaggacagacacagctgtgcaggccacgggctccgtgccgtccacgcccattgctcaccgaggacccagctcaagtttaaacacacctgggagcttcagacgtggcctggacgactccaccggggggacccccctcacacctgcggcccggatatcagccctcaacattgtgggagacctactgcggaaagtcggggcactggagtccaaactcgcttcctgccggaacctcgtgtacgatcagtccccaaaccgaacaggtggcccagcctctgggcggagcagcaagaacagagatggcggggagagacggccaagcagcaccagcgtgcctttgggtgataaggggttggggaagcgcctggaatttgggaagccgccttcacacatgtcttcatcgccgctgccgtcagcccagggggtagtcaagatgttgctttag

SEQ ID NO: 293799 - DNA, 3936 bp, Artificial Sequence
  derived and/or modified sequence
ggggggggcggggcctcgcggccctgcagcctcgtcaggctcagtcccctcccgataaacccctaaatagggactttcccggggggtgaccctggcttttttggcgaaaacccccagtttaaggaggccttccccctggcttcacgttgtggagtcgaaaggaaccttgaagcggagaatgagctcgtgacgtggacccgaggaaaaaacctgccaaccaggatttaatagaattcagctctttcaggctttggagggaaggcgatttgaacgggatttcaatgaaaaaccctgtcccttcggctttttttttttcctctctcgggtctcgtcacgtgatggtcctactttatttttaaaaattaaatggcgcatattccccagcatcctaaatctagtgcaacctagtggcaagtggagaaaaaaataactgccaacctggcttcctacgaggtcccccggagttctcgcaaagttgcgacccagttggcaaaaatacagtgtgtgcaaagactcaactggacattgccaccaagaatcaagagatttttggggactttagcaagaaaacgttatttttaaaagccctgctccaaagctggttacaaatgaatactgcgtttccagtgacaggttgggcgagcagaaaggaaatcttacgacggagtcttgccctgtcgcctaggctagagtgcagtggtgtgatctcggctcactgcaaccgccacctcccggtttcccgtgattctcctgcctcagcctcctgagtagctgggattacagacaccatgccacaaggagagtgatctcttcccctgttttcacaatggaggactccggaaagactttcagctccgaggaggaagaagctaactattggaaagatctggcgatgacctacaaacagagggcagaaaatacgcaagaggaactccgagaattccaggagggaagccgagaatatgaagctgaattggagacgcagctgcaacaaattgaaaccaggaacagagacctcctgtccgaaaataaccgccttcgcatggagctggaaaccatcaaggagaagtttgaagtgcagcactctgaaggctaccggcagatctcagccttggaggatgacctcgcgcagaccaaagccattaaagaccaattgcagaaatacatcagagagctggagcaagcaaatgacgacctggaaagagccaagcgcgccacgatcatgtctctcgaagactttgagcagcgcttgaatcaggccatcgaaagaaatgccttcctggaaagtgaacttgatgaaaaagagaatctcctggaatctgttcagagactgaaggatgaagccagagatttgcggcaggaactggccgtgcagcagaagcaggagaaacccaggacccccatgcccagctcagtggaagctgagaggacagacacagctgtgcaggccacgggctccgtgccgtccacgcccattgctcaccgaggacccagctcaagtttaaacacacctgggagcttcagacgtggcctggacgactccaccggggggacccccctcacacctgcggcccggatatcagccctcaacattgtgggagacctactgcggaaagtcggggcactggagtccaaactcgcttcctgccggaacctcgtgtacgatcagtccccaaaccgaacaggtggcccagcctctgggcggagcagcaagaacagagatggcggggagagacggccaagcagcaccagcgtgcctttgggtgataaggggttggacacgagttgccgctggttgtccaaatcaacaaccaggtcgtccagctcctgctgaagcctgttcttggtcttttccagtttatcataagcggccgccttctcctcgtactgctgggtgaggttctcgatctccttctggaacctcttcttcccctcttccagagcttccacggtgctggcaaagtcctgcagcttcttcttcgagtcggagagctacaaggacagcgtccagggtagggtgagagggggaccatgagtggcccctgtccctggccccacagactctgagaagcgaagaccatgtctcctcgttggagaaacccaatagcaggggaagctggggggtcaagcaccatcgcaccaacactccaccgcgatctgcctgcgggggatctcagcgcagagaagttgagaggacccatgaaggaagcaaggacacggggcaggcacctggatgttgagagtggagatgtggcgctccaggttctgcttggcctccatctcctcgtccagctggtcttgcaggctgttccgctcctcctccagctggcgcagcttcgtagacacgttgagcttctgccgggtttcttcttgaagcagctcctgcaaaagggatgcaaagaggtcccagggacctgccccgaggaaggccaccccccaggtcccctggatgatgtggcaggacactcacctgggtgtcctggagctgggaactgagggacgccacgtccttggccagcttaatggccttcccctcggcctcgttaagcatccctgtgacgctctcaacttcattctaagggtgccaagagactggttagtcaaagcctctagaaggggatcctcgttgaaaggagccctttttactcaaaacacatgggctagtacttgaggtgttcactgattgagaaaatacccgtgaggtatgggactctgataaaaaaaaaaaaaaacacacacacacacaaaaaaaacagaatctgtggcttgaagggaactccgtcacctatgagttgggaccctggccctagactctgtggttctaagaacttatttgagccccaatggtattgactgggacctgatcccactaaatggatcctagatccctgccaaggttggtagagacaaagcagcaggtctgagagtccagacgaggtgctctggctggtccactctctaaggctggagaagggagaccaggatggtacttgaacgtcccagggatgctgtcccatcccttccttcctcactcctactctttgaccctgatggccaaagccagagacgcaggccctaaaggtaaaaacgtcctctctgtattctctggcttttactccctagtgtctctgcataagtccctttgaggctgttagcctacccctccatctcttccattgacaaggaggatatgaatgatcttgacactgcttatatgagggcggcaaaagccctgctctcaactgcatgtgagaaaaaaacatctcacttaattcttccctcgccccttggtccctggctgtggacatgttaaacatttgtgaaaactttggccacgtccccatgagtggcaaggcagggtaaatggctatgccaagtgaaagaagaccaaagacaaaaagaccatgtcattcagcagcttaaaacccctcaacagcttcacattgcccagagtaaggatcaacatacatgtaataggttctcaaaagccctacatcatctgggtacaagctccccctccaaccccactctgtactatctccccctacccccaaccccagctgggcactccagctctactggctgtatgtctctctcctaatttttctacttaccacagggcctttgcacacgctgttccctctgcctggtagacttatccatgctccttagggaagcctttcgtggctcctcctcccccaggttaggccccctggttatttacacttgggcatcatgtgccttccctttgctgcatcatttgacattcatttgtgtgattattcatgtctttcccttcccttcccttccccttactcggctggagtcctactggggcagcgacagtgtctcttcttccttgctgttggatctcaggattaagcacagtgcctggcatacagcaggtgctcaataaatacttatcaaattggaaaa

SEQ ID NO: 293800 - DNA, 1041 bp, Artificial Sequence
  derived and/or modified sequence
atggaggattcaggtaagacgtttagctcagaagaagaggaagccaactactggaaagacctcgctatgacgtataaacagcgggctgaaaatacgcaggaagagttgagggagtttcaagagggtagtcgcgagtatgaagctgaactagagacccagcttcaacagatcgaaacccgaaaccgcgatctcctaagcgaaaacaatcgcctgagaatggaactggaaactatcaaggagaagttcgaggtgcagcactccgaagggtaccgccagatctctgcactggaggacgatctagctcagaccaaagccatcaaggatcagctgcagaaatacattagagagctcgaacaagcaaacgacgatttggagagggccaagcgagccacaattatgtccctagaagactttgaacagcggctgaatcaagctattgagaggaatgcattccttgagtcggaactggatgaaaaggaaaacctgctcgagtcggtgcaacgactcaaggatgaagcaagagaccttcgccaggaactcgctgtgcagcaaaaacaggagaagcccagaaccccaatgcccagcagcgtggaggcagaacgcactgatacggcggttcaggctaccggctcagttccttctacccccatcgctcatcgcggacctagcagctcccttaatacccctggatctttccgtagggggctggatgactccaccggaggaacacccttaacaccagctgccagaataagcgctttgaacattgtaggggacctgcttcgcaaggtgggggcactggagtccaagctcgcatcttgccgtaatcttgtttacgatcagtcccccaacagaactgggggacccgctagtggtaggtccagcaaaaatcgcgacgggggtgagaggaggccttccagtacatccgtccccctgggggacaaggggcttggtaaaaggctggaatttggcaagccgccaagccacatgagttcgtctcctctgccgtctgcccaaggcgtcgtgaagatgctgctctag

SEQ ID NO: 293801 - DNA, 1041 bp, Artificial Sequence
  derived and/or modified sequence
atggaggacagcggcaagaccttcagcagcgaggaggaggaggccaactactggaaggacctggccatgacctacaagcagagagccgagaacacccaggaggagctgagagagttccaggagggcagcagagagtacgaggccgagctggagacccagctgcagcagatcgagaccagaaacagagacctgctgagcgagaacaacagactgagaatggagctggagaccatcaaggagaagttcgaggtgcagcacagcgagggctacagacagatcagcgccctggaggacgacctggcccagaccaaggccatcaaggaccagctgcagaagtacatcagagagctggagcaggccaacgacgacctggagagagccaagagagccaccatcatgagcctggaggacttcgagcagagactgaaccaggccatcgagagaaacgccttcctggagagcgagctggacgagaaggagaacctgctggagagcgtgcagagactgaaggacgaggccagagacctgagacaggagctggccgtgcagcagaagcaggagaagcccagaacccccatgcccagcagcgtggaggccgagagaaccgacaccgccgtgcaggccaccggcagcgtgcccagcacccccatcgcccacagaggccccagcagcagcctgaacacccccggcagcttcagaagaggcctggacgacagcaccggcggcacccccctgacccccgccgccagaatcagcgccctgaacatcgtgggcgacctgctgagaaaggtgggcgccctggagagcaagctggccagctgcagaaacctggtgtacgaccagagccccaacagaaccggcggccccgccagcggcagaagcagcaagaacagagacggcggcgagagaagacccagcagcaccagcgtgcccctgggcgacaagggcctgggcaagagactggagttcggcaagccccccagccacatgagcagcagccccctgcccagcgcccagggcgtggtgaagatgctgctgtag

SEQ ID NO: 293802 - protein, 350 aa, Artificial Sequence
  derived and/or modified sequence
MRGAGLIKIRGDRCWRDLTCMDFHYETQPMPNPVAYYLHHSPWWFHRFETLSNHFIELLVPFFLFLGRRACIIHGVLQILFQAVLIVSGNLSFLNWLTMVPSLACFDDATLGFLFPSGPGSLKDRVLQMQRDIRGARPEPRFGSVVRRAANVSLGVLLAWLSVPVVLNLLSSRQVMNTHFNSLHIVNTYGAFGSITKERAEVILQGTASSNASAPDAMWEDYEFKCKPGDPSRRPCLISPYHYRLDWLMWFAAFQTYEHNDWIIHLAGKLLASDAEALSLLAHNPFAGRPPPRWVRGEHYRYKFSRPGGRHAAEGKWWVRKRIGAYFPPLSLEELRPYFRDRGWPLPGPL

SEQ ID NO: 293803 - protein, 330 aa, Artificial Sequence
  derived and/or modified sequence
MDFHYETQPMPNPVAYYLHHSPWWFHRFETLSNHFIELLVPFFLFLGRRACIIHGVLQILFQAVLIVSGNLSFLNWLTMVPSLACFDDATLGFLFPSGPGSLKDRVLQMQRDIRGARPEPRFGSVVRRAANVSLGVLLAWLSVPVVLNLLSSRQVMNTHFNSLHIVNTYGAFGSITKERAEVILQGTASSNASAPDAMWEDYEFKCKPGDPSRRPCLISPYHYRLDWLMWFAAFQTYEHNDWIIHLAGKLLASDAEALSLLAHNPFAGRPPPRWVRGEHYRYKFSRPGGRHAAEGKWWVRKRIGAYFPPLSLEELRPYFRDRGWPLPGPL

SEQ ID NO: 293804 - protein, 263 aa, Artificial Sequence
  derived and/or modified sequence
MPNPVAYYLHHSPWWFHRFETLSNHFIELLVPFFLFLGRRACIIHGVLQILFQAVLIVSGNLSFLNWLTMVPSLACFDDATLGFLFPSGPGSLKDRVLQMQRDIRGARPEPRFGSVVRRAANVSLGVLLAWLSVPVVLNLLSSRQVMNTHFNSLHIVNTYGAFGSITKERAEVILQGTASSNASAPDAMWEDYEFKCKPGDPSRRPCLISPYHYRLDWLMWFAAFQTYEHNDWIIHLAGKLLASDAEALSLLAHNPFAGRPPP

SEQ ID NO: 293805 - protein, 102 aa, Artificial Sequence
  derived and/or modified sequence
MLDHKDLEAEIHPLKNEERKSQENLGNPSKNEDNVKSAPPQSRLSRCRAAAFFLSLFLCLFVVFVVSFVIPCPDRPASQRMWRIDYSAAVIYDFLAVDDING

SEQ ID NO: 293806 - protein, 233 aa, Artificial Sequence
  derived and/or modified sequence
MLDHKDLEAEIHPLKNEERKSQENLGNPSKNEDNVKSAPPQSRLSRCRAAAFFLSLFLCLFVVFVVSFVIPCPDRPASQRMWRIDYSAAVIYDFLAVDDINGDRIQDVLFLYKNTNSSNNFSRSCVDEGFSSPCTFAAAVSGANGSTLWERPVAQDVALVECAVPQPRGSEAPSACILVGRPSSFIAVNLFTGETLWNHSSSFSGNASILSPLLQVPDVDGDGAPDLLVLTQE

SEQ ID NO: 293807 - protein, 87 aa, Artificial Sequence
  derived and/or modified sequence
MLDHKDLEAEIHPLKNEERKSQENLGNPSKNEDNVKSAPPQSRLSRCRAAAFFLSLFLCLFVVFVVSFVIPCPDRPASQRMWRIDYS

SEQ ID NO: 293808 - protein, 236 aa, Artificial Sequence
  derived and/or modified sequence
MLDHKDLEAEIHPLKNEERKSQENLGNPSKNEDNVKSAPPQSRLSRCRAAAFFLSLFLCLFVVFVVSFVIPCPDRPASQRMWRIDYSAAVIYDFLAVDDINGDRIQDVLFLYKNTNSSNNFSRSCVDEGFSSPCTFAAAVSGANGSTLWERPVAQDVALVECAVPQPRGSEAPSACILVGRPSSFIAVNLFTGETLWNHSSSFSGNASILSPLLQVPDVDGDGAPDLLVLTQEREE

SEQ ID NO: 293809 - DNA, 702 bp, Artificial Sequence
  derived and/or modified sequence
atgctggaccacaaggacctggaggccgagatccaccccctgaagaacgaggagagaaagagccaggagaacctgggcaaccccagcaagaacgaggacaacgtgaagagcgcccccccccagagcagactgagcagatgcagagccgccgccttcttcctgagcctgttcctgtgcctgttcgtggtgttcgtggtgagcttcgtgatcccctgccccgacagacccgccagccagagaatgtggagaatcgactacagcgccgccgtgatctacgacttcctggccgtggacgacatcaacggcgacagaatccaggacgtgctgttcctgtacaagaacaccaacagcagcaacaacttcagcagaagctgcgtggacgagggcttcagcagcccctgcaccttcgccgccgccgtgagcggcgccaacggcagcaccctgtgggagagacccgtggcccaggacgtggccctggtggagtgcgccgtgccccagcccagaggcagcgaggcccccagcgcctgcatcctggtgggcagacccagcagcttcatcgccgtgaacctgttcaccggcgagaccctgtggaaccacagcagcagcttcagcggcaacgccagcatcctgagccccctgctgcaggtgcccgacgtggacggcgacggcgcccccgacctgctggtgctgacccaggagtag

SEQ ID NO: 293810 - DNA, 711 bp, Artificial Sequence
  derived and/or modified sequence
atgctggaccacaaggacctggaggccgagatccaccccctgaagaacgaggagagaaagagccaggagaacctgggcaaccccagcaagaacgaggacaacgtgaagagcgcccccccccagagcagactgagcagatgcagagccgccgccttcttcctgagcctgttcctgtgcctgttcgtggtgttcgtggtgagcttcgtgatcccctgccccgacagacccgccagccagagaatgtggagaatcgactacagcgccgccgtgatctacgacttcctggccgtggacgacatcaacggcgacagaatccaggacgtgctgttcctgtacaagaacaccaacagcagcaacaacttcagcagaagctgcgtggacgagggcttcagcagcccctgcaccttcgccgccgccgtgagcggcgccaacggcagcaccctgtgggagagacccgtggcccaggacgtggccctggtggagtgcgccgtgccccagcccagaggcagcgaggcccccagcgcctgcatcctggtgggcagacccagcagcttcatcgccgtgaacctgttcaccggcgagaccctgtggaaccacagcagcagcttcagcggcaacgccagcatcctgagccccctgctgcaggtgcccgacgtggacggcgacggcgcccccgacctgctggtgctgacccaggagagagaggagtag

SEQ ID NO: 293811 - DNA, 702 bp, Artificial Sequence
  derived and/or modified sequence
atgctcgatcacaaggatctcgaggcggagattcacccgcttaaaaatgaagaacggaaatctcaggaaaacctcggcaatccaagtaagaacgaagacaatgtgaagagtgcgcctcctcagagccggttaagcagatgcagggctgccgcctttttcctctccctgtttctttgtttgttcgttgtctttgtcgtttcgttcgtgatcccgtgtccagatcgaccagccagtcagaggatgtggcgtatcgactactctgctgcagtgatctacgatttcctagccgtggatgacattaatggtgatcggatacaggatgtgcttttcctctataagaatactaactcaagtaacaacttctcacgctcgtgtgtcgacgaggggtttagttccccatgcaccttcgcggcggcggtcagcggagccaacggtagtaccctctgggagcgcccagttgctcaggacgtggcactcgtcgagtgtgccgttcctcaaccgaggggtagtgaagccccaagcgcctgtatactcgtgggacgtccttcatcctttatcgccgtgaaccttttcactggggagacactatggaatcactcgtcctcttttagcgggaatgctagtatactctctcctttactgcaggtgcccgatgtggacggggacggcgctccagatctgctggtgctgacccaggagtag

SEQ ID NO: 293812 - DNA, 711 bp, Artificial Sequence
  derived and/or modified sequence
atgttagaccataaagacctggaggctgagatccaccccttgaagaatgaagaaaggaaatcgcaggaaaatctgggtaacccttcaaagaacgaagataatgtgaaaagcgccccaccgcagtccaggctttcgcgttgcagagctgcagctttctttttgtccctctttctgtgcctattcgtggtgttcgtcgtatccttcgtgatcccttgtcccgataggccagcttcccaacgaatgtggaggatcgactacagcgctgccgttatttacgattttcttgccgtggacgacataaacggtgaccgcatccaggatgtcctgttcctgtataagaacacaaatagcagcaataatttttcaaggtcctgcgtcgacgaagggttcagttccccatgtacctttgccgctgccgtgagcggtgctaatggaagcaccctctgggagagaccagtcgctcaagacgtcgccctcgtggaatgtgccgttccacagccgaggggttccgaggcacccagcgcctgtattctggtgggtaggccatcatcattcatcgcagtaaatctgttcacgggggaaaccctgtggaatcactctagctccttcagtggaaacgcatccatcctgagcccactcctccaagttccggacgtcgatggagacggggcacccgatttgttggtgctcacacaagaacgggaagaatag

SEQ ID NO: 293813 - DNA, 1006 bp, Artificial Sequence
  derived and/or modified sequence
ggccgcggcggcagagatggtccgtgcatgggggaaatgtttgtcctttcggccaggctctccaattcaaaaggcaggaattgagaaaatgacagtactttctctgtccctgccacagaatgtccagtttggtctgatttaacatgacaaatcatgctgtagagataagtccacctgggcttgcgaaggcacagattccccgtccacagctcacgaccagatgcaccagcaggagtccacatcgaggacgtcctccgggcactcccacgaccagtgaccaggagttaaactttgggatgtgcccgtgatgttggaccacaaggacttagaggccgaaatccaccccttgaaaaatgaagaaagaaaatcgcaggaaaatctgggaaatccatcaaaaaatgaggataacgtgaaaagcgcgcctccacagtcccggctctcccggtgccgagcggcggcgttttttctttcattgtttctctgcctttttgtggtgttcgtcgtctcattcgtcatcccgtgtccagaccggccggcgtcacagcgaatgtggaggatagactacagtgccgctgttatctatgactttctggctgtggatgatataaacggggacaggatccaagatgttctttttctttataaaaacaccaacagcagcaacaatttcagccgatcctgtgtggacgaaggcttttcctctccctgcacctttgcagctgctgtgtcgggggccaacggcagcacgctctgggagagacctgtggcccaagacgtggccctcgtggagtgtgctgtgccccagccaagaggcagtgaggcaccttctgcctgcatcctggtgggcagacccagttctttcattgcagtcaacttgttcacaggggaaaccctgtggaaccacagcagcagcttcagcgggaatgcgtccatcctgagccctctgctgcaggtgcctgatgtggacggcgatggggccccagacctgctggttctcacccaggag

SEQ ID NO: 293814 - DNA, 984 bp, Artificial Sequence
  derived and/or modified sequence
tcgggtgagaggccgcggcggcagcagaggtggggtttcaccatgttgttcaggctggtctcgaactcctgacttcgtgatctgcctgcctcggcctccgaaagtgctgggattacaggcgcaaaccaccacgcccggtccacctgggcttgcgaaggcacagattccccgtccacagctcacgaccagatgcaccagcaggagtccacatcgaggacgtcctccgggcactcccacgaccagtgaccaggagttaaactttgggatgtgcccgtgatgttggaccacaaggacttagaggccgaaatccaccccttgaaaaatgaagaaagaaaatcgcaggaaaatctgggaaatccatcaaaaaatgaggataacgtgaaaagcgcgcctccacagtcccggctctcccggtgccgagcggcggcgttttttctttcattgtttctctgcctttttgtggtgttcgtcgtctcattcgtcatcccgtgtccagaccggccggcgtcacagcgaatgtggaggatagactacagtgccgctgttatctatgactttctggctgtggatgatataaacggggacaggatccaagatgttctttttctttataaaaacaccaacagcagcaacaatttcagccgatcctgtgtggacgaaggcttttcctctccctgcacctttgcagctgctgtgtcgggggccaacggcagcacgctctgggagagacctgtggcccaagacgtggccctcgtggagtgtgctgtgccccagccaagaggcagtgaggcaccttctgcctgcatcctggtgggcagacccagttctttcattgcagtcaacttgttcacaggggaaaccctgtggaaccacagcagcagcttcagcgggaatgcgtccatcctgagccctctgctgcaggtgcctgatgtggacggcgatggggccccagacctgctggttctcacccaggagcgggaggag

SEQ ID NO: 293815 - DNA, 702 bp, Artificial Sequence
  derived and/or modified sequence
atgctggaccacaaggacctggaggccgagatccaccccctgaagaatgaggagaggaagagccaggagaacctgggcaaccccagcaagaatgaagacaacgtgaagagcgccccaccccagagccggctgagccgctgcagagctgctgccttcttcctgagcctcttcctgtgcctgtttgtggtgtttgtggtgtcctttgtgatcccctgcccagacaggcctgccagccagaggatgtggagaattgactacagcgctgctgtgatctatgacttcctggccgtggatgacatcaatggagaccgcatccaggatgtgctcttcctgtacaagaacaccaacagcagcaacaacttcagccgcagctgtgtggatgagggcttcagcagcccctgcacctttgctgctgctgtgtctggggccaacggcagcaccctgtgggagaggcctgtggcccaggatgtggccctggtggagtgtgctgtgccccagccccggggcagcgaggcccccagcgcctgcatcctggtgggccggcccagcagcttcatcgctgtgaacctcttcaccggggagaccctgtggaaccacagcagcagcttctctggaaatgccagcatcctgagccccctgctgcaggtgcctgatgtggatggagatggagccccagacctgctggtgctgacccaggagtag

SEQ ID NO: 293816 - DNA, 711 bp, Artificial Sequence
  derived and/or modified sequence
atgctggaccacaaggacctggaggccgagatccaccccctgaagaatgaggagaggaagagccaggagaacctgggcaaccccagcaagaatgaagacaacgtgaagagcgccccaccccagagccggctgagccgctgcagagctgctgccttcttcctgagcctcttcctgtgcctgtttgtggtgtttgtggtgtcctttgtgatcccctgcccagacaggcctgccagccagaggatgtggagaattgactacagcgctgctgtgatctatgacttcctggccgtggatgacatcaatggagaccgcatccaggatgtgctcttcctgtacaagaacaccaacagcagcaacaacttcagccgcagctgtgtggatgagggcttcagcagcccctgcacctttgctgctgctgtgtctggggccaacggcagcaccctgtgggagaggcctgtggcccaggatgtggccctggtggagtgtgctgtgccccagccccggggcagcgaggcccccagcgcctgcatcctggtgggccggcccagcagcttcatcgctgtgaacctcttcaccggggagaccctgtggaaccacagcagcagcttctctggaaatgccagcatcctgagccccctgctgcaggtgcctgatgtggatggagatggagccccagacctgctggtgctgacccaggagcgggaggagtag

SEQ ID NO: 293817 - DNA, 702 bp, Artificial Sequence
  derived and/or modified sequence
atgctggaccacaaggacctggaggccgagatccaccccctgaagaacgaggaacgtaaatctcaggaaaacctgggaaatccatccaagaatgaggataacgtgaagtcagctcccccacagtcaagactgagccgctgccgcgcagccgccttttttctgtcgctgttcctttgtttatttgttgtgttcgtcgtctcattcgtgataccttgtcccgaccgcccggcttcacagagaatgtggcggatcgattatagcgccgctgtgatatacgatttcctggcagtggatgacatcaatggagatcgaatccaggacgtgctgttcctgtataagaatacaaactccagtaacaacttcagtaggtcttgcgttgatgaaggcttctcgagcccctgtacctttgctgcagctgtgagcggggcgaatggttccactctgtgggagaggcctgtcgcccaagatgtggctttagtggaatgtgccgtgccccagccaagagggagtgaggctcctagtgcctgtattttagtgggcagacccagttcctttatcgccgtcaacttgttcacaggggagacactatggaatcactcttcttcattctcaggcaacgcctccattttgtcacccctgctgcaagttccggacgttgatggcgatggggcccccgatctgctggtgcttactcaggagtag

SEQ ID NO: 293818 - DNA, 711 bp, Artificial Sequence
  derived and/or modified sequence
atgctggaccacaaggacctggaggccgagatccaccccctgaagaatgaagagaggaaatcacaggagaatcttggaaacccatctaagaacgaagacaatgtgaagtctgcccctccacagagcaggttgtcaaggtgtagggccgccgcctttttccttagcttgttcttatgcctgtttgtagtctttgtggtctcttttgtcattccatgtccagataggcctgcctcacagcgtatgtggaggatcgactatagtgccgccgtgatctatgactttttagccgtagacgacattaacggagacaggatccaggatgttttattcctgtacaaaaacactaactcatccaacaacttttctaggtcctgcgtggatgaggggttttcatcgccctgtacctttgccgctgctgtgtccggcgctaacgggtcgactctttgggagaggcctgtcgcccaagatgtggccctcgtggagtgcgcagtccctcagcctcgaggctctgaggctccctctgcttgtatcctcgtgggacgaccatcctcttttatcgcggttaacctgttcacaggagagaccctgtggaaccacagcagttcatttagtgggaacgcaagcatactgtctcccctgctacaggttccagatgttgatggtgacggcgctcctgacttacttgtactcactcaggagagagaggaatag

SEQ ID NO: 293819 - DNA, 702 bp, Artificial Sequence
  derived and/or modified sequence
atgctggaccacaaggatctggaggccgaaatacaccccttgaaaaatgaagagcggaagtctcaggaaaatctcggcaaccccagcaaaaacgaggataatgtcaaaagcgctcctccacagtcccggctgtccagatgccgcgcagccgcattcttcctgtcgctttttctgtgtctcttcgttgtcttcgttgtttctttcgtgataccctgtcccgatcgcccagctagccaaagaatgtggaggatcgattactcagcggcagtgatttatgattttctggcggtggacgatatcaacggcgatagaatccaagatgtcctgtttctctacaagaacacaaatagcagcaacaacttctccaggtcctgcgtggacgagggtttttcatctccctgtacttttgcagccgctgtgtctggtgccaatggctccactctctgggagcggccagtggctcaggatgttgccctcgtcgagtgtgcagtacctcagccaaggggctctgaggcaccatctgcatgcattttggtcggaagaccttctagttttatcgctgtgaacctgtttactggtgagaccctttggaaccactcatccagcttttctgggaacgcgtccattttaagtcccctgttgcaggtcccagatgttgatggcgatggcgctcccgaccttctagtgctcacacaggagtag

SEQ ID NO: 293820 - DNA, 711 bp, Artificial Sequence
  derived and/or modified sequence
atgctggatcataaggacctggaggcagaaatccacccacttaaaaacgaggaaagaaagtcacaggagaacctaggcaacccttccaaaaacgaggacaatgtaaagtctgccccaccccaatccagactgagccgttgccgggcagcggctttctttctctccctctttctatgccttttcgttgtgtttgttgtgtctttcgtgattccttgccccgacaggcccgctagccagcggatgtggaggattgattacagcgctgccgtcatctacgactttcttgctgtcgacgacatcaatggggataggattcaggacgtgttgtttctctacaaaaacaccaatagctcgaacaatttctcaaggagttgcgtggacgaaggtttttcatccccgtgcacttttgccgctgcagtgagcggcgctaatgggtccactctgtgggaaaggccagtcgcccaggatgtcgcccttgtcgagtgtgccgttccccagcctcggggaagcgaagctccttccgcctgcattcttgtaggccgaccatcctcgttcatcgccgtgaaccttttcacaggcgagacattatggaaccactcctctagcttttcaggcaacgcttcaattctaagcccactgttgcaggtgcctgatgtggatggcgatggtgcacctgacttactcgtgctaactcaggaaagggaggaatag

SEQ ID NO: 293821 - DNA, 380 bp, Artificial Sequence
  derived and/or modified sequence
tgtggggcgggggcgaggttcgggctggttgttccgttgcgagctgcagctgcgatctctgtggtaggcccaggtcaagagtcttcatctccagctgcctcagttttcttatcactaaaacagcaaagtgtatgctgacttgtaaagtgaagaagccagtggtgctgcgggtgttcttttggggtagtgtctgggatccagtacgagttgaatcattgttcaaataaggtgtaattgaaaagtgatcctctcttcagagatgtcaaaaacaaacaaatccaagtctggatctcgctcttctcgctcaagatctgcatcaagatctcgttctcgttcattttcgaagtctcggtcccgaagccgatctctctctcgttcaa

SEQ ID NO: 293822 - DNA, 486 bp, Artificial Sequence
  derived and/or modified sequence
atgagcgtccccgggccttaccaggccgctactgggccctcatctgcgcctagtgctccaccctcatacgaagaaacggtggccgtaaactcctactacccgacaccaccagctccaatgcccggaccaaccaccggcctcgttacaggcccagatgggaagggcatgaatcccccctcctattacactcaacccgctccaatccctaataacaacccaattacagtgcagactgtatatgtgcaacaccccattacctttttggatcgccctattcaaatgtgctgtccttcctgcaataagatgatcgtgtcccaattaagctacaacgccggtgctctgacgtggctctcttgtggttctctttgcctgttagggtgtatcgcaggatgttgttttatcccgttttgtgtggatgccctccaggatgtcgaccactattgtccaaattgtagagccctgcttgggacctacaaacgcttgtag

SEQ ID NO: 293823 - DNA, 486 bp, Artificial Sequence
  derived and/or modified sequence
atgtctgtccccggaccataccaagccgcaaccggccctagctccgcgccatcagcccctccctcttacgaggaaaccgtagctgtgaactcttattacccaactccacccgccccgatgcccggccccacaaccggcctcgtgacaggcccagatgggaaaggcatgaatccgccttcgtactatacccagcccgcacccatccctaataacaatcccataaccgtccagactgtttacgtacagcaccccatcacctttctcgataggccgatacagatgtgctgtccaagttgcaacaaaatgatagtttcccagctgtcttataacgcaggggccctcacgtggctgagctgtggctctctctgcttgctcggctgcatcgcaggctgctgcttcataccgttttgcgtggacgcccttcaggatgtggaccattactgcccaaattgtagagcgcttctgggcacatataaaaggctctag

SEQ ID NO: 293824 - DNA, 486 bp, Artificial Sequence
  derived and/or modified sequence
atgtctgtgcccggcccctaccaggccgccaccggccccagcagcgcccccagcgccccacccagctatgaggagaccgtggccgtgaacagctactaccccaccccaccagcccccatgcctggccccaccaccggcctggtgactggaccagatggcaagggcatgaacccccccagctactacacccagcctgcccccatccccaacaacaaccccatcaccgtgcagacagtgtatgtgcagcaccccatcaccttcctggaccggcccatccagatgtgctgccccagctgcaacaagatgattgtgtcccagctgagctacaatgctggggccctgacctggctgagctgtggcagcctgtgcctgctgggctgcatcgccggctgctgcttcatccccttctgtgtggatgccctgcaggatgtggaccactactgccccaactgccgggccctgctgggcacctacaagaggctgtag

SEQ ID NO: 293825 - DNA, 486 bp, Artificial Sequence
  derived and/or modified sequence
atgagcgtgcccggcccctaccaggccgccaccggccccagcagcgcacccagcgccccaccgagctatgaagaaactgttgccgttaactcctattaccctaccccccccgctccaatgcctggccctactaccgggttagtcactggaccagacggcaaggggatgaacccgcccagttactacacccaacctgcccctatcccgaataacaaccccatcaccgtgcaaaccgtgtacgtgcaacacccaatcacgttccttgatcgtcctatccaaatgtgctgtcctagctgtaataaaatgatcgtgtcacaactgagctacaatgccggggcactaacatggctgagctgcggctcgctatgcctgctggggtgtatagccggctgttgctttatccctttctgtgtggatgcactgcaagatgtcgatcactattgcccaaattgcagggcgctcctcggcacctacaaacgtttatag

SEQ ID NO: 293826 - DNA, 486 bp, Artificial Sequence
  derived and/or modified sequence
atgagcgtgcccggcccctaccaggccgccaccggccccagcagcgcccctagcgcacctcccagctatgaagagactgtggccgtgaactcctattatccaacaccacctgcgcccatgccgggtcccaccaccggactggtgactggccctgatggaaaaggcatgaacccgccatcgtactatactcagcccgccccgatccctaataataaccctattacggtgcagacggtttatgtccagcaccccatcactttcctcgatagacctatccagatgtgctgccccagttgtaacaagatgattgtgagccagctgtcctacaacgctggcgccttgacgtggctgtcctgtggatcactttgcctcctagggtgcatcgcgggatgttgtttcatacctttttgcgttgacgctcttcaagacgtcgatcattattgccctaattgtcgcgcgctccttggcacatataagaggctctag

SEQ ID NO: 293827 - DNA, 486 bp, Artificial Sequence
  derived and/or modified sequence
atgtcagtcccaggaccctaccaggccgcaaccggcccatcgtctgccccatccgcccctccatcctatgaagagactgtggcggttaactcctactacccgaccccacctgctcctatgccaggtcctaccacggggttggtcaccgggccagatgggaagggaatgaatcctcccagttattatacacagcccgcaccaattcctaacaacaatccaattaccgtgcaaaccgtgtacgtgcaacatcctataacctttctggataggcctatccagatgtgttgcccttcttgcaacaaaatgatcgtcagccagctgagctataatgccggtgcgcttacctggctgtcttgtggttccctgtgtttgctgggttgcattgccggatgctgcttcatcccattttgtgtagatgcactccaagatgtcgaccattactgtccaaactgcagggcactgcttggtacatacaagcgcctgtag

SEQ ID NO: 293828 - DNA, 486 bp, Artificial Sequence
  derived and/or modified sequence
atgagtgtgcctgggccatatcaggcagctaccgggccatcatcagcaccatcagcccctccctcctatgaggaaaccgtggcagtgaactcatattatcccacaccgccagcacctatgccaggaccaaccaccggcctggtcaccggcccagatgggaaaggtatgaaccctccctcgtattatacccagcctgcacccatccctaacaacaatcccatcaccgtccagactgtctatgttcaacaccccattacattcctggaccgcccaatacaaatgtgctgcccttcatgcaacaaaatgatagtgtcccaattgagctacaatgcgggagccttgacttggctgagctgcggaagcctgtgtttgttgggctgcatcgccggatgttgttttatccctttctgcgtggacgcactccaggatgtcgaccactattgcccgaactgccgtgcactcctcggaacctacaagaggctgtag

SEQ ID NO: 293829 - DNA, 486 bp, Artificial Sequence
  derived and/or modified sequence
atgagcgtgcccggcccctaccaggccgccaccggccccagcagcgcccccagcgccccccccagctacgaggagaccgtggccgtgaacagctactaccccaccccccccgcccccatgcccggccccaccaccggcctggtgaccggccccgacggcaagggcatgaacccccccagctactacacccagcccgcccccatccccaacaacaaccccatcaccgtgcagaccgtgtacgtgcagcaccccatcaccttcctggacagacccatccagatgtgctgccccagctgcaacaagatgatcgtgagccagctgagctacaacgccggcgccctgacctggctgagctgcggcagcctgtgcctgctgggctgcatcgccggctgctgcttcatccccttctgcgtggacgccctgcaggacgtggaccactactgccccaactgcagagccctgctgggcacctacaagagactgtag

SEQ ID NO: 293830 - DNA, 2984 bp, Artificial Sequence
  derived and/or modified sequence
gtcccagaggagaggccagggatgccgggtgcgggacagatccctcgtctcgcctgttgcttttaagcctggtggcccccggggcctggaggctggtactgagcgactattgcctgccctggggacttcacaccccccagccatccagttgcccccaggaccataggtacccccaggaccataggaaccacaagcctccccccgcccgtgtgttccaggcctgcccccgccacgggaatgctgccctcaaaaggggggcagatatcacaggattgctgggaaggggagagacccgtgtgcctggagggagcaagttcacccagacctgcagggccagggacctgtacttggaggacctcggggccagggacctgtacttggagggccttggggccagggacctgtacttggaggacctcggggccagggacctgtacttggaggacctcgaggccaggtcattcttaggtggcaagaaggtgaggccgtctgggagaacatggcgcgcatgtgcgtgaagacccagcggctggacgtggccaaggtgtgcctggggaacatgggccatgcccgcggggcccgagcgctgcgtgaggcggagcaggagccggagctagaggcccgcgtggccgtgctggccacgcagctgggcatgctggaggacgccgagcagctgtacaggaagtgcaagcgccacgacctcctgaacaagttctaccaggctgcgggccggtggcaggaggccctccaggtagccgagcaccacgatcgcgtgcacctgcgcagcacctaccaccgctatgccgggcacctggaggccagcgccgactgcagccgggccctcagttactacgagaagtcggacacgcaccgcttcgaggtgcccaggatgctgtcggaggacctgccgtccctggagctctacgtgaataaaatgaaggataagaccctgtggcggtggtgggcgcagtacctggagagccagggcgagatggacgccgcgctgcactactacgagctggcccgggaccacttctccctggtccgcatccactgcttccagggcaatgtccagaaggctgcgcaaatagccaacgagacaggaaacctggcggcctcctaccacctcgcccgccagtacgagagccaggaggaggtcgggcaggcggtgcacttctacacccgggcacaggccttcaagaatgccatccgcctgtgcaaggagaacggcctggacgaccagctcatgaacttggccctgctgagctcccccgaggacatgatcgaggcggcccgatactacgaggagaagggcgtgcagatggacagggcggtcatgctgtaccacaaggctggccacttctccaaggccctggagctggcctttgccacccagcagtttgtggccctacagctcatagcagaggacctggatgagacgtcagaccctgcgctcctggcccgctgctccgacttcttcatcgagcacagtcagtacgagagggcggtagagctgctgctggctgccaggaagtatcaggaagccctgcagctgtgcctggggcagaacatgagcatcaccgaggagatggcggaaaagatgaccgtggccaaggactcctcggacctgcctgaggagtcgcggcgggagctgctggagcagatagcagactgctgcatgcgccagggcagctaccacctggccaccaagaagtacacgcaggccggcaacaagctgaaggccatgagggcgctgctcaaatccggagacacggagaaaatcacgttcttcgcgagcgtgtccaggcagaaggaaatctacatcatggctgctaactacctgcagtccctggactggcggaaggagccggagatcatgaagaacatcatcggcttctacaccaaggggcgggccctggacctcctggctggcttttatgacgcttgtgcccaggtggagattgatgaataccagaactacgacaaagcccacggggcgctgaccgaggcctacaagtgcctggccaaggccaaggccaagagccccctggaccaggagaccaggctggcgcagctgcagagcaggatggcactggtgaagaggttcatccaggcccgcaggacgtacacagaggaccccaaggagtccatcaagcagtgtgagctgctcctggaggaaccagacctggacagcaccatccgcatcggggacgtctatggcttcctggtggagcactacgtgcggaaggaggaataccagacggcctacagattcctggaggagatgcggcggcggcttcccttggccaacatgtcctactacgtgagcccgcaggccgtggacgccgtgcaccgggggctgggtctcccactgccacgcaccgtccccgagcaggtccgccacaacagcatggaggacgccagggagctggacgaggaggtggtggaagaggcagatgacgacccctgaggggcctgggccccaggaccagcgtgctgctgcagaaaggcatcttctggaatttttttgtcagctgtggcaaagccagcatttttgctgggaaaaaacatgtctgtgttggaatacgcgacagagctgggcgagaacgcagcggcccgggccggcggagggtgtgacccgtctgcaccttgctctgtcccacctgcctctgggtgcccggcagctccactagatttttggattcattcctttgaagggagtcgggttcacccttccatcgtattctcccaactacacattgtaaagcctgagaaacttctagaacctcaggaagctgcagctggagggctggggcacctgcccccctgctccccacacatcatatcctccccatactcctgcagggcccacggctcctgagcaacagctgggacacccgggccttggcggctgcaccccctgctaggctctgcccaccggccaccaacactcctgtaattccaataaagcagtttattttctg

SEQ ID NO: 293831 - protein, 550 aa, Artificial Sequence
  derived and/or modified sequence
MGWSDLQPAMGGEAERFQAQLEVKLVTGGSPVVFTGNLTRQVGSKLAFSASLSHLLSDQANVTALLERKEENGRRVAALGAELFVPGLVGLRALGLLQQRGQLWTNSLRIQYSLLGQAKQAAHECSTSQKLRADSGSDGAYRLELRHELHCTQILAFSHKVQLWHEEDSGHLHSQLEVSYGKHWDKNSNKRHLRVSQTFKNDSGPALSNHFMEFVLQVPERQVDCRVQLYHLSLRLPYVESSSHLKVQYNGRPLFVAGGQWKDTSRATLWKWEGALNLDSPWLMVSAAHRLYWPHRAVFQAVLELTLGKAWTLKDLVVSVGCRSQGPNREGKIQVYTAATTYLRVSTVTVLAQSLFHSWSELESAWNAAVQGEIHAENSRDRKILNCWLKGPQQELNLTAAYRHLEWPRKTQVSLTAVRIGAQGQPRGLQLEGELEELRQDRTLYRKRGALLLRHPLHLPIPQSLLLQETFTADRRHQRYSLETRVVLNGREETLQTMVLGCQAGHPYVCAGLMHPYDGKVIPRNTEGCLVTWNQHTSLTLLSRLESGVQ

SEQ ID NO: 293832 - DNA, 408 bp, Artificial Sequence
  derived and/or modified sequence
atgacgcccacacctaccgccgcatggaccccaccacctccacttagacctagcgcagctgccgcaggcgctcagtgtcgatcctgtccatttaggggaggttgcgccccatccactgctcggaccccacccgcatgcatgcgtcccgctgggccttgcgcccctccaacctggcctgcaccctccacgaccaccagcacctgcaccagtagaagagcaggctgtaccgccagtagcgccagctacagcaccctggcagcagcctgctcgctgaggaggtccggggtgcggtggcccccttcaagcgcttattccacttgggcgttcgcttcatgttgcgcgtcttcagcttcatgccgctgctgctgttgttgctgggccgctggagcctggacaagtgcatggtag

SEQ ID NO: 293833 - DNA, 1653 bp, Artificial Sequence
  derived and/or modified sequence
atgggctggagcgacctgcagcccgccatgggcggcgaggccgagagattccaggcccagctggaggtgaagctggtgaccggcggcagccccgtggtgttcaccggcaacctgaccagacaggtgggcagcaagctggccttcagcgccagcctgagccacctgctgagcgaccaggccaacgtgaccgccctgctggagagaaaggaggagaacggcagaagagtggccgccctgggcgccgagctgttcgtgcccggcctggtgggcctgagagccctgggcctgctgcagcagagaggccagctgtggaccaacagcctgagaatccagtacagcctgctgggccaggccaagcaggccgcccacgagtgcagcaccagccagaagctgagagccgacagcggcagcgacggcgcctacagactggagctgagacacgagctgcactgcacccagatcctggccttcagccacaaggtgcagctgtggcacgaggaggacagcggccacctgcacagccagctggaggtgagctacggcaagcactgggacaagaacagcaacaagagacacctgagagtgagccagaccttcaagaacgacagcggccccgccctgagcaaccacttcatggagttcgtgctgcaggtgcccgagagacaggtggactgcagagtgcagctgtaccacctgagcctgagactgccctacgtggagagcagcagccacctgaaggtgcagtacaacggcagacccctgttcgtggccggcggccagtggaaggacaccagcagagccaccctgtggaagtgggagggcgccctgaacctggacagcccctggctgatggtgagcgccgcccacagactgtactggccccacagagccgtgttccaggccgtgctggagctgaccctgggcaaggcctggaccctgaaggacctggtggtgagcgtgggctgcagaagccagggccccaacagagagggcaagatccaggtgtacaccgccgccaccacctacctgagagtgagcaccgtgaccgtgctggcccagagcctgttccacagctggagcgagctggagagcgcctggaacgccgccgtgcagggcgagatccacgccgagaacagcagagacagaaagatcctgaactgctggctgaagggcccccagcaggagctgaacctgaccgccgcctacagacacctggagtggcccagaaagacccaggtgagcctgaccgccgtgagaatcggcgcccagggccagcccagaggcctgcagctggagggcgagctggaggagctgagacaggacagaaccctgtacagaaagagaggcgccctgctgctgagacaccccctgcacctgcccatcccccagagcctgctgctgcaggagaccttcaccgccgacagaagacaccagagatacagcctggagaccagagtggtgctgaacggcagagaggagaccctgcagaccatggtgctgggctgccaggccggccacccctacgtgtgcgccggcctgatgcacccctacgacggcaaggtgatccccagaaacaccgagggctgcctggtgacctggaaccagcacaccagcctgaccctgctgagcagactggagagcggcgtgcagtag

SEQ ID NO: 293834 - DNA, 1653 bp, Artificial Sequence
  derived and/or modified sequence
atgggctggagtgacctccagccagctatgggaggcgaagccgagcggttccaggcccagttagaggtgaagttggttacggggggcagccctgtggtctttaccggtaaccttactaggcaggtgggttcgaagctggccttttcagcctctctgagtcacctgctgagcgaccaggctaatgtaacagctctgctggaacgtaaagaagagaacggacggagagttgctgcactcggagcagagttgttcgtgccaggattggtcggattgagggcattgggcctgttgcagcaaagaggacagctgtggactaatagcctgagaatccagtatagcttgctggggcaggctaaacaggctgcacacgaatgttccacatcccagaaactccgagcagattccggctcagacggcgcctataggctggaactgcgccatgagctgcattgtacacagatacttgccttttctcacaaggttcagctgtggcacgaggaggacagtggccacctccactctcagctcgaggtatcctacggcaaacactgggataagaacagcaacaaaagacacctacgcgtttctcagaccttcaagaatgattccggtccagccttgagcaaccacttcatggagtttgtgctgcaggtaccagagaggcaggttgattgtagggtccagctctatcacctctcattgcgccttccctacgttgaatcgagcagtcaccttaaggtgcagtataatgggcggcccctttttgttgccggggggcagtggaaggacacgtctagggctacgttgtggaagtgggaaggcgctctgaatctggactctccttggctgatggtaagcgcggcgcatagactctactggcctcaccgggccgtgttccaggctgtgcttgagttaacgcttgggaaggcatggacgctgaaagacttggtagtgtcagtgggatgcaggagtcagggcccgaatagagagggtaagatccaagtgtacactgccgccacaacttacctgcgagtcagtactgtcactgtcctcgcacagagcttatttcattcttggtccgagcttgaatctgcttggaacgccgctgtccagggagaaattcacgcagagaatagcagggacaggaagatactgaattgttggcttaaggggccacagcaggaactgaatctgaccgccgcgtacaggcatttggagtggccccggaagactcaagtttccctgactgccgtaaggattggggcacaaggacagccaagaggactgcagctagagggcgaactagaagaacttaggcaggaccgcaccctgtatagaaagcgcggcgccctcttgctcaggcatcctctccacttgccgattccacagtctttgttactacaagaaactttcaccgcagatagaagacaccagcgatactctctggagaccagggtggtactcaatggccgggaggagacactccagactatggtattgggctgtcaggctgggcacccgtacgtctgtgcaggcctcatgcacccgtacgacggcaaggtaatccccaggaataccgaaggctgtttggtgacatggaaccagcacacatcactcacactgcttagtcggttggagagtggagttcagtag

SEQ ID NO: 293835 - DNA, 1653 bp, Artificial Sequence
  derived and/or modified sequence
atgggctggagcgacctgcagcctgccatgggcggggaggccgagcgcttccaggcccagctggaggtgaagctggtgactggaggcagccctgtggtgttcaccggcaacctgacccggcaggtgggcagcaagctggccttcagcgccagcctgagccacctgctgagtgaccaggccaacgtgacagccctgctggagaggaaggaggagaatggccggcgggtggccgccctgggcgctgagctgtttgtgcccggcctggtgggcctgcgggccctgggcctgctgcagcagaggggccagctgtggaccaacagcctgcgcatccagtacagcctgctgggccaggccaagcaggccgcccacgagtgcagcaccagccagaagctgcgggctgacagcggcagtgatggagcctaccgcctggagctgcggcatgagctgcactgcacccagatcctggccttcagccacaaggtgcagctgtggcatgaagaagattctggccacctgcacagccagctggaggtgtcctatggcaagcactgggacaagaacagcaacaagaggcacctgcgggtgtcccagaccttcaagaatgattctggccctgccctgagcaaccacttcatggagtttgtgctgcaggtgcctgagcggcaggtggactgccgggtgcagctgtaccacctgagcctgcggctgccctacgtggagagcagcagccacctgaaggtgcagtacaacggccggcccctgtttgtggccggcggccagtggaaggacaccagccgggccaccctgtggaagtgggagggcgccctgaacctggacagcccctggctgatggtgtctgctgcccaccggctgtactggccccacagagctgtgttccaggccgtgctggagctgaccctgggcaaggcctggaccctgaaggacctggtggtgtctgtgggctgccgcagccagggccccaaccgggagggcaagatccaggtgtacacagctgccaccacctacctgcgggtgtccacagtgacagtgctggcccagagcctcttccacagctggagcgagctggagagcgcctggaatgctgctgtgcagggcgagatccacgccgagaacagccgggacaggaagatcctgaactgctggctgaagggcccccagcaggagctgaacctgacagctgcctaccgccacctggagtggcccaggaagacccaggtgtccctgacagctgtgcgcatcggggcccagggccagccccggggcctgcagctggagggggagctggaggagctgcggcaggacaggaccctgtacaggaagagaggagccctgctgctgcggcaccccctgcacctgcccatcccccagagcctgctgctgcaggagaccttcaccgctgacagaagacaccagcgctacagcctggagaccagggtggtgctgaatggccgggaggagaccctgcagaccatggtgctgggctgccaggccggccacccctacgtgtgtgccggcctgatgcacccctatgatggcaaggtgatccccaggaacacagagggctgcctggtgacctggaaccagcacaccagcctgaccctgctgagccggctggagagcggcgtgcagtag

SEQ ID NO: 293836 - DNA, 1653 bp, Artificial Sequence
  derived and/or modified sequence
atgggctggagcgacctgcagcccgccatgggcggcgaggccgagcgtttccaggctcagcttgaagtgaagctggtgaccggcggaagcccagtcgtgtttaccggaaacttaacccgtcaggtaggctctaaacttgctttttccgccagcctgtcccacttactgtctgaccaagccaacgtcaccgcccttctggagcggaaggaagagaacgggagaagagtagccgcactgggagctgaactatttgtgccaggattggtaggcctgagagcactgggcttacttcagcagagagggcagctttggaccaactctttgcgaatccaatatagcctgctaggacaggcgaagcaggccgctcacgaatgttccacgagtcagaagctacgggcagatagcgggtccgatggggcttatcgcctagagttgcggcatgagctgcattgcacccaaattctggcattctcccacaaggtgcagctgtggcacgaggaggattccggtcacttacatagccagctggaggtcagctatgggaagcactgggacaagaatagcaataaacgtcacctccgagtttcacagactttcaaaaatgactccggccctgcactgtcaaatcacttcatggagttcgtgttgcaagtgccagaaaggcaggtggactgccgtgtgcagctgtaccatctctctttgcggctgccctacgtcgagagctccagccaccttaaagtgcaatacaatggccggcccctctttgtggcaggcgggcagtggaaggataccagcagggcaaccttatggaagtgggaaggtgccctgaacctggatagcccatggctcatggtaagcgcagctcataggttatactggccccacagggcggtctttcaggctgtgctcgagctgacactgggtaaagcctggacccttaaggacttggtggtgtccgtggggtgtaggtcacaagggcctaacagggaggggaagatccaagtctatacagcagctaccacctatctccgcgtatctaccgtcacagtcttagcccagtctttattccactcttggtccgaactggaatccgcctggaatgccgctgtccagggcgagattcacgccgagaattctcgagacaggaagatcctgaactgctggctcaagggccctcaacaagaactgaaccttacagcagcgtaccggcatttagagtggcctcgaaagacacaggtgtcactgacagccgttaggatcggcgcacaggggcaaccccgtggccttcaactggagggcgagttggaggagttacgtcaggaccggaccttgtatcggaaaaggggcgctctcttactccgacaccctctgcacctgcctattccacagagcctccttctgcaggagacctttaccgctgaccgacgtcaccagcgttactccttggagactcgggtcgttcttaatggaagagaggaaactctacagaccatggtgctagggtgccaggctggccatccatacgtgtgtgcaggactgatgcacccttatgacggaaaggtgattccccgaaatactgaaggatgcctggtcacatggaatcagcacacatccctgaccttgctatccaggctggaatcaggggttcagtag

SEQ ID NO: 293837 - DNA, 1653 bp, Artificial Sequence
  derived and/or modified sequence
atgggctggtcagacctgcagcccgctatggggggtgaggctgagcgcttccaggcacagcttgaagtaaagctggttacaggagggtcccccgtggttttcaccggaaacctgacaagacaggtgggctccaagttggcattctctgccagcttgtcgcacctgctgtcagatcaggcaaatgtcaccgctcttcttgaacggaaggaggaaaacggtcgtcgagtggctgcactgggtgccgagctgtttgttcccggtctagtgggactgcgagcactgggtctacttcagcagcggggtcagctatggacaaacagtttgaggatacaatatagcctgctaggacaggccaagcaggctgcgcacgaatgcagcacgtcccagaaactgcgggcagacagtggctccgacggagcctatcgcttggagctgagacatgagttgcactgtacccagatccttgctttttctcataaggtgcagctgtggcatgaagaggattccggacatctacacagtcaattagaggtgtcttacggaaaacattgggataagaatagtaacaaacgtcatttgagagtttcgcagaccttcaaaaacgacagcgggccagccctgagcaaccacttcatggagttcgtgctgcaggtcccagagagacaggtggattgtagggtgcaactctaccacctctcactccgtctcccctacgtggagagttcaagtcacctgaaggtgcaatataacgggcgaccactgttcgtcgcaggcggacagtggaaagataccagcagggccaccttgtggaagtgggaaggcgcactgaaccttgattccccgtggctgatggtgtctgcggctcatcggctgtactggccacacagggctgtgttccaggctgtcctggaactgacccttgggaaagcctggactttgaaagacctcgtagtgagtgtggggtgcaggagccagggccctaatagagaaggtaagattcaggtttatacagccgctacaacctacctcagggtttccactgtgacagtcttggcacagtcgctgttccactcttggtccgagctagagagtgcctggaacgcagctgtgcagggtgagattcacgctgagaactctcgggatcggaagatactgaattgctggcttaagggaccccagcaggaattgaatctcactgctgcgtaccgccatcttgagtggccgcgtaaaacacaggtcagcctgacagccgttagaatcggagcgcaaggacagcccagaggactgcagctggagggcgagttagaagagctgcggcaggatagaactctgtacaggaaaagaggggctctcttgctcagacatccgctgcaccttcctataccacagagtttgcttctgcaagaaactttcactgccgatcgtaggcaccaaaggtacagtttagagactagggttgtcctcaacggccgtgaggaaacgcttcagacaatggtgctgggctgccaggcgggtcatccatatgtgtgcgcaggcctgatgcacccttacgatggaaaagttatcccccgtaatacagaaggctgcttggtcacgtggaaccagcatacaagccttacactgctttcacggttggaatccggggtgcaatag

SEQ ID NO: 293838 - DNA, 3552 bp, Artificial Sequence
  derived and/or modified sequence
gaggaggtgtttgcccaggtgcggcgcacccaggcaggcgagctctccacccaggtgggttcttttgtgtggagtcacatcctgcagctgctggagacgcacgaccccctgaaacgggccctccgggacaccctccccgaggacatcctcagccaggagttccacccagaaatgtggaaacactcgtcctattctgatgtcaccttccgatcagcttgggctccggctggaaaatgctgaggaaattgctcacaggctgtttggcaggaagtcattctggggtcaggaagacgggagagagcctgagccagaggaacccccagggccagaaccagggcctgcaccacagccagccagccccgagtgtccaggagacagagacagaaggatgagatacctacagcagaaggtgacccggaggcgtggggcccggcaggctctgcgatgcgagctgagcgtgaagttgctggggcaggagctgagctttgtgaactgcggggccacggggagtcacgtgaaccactggccccttaacttggccgagctcgccatcaagctcatgaaggggcaggaggtgcagatgaaccggaggctgagcctggccgcacaggaactggtctttcccaccgtgtctggccttcctgcccggctgaccctaaatgcctcggctgccatcagcatccgggtccgaggaaccactgacttccagcagcgctcggatttctctgtgaatggttatgtcaagcccagtgccctgctccagatctcagctcagatgggcacagcgggcatcctggggcaggccgggctgaggtgggtgaccagcgtccgcagcgccgccagcctggatggcgggatccaggtgcagaagggccgggtccttaaggtgcatctgaacacgcctgaggaggccgtggagctgctcagcttcagctctcagctgtacctcatcaccagggatggcgtgaggagcctcagacatgtccctggcccttctgaggtccagtcctgtactggtgaggaagtgtcctacacctggggctggcgactgtgcactggagtgacctggccggtgcctggccagccctacctgctctcattgcctgtgttcgcggccgtgacgctgcagaaacgggacccggggctccgacagtacctgctggaagctgcctataccctgcagccccagaagggcagctggttcccccaagaagccacagcccacgtcttcatgggcacgcccgggtcagaagtgctgagggacgtcggggtggacatgagctacagcttgccccagaacaagttccggctcaagcttctccatcccaagaagaaaatcgagctggacggaaagatggaggctcttgggagtgcccacacgggtcacttggagctggtgctggatgacagggacgtctactacatcaagcttggcagctgggcgccgtggctcacgcctgtaatcccaacacttggggaggccaaggaggatggatcacttgaggccaggagtttgagaccagcctggccaacatgggctggagtgacctgcagccagccatgggtggcgaggctgagcggttccaggcgcagctggaggtgaaactggtgacggggggcagccccgtcgtcttcaccgggaacctcacacggcaggtgggcagcaagctggccttctccgcatcgctgagccatctgctgagtgaccaggccaacgtgacagcactgctggagaggaaggaggagaatggacggagggtggccgccctgggtgccgagctgtttgtgccagggctggtggggcttcgtgcccttggcctgctgcagcaacggggccagctctggaccaactccctgaggatccagtacagcctcctgggtcaggcaaagcaggcggcacacgagtgcagcaccagccagaagctgcgggcagacagtggctcagacggtgcctacaggctggagctgcgccacgagctccactgcacacagatcctagccttcagccacaaggtccagctctggcatgaggaggactcgggccacctgcactcacagctggaggtgagctacgggaagcactgggacaagaacagcaacaagaggcatctccgtgtcagccagaccttcaagaatgactcggggcccgccctgagcaatcacttcatggagtttgtgctgcaggtgcctgagaggcaggtggattgccgcgtgcagctttaccacttgagcctccgcctgccctatgtggagagcagcagtcacctgaaggtgcagtacaatgggcggccgctgtttgtggcaggcgggcagtggaaggacacatctcgggccaccctgtggaagtgggaaggagccttgaacctggatagtccatggctgatggtctctgcagctcacaggctatactggccacaccgagctgtgttccaggctgtcctggagctaacgctgggcaaggcctggaccctaaaggacctggtggtcagcgtgggctgcaggagtcagggccccaacagggaaggcaagatccaggtttacaccgcagctaccacctacctccgggtttccacagtgacagtcttggcacagagcctcttccacagctggagcgaactcgagtcagcctggaacgcagcagtgcagggcgagatccatgctgagaacagccgggaccgtaagatcctgaactgctggttgaaaggcccccagcaggagctgaacctaacagcggcctacaggcacctggagtggccccggaagacccaggtgtcgctcacggctgtgcggattggtgcccagggccagcctcggggcctgcagttggaaggagagctggaggagctgaggcaagacaggacattgtaccggaaacggggggccttgctccttaggcacccgttgcacctgcccatcccgcagagcctcctcctgcaggagaccttcacagctgataggcgacaccagcgctattccctggagactagggttgtcctgaatggccgagaggaaaccctgcagaccatggtcctgggctgccaggccggacacccctacgtctgtgcaggtctgatgcatccatacgatggcaaagtcatccccaggaacacagaggggtgcctggttacttggaatcagcacacgagtctcactctgttgtctaggctggagtctggagtgcaatgacttgatctcagctcaccgcaacctccacgtcccaggctgggcgagatggctcacgcctgtaatactagcactttgggaggccgaggcaggcggatcatttgaggtcaggagttcgagaccagcctgaccaacatggtgaaacccccatctctactaaatacaaaaaaaattagccaggcatggtggcgggctcctgtaatcccagttactcaggaggctgaggcaggagaatcgcttgaacctgggaggtggaggttgcagtgagccgagatcacgccactgcactccagcctgggtgacagagcgaggctgtctctaaaataaaataaaatataaaatagaataaaataagctgtttaatgacat

SEQ ID NO: 293839 - DNA, 300 bp, Artificial Sequence
  derived and/or modified sequence
atgtcctgccagcaaaatcagcaacagtgccaaccacctcctaagtgcccgatcccaaagtaccctcccaagtgcccttccaaatgcgcttcaagttgtcctccaccaatatcgtcttgttgcggcagttcatctggcggatgcggatgctgttcatctgaggggggaggctgctgcttgtcacaccatcggcaccataggagtcactgtcacagacccaaaagctctaactgctatggtagcgggagcgggcagcaaagtggcggatccggatgttgttccggaggcggatgctgttag

SEQ ID NO: 293840 - protein, 403 aa, Artificial Sequence
  derived and/or modified sequence
MFVASERKMRAHQVLTFLLLFVITSVASENASTSRGCGLDLLPQYVSLCDLDAIWGIVVEAVAGAGALITLLLMLILLVRLPFIKEKEKKSPVGLHFLFLLGTLGLFGLTFAFIIQEDETICSVRRFLWGVLFALCFSCLLSQAWRVRRLVRHGTGPAGWQLVGLALCLMLVQVIIAVEWLVLTVLRDTRPACAYEPMDFVMALIYDMVLLVVTLGLALFTLCGKFKRWKLNGAFLLITAFLSVLIWVAWMTMYLFGNVKLQQGDAWNDPTLAITLAASGWVFVIFHAIPEIHCTLLPALQENTPNYFDTSQPRMRETAFEEDVQLPRAYMENKAFSMDEHNAALRTAGFPNGSLGKRPSGSLGKRPSAPFRSNVYQPTEMAVVLNGGTIPTAPPSHTGRHLW

SEQ ID NO: 293841 - protein, 404 aa, Artificial Sequence
  derived and/or modified sequence
MFVASERKMRAHQVLTFLLLFVITSVASENASTSRGCGLDLLPQYVSLCDLDAIWGIVVEAVAGAGALITLLLMLILLVRLPFIKEKEKKSPVGLHFLFLLGTLGLFGLTFAFIIQEDETICSVRRFLWGVLFALCFSCLLSQAWRVRRLVRHGTGPAGWQLVGLALCLMLVQVIIAVEWLVLTVLRDTRPACAYEPMDFVMALIYDMVLLVVTLGLALFTLCGKFKRWKLNGAFLLITAFLSVLIWVAWMTMYLFGNVKLQQGDAWNDPTLAITLAASGWVFVIFHAIPEIHCTLLPALQENTPNYFDTSQPRMRETAFEEDVQLPRAYMENKAFSMDEHNAALRTAGFPNGSLGKRPSGSLGKRPSAPFRSNVYQPTEMAVVLNGGTEMVTHPRSLESFGAF

SEQ ID NO: 293842 - protein, 252 aa, Artificial Sequence
  derived and/or modified sequence
MFVASERKMRAHQVLTFLLLFVITSVASENASTSRGCGLDLLPQYVSLCDLDAIWGIVVEAVAGAGALITLLLMLILLVRLPFFLLITAFLSVLIWVAWMTMYLFGNVKLQQGDAWNDPTLAITLAASGWVFVIFHAIPEIHCTLLPALQENTPNYFDTSQPRMRETAFEEDVQLPRAYMENKAFSMDEHNAALRTAGFPNGSLGKRPSGSLGKRPSAPFRSNVYQPTEMAVVLNGGTIPTAPPSHTGRHLW

SEQ ID NO: 293843 - DNA, 4610 bp, Artificial Sequence
  derived and/or modified sequence
gggccgcggccgctgcagcagcgcgggccgggccagggggcgcctcgcgcggcagcgactctggcaggcgctgcagtgaagctggacccgcaggcgggcgtgcgtggagcgggggccgcggccgcgccgcagagatgtgactcgggccgaaggccagctggagcgtcggcgctgcggggccgcgggggtcgaatgttcgtggcatcagagagaaagatgagagctcaccaggtgctcaccttcctcctgctcttcgtgatcacctcggtggcctctgaaaacgccagcacatcccgaggctgtgggctggacctcctccctcagtacgtgtccctgtgcgacctggacgccatctggggcattgtggtggaggcggtggccggggcgggcgccctgatcacactgctcctgatgctcatcctcctggtgcggctgcccttcatcaaggagaaggagaagaagagccctgtgggcctccactttctgttcctcctggggaccctgggcctctttgggctgacgtttgccttcatcatccaggaggacgagaccatctgctctgtccgccgcttcctctggggcgtcctctttgcgctctgcttctcctgcctgctgagccaggcatggcgcgtgcggaggctggtgcggcatggcacgggccccgcgggctggcagctggtgggcctggcgctgtgcctgatgctggtgcaagtcatcatcgctgtggagtggctggtgctcaccgtgctgcgtgacacaaggccagcctgcgcctacgagcccatggactttgtgatggccctcatctacgacatggtactgcttgtggtcaccctggggctggccctcttcactctgtgcggcaagttcaagaggtggaagctgaacggggccttcctcctcatcacagccttcctctctgtgctcatctgggtggcctggatgaccatgtacctcttcggcaatgtcaagctgcagcagggggatgcctggaacgaccccaccttggccatcacgctggcggccagcggctgggtcttcgtcatcttccacgccatccctgagatccactgcacccttctgccagccctgcaggagaacacgcccaactacttcgacacgtcgcagcccaggatgcgggagacggccttcgaggaggacgtgcagctgccgcgggcctatatggagaacaaggccttctccatggatgaacacaatgcagctctccgaacagcaggatttcccaacggcagcttgggaaaaagacccagtggcagcttggggaaaagacccagcgctccgtttagaagcaacgtgtatcagccaactgagatggccgtcgtgctcaacggtgggaccatcccaactgctccgccaagtcacacaggaagacacctttggtgaaagactttaagttccagagaatcagaatttctcttaccgatttgcctccctggctgtgtctttcttgagggagaaatcggtaacagttgccgaaccaggccgcctcacagccaggaaatttggaaatcctagccaaggggatttcgtgtaaatgtgaacactgacgaactgaaaagctaacaccgactgcccgcccctcccctgccacacacacagacacgtaataccagaccaacctcaatccccgcaaactaaagcaaagctaattgcaaatagtattaggctcactggaaaatgtggctgggaagactgtttcatcctctgggggtagaacagaaccaaattcacagctggtgggccagactggtgttggttggaggtggggggctcccactcttatcacctctccccagcaagtgctggaccccaggtagcctcttggagatgaccgttgcgttgaggacaaatggggactttgccaccggcttgcctggtggtttgcacatttcaggggggtcaggagagttaaggaggttgtgggtgggattccaaggtgaggcccaactgaatcgtggggtgagctttatagccagtagaggtggagggaccctggcatgtgccaaagaagaggccctctgggtgatgaagtgaccatcacatttggaaagtgatcaaccactgttccttctatggggctcttgctctagtgtctatggtgagaacacaggccccgccccttcccttgtagagccatagaaatattctggcttggggcagcagtcccttcttcccttgatcatctcgccctgttcctacacttacgggtgtatctccaaatcctctcccaattttattcccttattcatttcaagagctccaatggggtctccagctgaaagcccctccgggaggcaggttggaaggcaggcaccacggcaggttttccgcgatgatgtcacctagcagggcttcaggggttcccactaggatgcagagatgacctctcgctgcctcacaagcagtgacacctcgggtcctttccgttgctatggtgaaaattcctggatggaatggatcacatgagggtttcttgttgcttttggagggtgtgggggatattttgttttggtttttctgcaggttccatgaaaacagcccttttccaagcccattgtttctgtcatggtttccatctgtcctgagcaagtcattcctttgttatttagcatttcgaacatctcggccattcaaagcccccatgttctctgcactgtttggccagcataacctctagcatcgattcaaagcagagttttaacctgacggcatggaatgtataaatgagggtgggtccttctgcagatactctaatcactacattgctttttctataaaactacccataagcctttaacctttaaagaaaaatgaaaaaggttagtgtttgggggccgggggaggactgaccgcttcataagccagtacgtctgagctgagtatgtttcaataaaccttttgatatttctcaaggccctagtctctgctgtctcccctccccaccccatccttgcaaagcactggggaaagtaaggccaatctggccctccctgtgtgacccgccttcgagttttccttaacagttagtacatttccttgtgttaccacgcatggggaagaaaacgcatggccccagaatgccacccccacctgacctccccggaagcaccccgcctctgcccagagcatgtgcttgcttctagagaatcccgttccagtcattgcgtggacagaaaacgtaagagtcctggggaggggtgggagggaatgaagctaggacctggggtgggggtgggggcggttgcatgcggacccggtattctgaaaagaaagaaatcttcaaacacctcggtcctgtccggtgaaaaaacgacagcattacacattctcgtgccaggaaatggttactcacccccgctctctggagtcctttggagctttctgataccattcacacgatggagcaattcacacgttcgttttctaagttctttattgtccaagcatataaggtgagcacagcacaaatggctgccatggaaagtcgtgcttccccagcataagaacagagccatctttgagccatgggaagcctcatttaatgagacctttttccccccttttaaatctgatatgttatcgcacttagggttttgttttattttggcttttaaggttgagagtgggctgaacgccttcataatgggggcggaggcgggagtgagaggagaagggagagagctgttctttttctaatgactacacctgaaaagtatcaagagacatctttgccaagagactgtagcagccagctgccccccgtggagcaaggtttaaagacaaaattaaatggcacctctgtttaagatctgcgtgtgtaaacaagactcgtttggggaaaacgacccgggaggagagcatctgtgatcaaaatctctcattgtaagcacaaattgttccgtgtctggttattaaaatcgctttgggtctataacagccactcttgtccccccttttaatagaaaattgtcattctagcctggatttctccccactggaggtggagggtgggaagagaagggagtcagctctgacagcttacaaactgggaagttctgtgcatctccagggattccagagttgaagatctggttgttggaagctgggcgcccagtgcttttttttttttttttttttagcccagatgccgtcaggacccactgaacaagggtgaactcgggtggtggtctcggttggccaaggctgagttgaacgcctcaggccaaaccccaagttgaaagggagcattgtggcttttataatccaatgatgcaatgatgataccagcttacaggagttctcagcaggtgctttttattaactgatgaagagctaaggctcacttttgatagataatatatatttattaaatgcattaatgtgtgttttataatgtacctttatcttcccccggctgactgttgcatacttataaaaaagaagttaaagaaatttcaagacaatcaatatgtaccataaacgactatataaatattacaaatttaaaaggctgtaaaccatgggcagataggttttattttcaaaatgctgttcttaacacaaaaataaaggctttactatttacttaa

SEQ ID NO: 293844 - DNA, 1215 bp, Artificial Sequence
  derived and/or modified sequence
atgttcgtggcatcagagagaaagatgagagctcaccaggtgctcaccttcctcctgctcttcgtgatcacctcggtggcctctgaaaacgccagcacatcccgaggctgtgggctggacctcctccctcagtacgtgtccctgtgcgacctggacgccatctggggcattgtggtggaggcggtggccggggcgggcgccctgatcacactgctcctgatgctcatcctcctggtgcggctgcccttcatcaaggagaaggagaagaagagccctgtgggcctccactttctgttcctcctggggaccctgggcctctttgggctgacgtttgccttcatcatccaggaggacgagaccatctgctctgtccgccgcttcctctggggcgtcctctttgcgctctgcttctcctgcctgctgagccaggcatggcgcgtgcggaggctggtgcggcatggcacgggccccgcgggctggcagctggtgggcctggcgctgtgcctgatgctggtgcaagtcatcatcgctgtggagtggctggtgctcaccgtgctgcgtgacacaaggccagcctgcgcctacgagcccatggactttgtgatggccctcatctacgacatggtactgcttgtggtcaccctggggctggccctcttcactctgtgcggcaagttcaagaggtggaagctgaacggggccttcctcctcatcacagccttcctctctgtgctcatctgggtggcctggatgaccatgtacctcttcggcaatgtcaagctgcagcagggggatgcctggaacgaccccaccttggccatcacgctggcggccagcggctgggtcttcgtcatcttccacgccatccctgagatccactgcacccttctgccagccctgcaggagaacacgcccaactacttcgacacgtcgcagcccaggatgcgggagacggccttcgaggaggacgtgcagctgccgcgggcctatatggagaacaaggccttctccatggatgaacacaatgcagctctccgaacagcaggatttcccaacggcagcttgggaaaaagacccagtggcagcttggggaaaagacccagcgctccgtttagaagcaacgtgtatcagccaactgagatggccgtcgtgctcaacggtgggaccgaaatggttactcacccccgctctctggagtcctttggagctttctga

SEQ ID NO: 293845 - DNA, 2178 bp, Artificial Sequence
  derived and/or modified sequence
atgttcgtggcatcagagagaaagatgagagctcaccaggtgctcaccttcctcctgctcttcgtgatcacctcggtggcctctgaaaacgccagcacatcccgaggctgtgggctggacctcctccctcagtacgtgtccctgtgcgacctggacgccatctggggcattgtggtggaggcggtggccggggcgggcgccctgatcacactgctcctgatgctcatcctcctggtgcggctgcccttcttcctcctcatcacagccttcctctctgtgctcatctgggtggcctggatgaccatgtacctcttcggcaatgtcaagctgcagcagggggatgcctggaacgaccccaccttggccatcacgctggcggccagcggctgggtcttcgtcatcttccacgccatccctgagatccactgcacccttctgccagccctgcaggagaacacgcccaactacttcgacacgtcgcagcccaggatgcgggagacggccttcgaggaggacgtgcagctgccgcgggcctatatggagaacaaggccttctccatggatgaacacaatgcagctctccgaacagcaggatttcccaacggcagcttgggaaaaagacccagtggcagcttggggaaaagacccagcgctccgtttagaagcaacgtgtatcagccaactgagatggccgtcgtgctcaacggtgggaccatcccaactgctccgccaagtcacacaggaagacacctttggtgaaagactttaagttccagagaatcagaatttctcttaccgatttgcctccctggctgtgtctttcttgagggagaaatcggtaacagttgccgaaccaggccgcctcacagccaggaaatttggaaatcctagccaaggggatttcgtgtaaatgtgaacactgacgaactgaaaagctaacaccgactgcccgcccctcccctgccacacacacagacacgtaataccagaccaacctcaatccccgcaaactaaagcaaagctaattgcaaatagtattaggctcactggaaaatgtggctgggaagactgtttcatcctctgggggtagaacagaaccaaattcacagctggtgggccagactggtgttggttggaggtggggggctcccactcttatcacctctccccagcaagtgctggaccccaggtagcctcttggagatgaccgttgcgttgaggacaaatggggactttgccaccggcttgcctggtggtttgcacatttcaggggggtcaggagagttaaggaggttgtgggtgggattccaaggtgaggcccaactgaatcgtggggtgagctttatagccagtagaggtggagggaccctggcatgtgccaaagaagaggccctctgggtgatgaagtgaccatcacatttggaaagtgatcaaccactgttccttctatggggctcttgctctagtgtctatggtgagaacacaggccccgccccttcccttgtagagccatagaaatattctggcttggggcagcagtcccttcttcccttgatcatctcgccctgttcctacacttacgggtgtatctccaaatcctctcccaattttattcccttattcatttcaagagctccaatggggtctccagctgaaagcccctccgggaggcaggttggaaggcaggcaccacggcaggttttccgcgatgatgtcacctagcagggcttcaggggttcccactaggatgcagagatgacctctcgctgcctcacaagcagtgacacctcgggtcctttccgttgctatggtgaaaattcctggatggaatggatcacatgagggtttcttgttgcttttggagggtgtgggggatattttgttttggtttttctgcaggttccatgaaaacagcccttttccaagcccattgtttctgtcatggtttccatctgtcctgagcaagtcattcctttgttatttagcatttcgaacatctcggccattcaaagcccccatgttctctgcactgtttggccagcataacctctagcatcgattcaaagcagagttttaacctgacggcatggaatgtataaatgagggtgggtccttctgcagatactctaatcactacattgctttttctataaaactacccataagcctttaaccttt

SEQ ID NO: 293846 - DNA, 1212 bp, Artificial Sequence
  derived and/or modified sequence
atgttcgtagcaagtgagcggaaaatgagagcacaccaggtgctcactttcctccttttatttgtcattacctccgtggcatctgagaatgcctccacttctcgcggttgcggcttggatctcctgccgcagtatgtgtccctctgtgatttagacgccatctggggaatcgtggttgaagccgtggcaggcgcaggcgctctgattaccctgttgctgatgctaatactgcttgtcagactacccttcatcaaggaaaaagagaaaaaaagtccagttggactgcacttcttattcctactgggcacactcggcctgttcggcctcacgttcgccttcatcattcaggaggatgaaaccatctgcagtgttcggcgctttttgtggggcgttctcttcgccctttgtttctcttgcctgttaagtcaggcttggagggtccgaaggcttgtgaggcacggaactggccctgccggctggcagttggttggcctggccctctgccttatgctcgtccaggtaattatagcagtggagtggcttgtgcttaccgtcttgcgagatacccgcccagcctgtgcctacgagcctatggacttcgtcatggccctgatttacgatatggtcctgctggtggtgactctgggattggccctctttactctttgtggcaaattcaagcgctggaagttaaatggcgcgttcttgctgattacagctttcctgagtgtgctgatctgggtcgcttggatgacgatgtacctcttcggcaacgtcaagttacagcagggggacgcttggaacgaccccacactggccatcactctggccgcatccggttgggtgttcgtcatattccacgcaatacctgaaatccattgtaccttgctgcccgccctgcaggaaaacacacccaactactttgacacgtcccagccgaggatgagggaaaccgctttcgaggaagacgtgcagctaccaagggcttatatggagaataaagccttctctatggacgaacataatgctgccttgaggaccgccggattcccgaatggaagtctaggcaagagaccgagcgggagcctcgggaagcggccaagtgctccattccgctctaatgtgtaccaaccaacggaaatggctgtggtgctgaatggaggcactatcccgaccgcacctccgtcccacaccggtaggcatctatggtag

SEQ ID NO: 293847 - DNA, 1215 bp, Artificial Sequence
  derived and/or modified sequence
atgttcgtcgccagtgaacggaaaatgcgagcccatcaggtccttacgtttctactcctgttcgtgatcacaagcgtggctagcgagaacgcttcaaccagtcgcggctgcggtctggatcttctacctcagtatgtctctttgtgcgacttagacgccatctgggggatcgttgtcgaagctgtcgcaggtgctggtgccctgattacacttcttctgatgctgatcctcctggtcagactcccgttcattaaggaaaaggaaaaaaagagccctgtcgggctgcacttcctgtttctcctgggtactttagggttgttcgggctgacttttgcctttataattcaagaggatgagaccatatgcagcgtgcgtagatttctctggggagtgctttttgctttgtgctttagctgcctcttgtcacaggcctggagggtacggagactcgttcgacacggtaccgggcccgcaggttggcagctggtggggcttgccctctgccttatgcttgtgcaagtcattattgctgtggagtggttggtgctcacagtgcttagagacactcgaccagcctgcgcatatgagcctatggattttgtcatggctctgatctacgatatggtgctattagttgtaacacttggactggctctgttcaccctctgtggaaagttcaagagatggaaattaaacggggcgttcctcctgataactgccttcctgtcggtcctgatttgggtagcctggatgaccatgtacctgtttgggaatgtgaagctccagcagggtgatgcttggaacgatcccacccttgccatcacgcttgcagctagcggctgggtgttcgtcattttccacgcaatcccggagatacattgcactctgcttcctgcactgcaggagaacaccccaaattacttcgataccagccaaccgcgaatgcgcgaaaccgccttcgaagaagatgtccagctccctcgggcatatatggagaacaaggccttctccatggatgagcataatgctgctctgaggactgcaggcttcccaaatgggagcctcggaaaacgaccttctggcagtctcggaaagcgcccatcggcccccttcagatctaacgtatatcaaccaacggagatggccgtggtgctgaatggtggcacagagatggtcacccatcctaggtccctcgaatccttcggagctttttag

SEQ ID NO: 293848 - DNA, 759 bp, Artificial Sequence
  derived and/or modified sequence
atgtttgtagcatccgagcgaaaaatgagggcacaccaggtccttactttccttctgctatttgtgattaccagcgtggcttctgaaaacgcatccacaagtcggggatgcggcttggaccttctccctcagtacgtgtccttatgcgatttagacgccatttggggaatcgtcgttgaagctgttgccggcgccggagccctgattactttgctcctcatgctgattctgttggtaagactgccattttttctgcttatcactgccttcctgagcgtgcttatttgggttgcatggatgacgatgtatttatttggcaacgtcaaattacagcagggagatgcttggaatgatccaaccctggccattaccctcgccgccagtggatgggtatttgtaattttccacgctattcccgaaattcactgtactctgctccctgccttgcaggagaatactccgaattacttcgacacctcccagcccagaatgcgggagactgcgttcgaggaggacgtgcaactgccacgggcgtacatggagaacaaggcctttagcatggacgaacacaatgctgccctgaggaccgcaggatttcccaatggatctctaggtaaacggcctagcgggagtcttggaaaacgaccgtctgcacccttcaggtccaacgtctaccagccaacagaaatggccgtggttcttaacggcggaaccatccctacggctcctccttctcacactggcagacatctttggtag

SEQ ID NO: 293849 - DNA, 1212 bp, Artificial Sequence
  derived and/or modified sequence
atgtttgtggccagcgagaggaagatgagggcccaccaggtgctgaccttcctgctgctgtttgtgatcacctctgtggcctctgaaaatgccagcaccagccggggctgcggcctggacctgctgccccagtatgtgtccctgtgtgacctggatgccatctggggcatcgtggtggaggccgtggccggggccggggccctgatcaccctgctgctgatgctgatcctgctggtgcggctgcccttcatcaaggagaaggagaagaagagccctgtgggcctgcacttcctgttcctgctgggcaccctgggcctgtttggcctgacctttgccttcatcatccaggaggatgagaccatctgcagcgtgcggcgcttcctgtggggcgtgctgtttgccctgtgcttcagctgcctgctgagccaggcctggagggtgcggcggctggtgagacatggaactggacctgctggctggcagctggtgggcctggccctgtgcctgatgctggtgcaggtgatcatcgctgtggagtggctggtgctgactgtgctgcgggacaccaggcctgcctgtgcctatgagcccatggactttgtgatggccctgatctatgacatggtgctgctggtggtgaccctgggcctggccctcttcaccctgtgtgggaagttcaagcgctggaagctgaatggagccttcctgctgatcacagccttcctgtctgtgctgatctgggtggcctggatgaccatgtacctgtttggaaatgtgaagctgcagcagggagatgcctggaatgaccccaccctggccatcaccctggccgccagcggctgggtgtttgtgatcttccacgccatccctgagatccactgcaccctgctgcctgccctgcaggagaacacccccaactactttgacaccagccagcccaggatgagggagacagcctttgaggaggatgtgcagctgccccgggcctacatggagaacaaggccttctccatggatgagcacaatgctgccctgaggacagctggcttccccaacggcagcctgggcaagaggcccagcggcagcctgggcaagaggcccagcgcccccttccgcagcaatgtgtaccagcccacagagatggctgtggtgctgaatggaggcaccatccccacagccccacccagccacacaggccgccacctgtggtag

SEQ ID NO: 293850 - DNA, 1215 bp, Artificial Sequence
  derived and/or modified sequence
atgtttgtggccagcgagaggaagatgagggcccaccaggtgctgaccttcctgctgctgtttgtgatcacctctgtggcctctgaaaatgccagcaccagccggggctgcggcctggacctgctgccccagtatgtgtccctgtgtgacctggatgccatctggggcatcgtggtggaggccgtggccggggccggggccctgatcaccctgctgctgatgctgatcctgctggtgcggctgcccttcatcaaggagaaggagaagaagagccctgtgggcctgcacttcctgttcctgctgggcaccctgggcctgtttggcctgacctttgccttcatcatccaggaggatgagaccatctgcagcgtgcggcgcttcctgtggggcgtgctgtttgccctgtgcttcagctgcctgctgagccaggcctggagggtgcggcggctggtgagacatggaactggacctgctggctggcagctggtgggcctggccctgtgcctgatgctggtgcaggtgatcatcgctgtggagtggctggtgctgactgtgctgcgggacaccaggcctgcctgtgcctatgagcccatggactttgtgatggccctgatctatgacatggtgctgctggtggtgaccctgggcctggccctcttcaccctgtgtgggaagttcaagcgctggaagctgaatggagccttcctgctgatcacagccttcctgtctgtgctgatctgggtggcctggatgaccatgtacctgtttggaaatgtgaagctgcagcagggagatgcctggaatgaccccaccctggccatcaccctggccgccagcggctgggtgtttgtgatcttccacgccatccctgagatccactgcaccctgctgcctgccctgcaggagaacacccccaactactttgacaccagccagcccaggatgagggagacagcctttgaggaggatgtgcagctgccccgggcctacatggagaacaaggccttctccatggatgagcacaatgctgccctgaggacagctggcttccccaacggcagcctgggcaagaggcccagcggcagcctgggcaagaggcccagcgcccccttccgcagcaatgtgtaccagcccacagagatggctgtggtgctgaatggaggaacagagatggtgacccaccccaggagcctggagagctttggagccttctag

SEQ ID NO: 293851 - DNA, 759 bp, Artificial Sequence
  derived and/or modified sequence
atgtttgtggccagcgagaggaagatgagggcccaccaggtgctgaccttcctgctgctgtttgtgatcacctctgtggcctctgaaaatgccagcaccagccggggctgcggcctggacctgctgccccagtatgtgtccctgtgtgacctggatgccatctggggcatcgtggtggaggccgtggccggggccggggccctgatcaccctgctgctgatgctgatcctgctggtgcggctgcccttcttcctgctgatcacagccttcctgtctgtgctgatctgggtggcctggatgaccatgtacctgtttggaaatgtgaagctgcagcagggagatgcctggaatgaccccaccctggccatcaccctggccgccagcggctgggtgtttgtgatcttccacgccatccctgagatccactgcaccctgctgcctgccctgcaggagaacacccccaactactttgacaccagccagcccaggatgagggagacagcctttgaagaagatgtgcagctgccccgggcctacatggagaacaaggccttctccatggatgagcacaatgctgccctgaggacagctggcttccccaacggcagcctgggcaagaggccttctggcagcctgggcaagaggccttctgcccccttccgcagcaatgtgtaccagcccacagagatggctgtggtgctgaatggaggcaccatccccacagccccacccagccacacaggccgccacctgtggtag

SEQ ID NO: 293852 - DNA, 1212 bp, Artificial Sequence
  derived and/or modified sequence
atgttcgtggccagcgagcggaagatgcgggcccaccaggtgctgaccttcctgctattattcgtaatcacctccgtggcaagtgagaatgccagtaccagccggggctgcgggctggacctcctcccccagtacgttagcctctgtgatctggacgctatctggggaattgttgtggaagccgtcgcgggggcaggagccctaatcaccctgttgctgatgctgattcttttagtgcgactgcctttcattaaagaaaaggagaagaagagtccagtcgggctccactttttattcctgttaggaacgctcggactttttggccttaccttcgcttttataattcaggaagacgagactatatgctctgtccgacgtttcttgtggggcgttctcttcgcactttgcttctcttgtctgctgagccaagcttggcgggtgagacgtctcgtacgccacggcaccgggccggccgggtggcaactagtgggtctggccttgtgcctaatgctggtgcaggtgataattgccgtggagtggctcgtcctgactgttctccgtgatacccggcccgcttgcgcttatgaacctatggacttcgtaatggcactaatttatgatatggttttacttgtggttacacttggattggcactctttacgctgtgtggaaaatttaagcggtggaagctgaatggcgcattcttgttgatcacagctttcttaagcgtacttatttgggtcgcatggatgactatgtacctatttggcaatgtgaagctgcagcagggggatgcatggaacgaccctacactggccatcactctcgctgcaagtggctgggtgttcgtgatatttcatgctatacctgagattcattgtactctcctgccagctctccaggagaacacccctaattattttgacacctctcaaccacgaatgagagagacagcttttgaggaagatgtgcagctccctcgcgcctatatggaaaacaaagccttcagcatggacgagcataacgccgctctcagaaccgccggattcccaaatggctccctcggaaagagaccatctggatcgctcggaaagcgcccctcagcacccttcagatcgaacgtgtaccagcccacggaaatggcagtcgtgctgaacgggggtacaattcctacagccccaccgagccatacaggcaggcacctgtggtag

SEQ ID NO: 293853 - DNA, 1215 bp, Artificial Sequence
  derived and/or modified sequence
atgttcgtggccagcgagcggaagatgcgggcccaccaggtgctgacatttcttctactcttcgtgattacatcagttgcaagtgagaacgcaagcacgagccgcgggtgtgggctcgatcttcttccacagtacgtcagcttgtgtgatctggatgctatctggggtattgttgtcgaagccgtggctggcgccggggctcttatcacacttttgctcatgttaattctcctagtgcggctgcctttcataaaagagaaagaaaaaaaaagccctgtggggttacactttttgtttctcctggggacattaggcttgttcgggctaacctttgccttcataatccaggaagacgaaacgatttgtagtgtccgccggtttctgtggggcgttcttttcgctctgtgttttagttgcttgctctcacaggcatggagggtcagacgtctggtgagacacggaactggcccagccggctggcagctggtaggcctggcactttgcctgatgctcgtccaggttataatagccgtggaatggttggtgctgaccgtgctacgggatactcgccccgcgtgcgcgtacgaaccaatggatttcgttatggccctaatctatgatatggttctgctggtcgtcactctcggccttgccctattcaccctctgcggaaaatttaagagatggaagttaaatggcgccttcctgctcattacggcctttctgtccgtactcatctgggtggcctggatgacaatgtatctctttggcaacgtcaagctccagcagggggatgcctggaacgatcctacactggccattaccctggcagccagtggctgggtctttgtgatatttcacgcaatcccagagattcattgcacgcttctgcccgccctgcaggagaacacgccaaactactttgataccagccagccgcgcatgagggaaacggctttcgaagaagatgtgcagctgcctagagcgtacatggagaacaaggctttctcaatggacgagcataatgctgccctcaggacggccggttttcccaacggttcactgggcaaaagaccctccggatcactgggaaaaagacccagtgctccatttcggtcaaacgtgtaccagccaacagagatggcggtggtcttgaacggcggcaccgaaatggtgactcatccgcgcagcctggagagtttcggcgctttctag

SEQ ID NO: 293854 - DNA, 759 bp, Artificial Sequence
  derived and/or modified sequence
atgttcgtggccagcgagcggaagatgcgggcccaccaggtgctgactttccttcttcttttcgtcatcaccagcgttgccagtgagaacgcctctacttcacggggctgcggtttggacctgctgccccagtacgtgtctctgtgtgacctagatgccatttgggggattgtggtggaggccgtggccggcgcgggggcactgataaccctgctcctcatgcttatactattggttcggttgccatttttcctgctcataactgcattcttatcagtcctgatctgggtggcttggatgacaatgtacctcttcgggaacgtcaagctccagcagggcgatgcttggaatgacccaacattagctattactttggctgcaagcggttgggtcttcgttatttttcatgctatcccagagatacactgcactttgcttcctgccttgcaggaaaacacacctaactattttgacactagtcagcctcggatgcgagaaactgcctttgaggaagatgtccagctgccgagagcctacatggagaataaggctttctcaatggacgagcacaatgccgccctgaggacagctggattccccaatgggtctctgggcaagagaccgtccgggtcactgggaaaaaggcccagtgcgccctttagaagcaatgtgtaccagccgacagaaatggccgtggtgctcaatggtggaactatccccaccgccccccccagccacaccgggagacacctgtggtag

SEQ ID NO: 293855 - DNA, 1212 bp, Artificial Sequence
  derived and/or modified sequence
atgttcgtggcatctgagaggaagatgcgcgctcaccaggtgttgaccttcctcctgctctttgtgatcacatccgtagcgagtgaaaatgcttctacatcgcggggatgcggtttagacctgctgccgcagtacgtgagtctgtgcgacttagacgcaatatggggcatagtggtggaagcagtggcgggagctggcgcactgatcacactgctacttatgctgatattgttagtgaggcttccctttattaaagagaaggaaaagaagtccccggtaggactgcacttcctgtttctattaggcactctggggctgttcgggctgaccttcgctttcatcatccaggaggacgagacgatttgtagcgtacgacgcttcctctggggcgtcctgtttgccctttgctttagctgcctgttaagtcaggcctggagggtgaggaggctggtgcgccatgggacaggaccagctggatggcagttggtgggactggccttgtgcctgatgcttgtgcaggtgatcattgcagtagaatggttagtgttaacagtcttgcgagacacacggccagcatgcgcctacgagccgatggacttcgtgatggccctgatctacgacatggtgctgttggtggtcactcttggactggcactctttaccctgtgcgggaagtttaaaagatggaagctgaatggtgctttcctcttgatcacggcctttcttagtgttctgatctgggttgcttggatgactatgtacctcttcggtaatgttaagcttcagcaaggcgacgcatggaatgacccgactctcgctattaccctcgcagccagcggctgggtttttgtcatattccacgccatacctgagatacattgcacattgctgcctgcgctccaggaaaacacccccaattactttgatacatcccagccaaggatgagggaaaccgccttcgaagaggacgttcaactgcccagagcatatatggagaataaggccttttcgatggacgaacataatgctgccttgcgtaccgcaggcttcccaaacggctcgctgggtaagagaccctccggatcactcgggaaacggccaagcgctccttttcggtccaatgtgtaccagccaacggagatggccgttgtgctcaacggaggtactatccccacagcacctccatctcacactggaaggcacctgtggtag

SEQ ID NO: 293856 - DNA, 1215 bp, Artificial Sequence
  derived and/or modified sequence
atgtttgtggcctccgagaggaaaatgcgagcccaccaggtcttgacctttctgcttttattcgttataacctccgtagctagcgagaatgctagcacctcgagaggttgcggcttggatctgttgcctcagtatgtgtcactatgtgatctcgacgcgatttggggaatagtggtggaagccgtggcaggagcgggtgccttgatcaccctgctgctgatgcttatcctgttagtgcgactgccttttatcaaggaaaaggaaaagaagagccctgtgggtttgcacttcctcttcttgctgggcacgctcggtcttttcggcttgactttcgcttttatcatacaagaggatgaaactatctgttcagtgcggcgtttcctctggggcgtgctatttgctttgtgtttttcctgcctcctttcgcaggcttggcgcgtgcggaggctcgtcaggcacggaaccgggccagcaggctggcaactcgtgggactggctctgtgtcttatgctggtgcaggttattatagctgtagaatggctagtgttgaccgtcctgagggacacaaggccggcttgcgcttacgagcccatggactttgttatggccctaatttacgatatggttctgctggtcgttacgctcggtctggctctgttcacactctgcgggaagttcaaaagatggaaattgaatggagcatttctgctgataaccgcatttttgtcagtcctcatctgggttgcctggatgaccatgtaccttttcgggaacgttaagctgcagcaaggcgacgcttggaatgacccaactctagccatcaccctggctgctagcgggtgggtgtttgtgatttttcatgccatccccgaaatccattgtacactgctaccagcccttcaggagaataccccgaattacttcgacacatcccagccacgaatgcgtgaaaccgcctttgaagaggacgtgcagctgccacgagcctacatggagaataaagcgttcagtatggatgaacataacgccgcactccgcacagccggattcccaaacgggagccttgggaaaaggccttcaggcagcctcggcaaaagacccagcgcccctttcaggtccaacgtgtaccagccaaccgagatggccgttgttcttaacggaggcactgagatggtgactcacccaagatctttagagagctttggcgcattttag

SEQ ID NO: 293857 - DNA, 759 bp, Artificial Sequence
  derived and/or modified sequence
atgttcgtggcaagcgaaagaaaaatgcgggctcaccaagtccttacctttcttctgctcttcgtcatcacttccgtggcatccgagaacgcctcaacatctaggggctgcggattggacctgctcccgcagtacgtgagtctgtgcgacctggacgccatctggggtattgtagtggaagctgttgcaggagccggtgcactgatcaccctgctgctcatgctaatcctcctagttcgattgccctttttcctgctcattaccgccttcctgtctgttttaatttgggttgcgtggatgacaatgtacctgtttggaaatgttaaactgcagcaaggtgatgcctggaatgaccccaccctcgcaatcaccctggccgctagcgggtgggtgtttgttatctttcatgccatcccagagatacactgcactctgctaccggctctccaggaaaacacacccaattactttgatacaagtcagccgcgtatgcgggaaactgccttcgaagaggacgtccagttaccaagggcttacatggagaacaaggccttttcaatggatgaacacaacgcagctctgaggactgcaggatttcccaatggatctctgggcaaaaggccaagcgggtctctcggtaagcgccctagcgctccatttcgctccaacgtttaccagccaactgagatggctgtggttctcaatggtggcaccattccgactgctcccccttcccatacgggccgtcacctgtggtag

SEQ ID NO: 293858 - DNA, 1212 bp, Artificial Sequence
  derived and/or modified sequence
atgttcgtggccagcgagagaaagatgagagcccaccaggtgctgaccttcctgctgctgttcgtgatcaccagcgtggccagcgagaacgccagcaccagcagaggctgcggcctggacctgctgccccagtacgtgagcctgtgcgacctggacgccatctggggcatcgtggtggaggccgtggccggcgccggcgccctgatcaccctgctgctgatgctgatcctgctggtgagactgcccttcatcaaggagaaggagaagaagagccccgtgggcctgcacttcctgttcctgctgggcaccctgggcctgttcggcctgaccttcgccttcatcatccaggaggacgagaccatctgcagcgtgagaagattcctgtggggcgtgctgttcgccctgtgcttcagctgcctgctgagccaggcctggagagtgagaagactggtgagacacggcaccggccccgccggctggcagctggtgggcctggccctgtgcctgatgctggtgcaggtgatcatcgccgtggagtggctggtgctgaccgtgctgagagacaccagacccgcctgcgcctacgagcccatggacttcgtgatggccctgatctacgacatggtgctgctggtggtgaccctgggcctggccctgttcaccctgtgcggcaagttcaagagatggaagctgaacggcgccttcctgctgatcaccgccttcctgagcgtgctgatctgggtggcctggatgaccatgtacctgttcggcaacgtgaagctgcagcagggcgacgcctggaacgaccccaccctggccatcaccctggccgccagcggctgggtgttcgtgatcttccacgccatccccgagatccactgcaccctgctgcccgccctgcaggagaacacccccaactacttcgacaccagccagcccagaatgagagagaccgccttcgaggaggacgtgcagctgcccagagcctacatggagaacaaggccttcagcatggacgagcacaacgccgccctgagaaccgccggcttccccaacggcagcctgggcaagagacccagcggcagcctgggcaagagacccagcgcccccttcagaagcaacgtgtaccagcccaccgagatggccgtggtgctgaacggcggcaccatccccaccgccccccccagccacaccggcagacacctgtggtag

SEQ ID NO: 293859 - DNA, 1215 bp, Artificial Sequence
  derived and/or modified sequence
atgttcgtggccagcgagagaaagatgagagcccaccaggtgctgaccttcctgctgctgttcgtgatcaccagcgtggccagcgagaacgccagcaccagcagaggctgcggcctggacctgctgccccagtacgtgagcctgtgcgacctggacgccatctggggcatcgtggtggaggccgtggccggcgccggcgccctgatcaccctgctgctgatgctgatcctgctggtgagactgcccttcatcaaggagaaggagaagaagagccccgtgggcctgcacttcctgttcctgctgggcaccctgggcctgttcggcctgaccttcgccttcatcatccaggaggacgagaccatctgcagcgtgagaagattcctgtggggcgtgctgttcgccctgtgcttcagctgcctgctgagccaggcctggagagtgagaagactggtgagacacggcaccggccccgccggctggcagctggtgggcctggccctgtgcctgatgctggtgcaggtgatcatcgccgtggagtggctggtgctgaccgtgctgagagacaccagacccgcctgcgcctacgagcccatggacttcgtgatggccctgatctacgacatggtgctgctggtggtgaccctgggcctggccctgttcaccctgtgcggcaagttcaagagatggaagctgaacggcgccttcctgctgatcaccgccttcctgagcgtgctgatctgggtggcctggatgaccatgtacctgttcggcaacgtgaagctgcagcagggcgacgcctggaacgaccccaccctggccatcaccctggccgccagcggctgggtgttcgtgatcttccacgccatccccgagatccactgcaccctgctgcccgccctgcaggagaacacccccaactacttcgacaccagccagcccagaatgagagagaccgccttcgaggaggacgtgcagctgcccagagcctacatggagaacaaggccttcagcatggacgagcacaacgccgccctgagaaccgccggcttccccaacggcagcctgggcaagagacccagcggcagcctgggcaagagacccagcgcccccttcagaagcaacgtgtaccagcccaccgagatggccgtggtgctgaacggcggcaccgagatggtgacccaccccagaagcctggagagcttcggcgccttctag

SEQ ID NO: 293860 - DNA, 759 bp, Artificial Sequence
  derived and/or modified sequence
atgttcgtggccagcgagagaaagatgagagcccaccaggtgctgaccttcctgctgctgttcgtgatcaccagcgtggccagcgagaacgccagcaccagcagaggctgcggcctggacctgctgccccagtacgtgagcctgtgcgacctggacgccatctggggcatcgtggtggaggccgtggccggcgccggcgccctgatcaccctgctgctgatgctgatcctgctggtgagactgcccttcttcctgctgatcaccgccttcctgagcgtgctgatctgggtggcctggatgaccatgtacctgttcggcaacgtgaagctgcagcagggcgacgcctggaacgaccccaccctggccatcaccctggccgccagcggctgggtgttcgtgatcttccacgccatccccgagatccactgcaccctgctgcccgccctgcaggagaacacccccaactacttcgacaccagccagcccagaatgagagagaccgccttcgaggaggacgtgcagctgcccagagcctacatggagaacaaggccttcagcatggacgagcacaacgccgccctgagaaccgccggcttccccaacggcagcctgggcaagagacccagcggcagcctgggcaagagacccagcgcccccttcagaagcaacgtgtaccagcccaccgagatggccgtggtgctgaacggcggcaccatccccaccgccccccccagccacaccggcagacacctgtggtag

SEQ ID NO: 293861 - protein, 753 aa, Artificial Sequence
  derived and/or modified sequence
MGDMDCSSQKIAKSDSIHHMSHSQGQPELPPLPASANEEPSGLYQTVMSHSFYPPLMQRTSWTLAAPFKEQHHHRGPSDSIANNYSLMAQDLKLKDLLKVYQPATISVPRDRTGQGLPSSGNRSSSEPMRKKTKFSSRNKEDSTRIKLAFKTSIFSPMKKEVKTSLTFPGSRPMSPEQQLDVMLQQEMEMESKEKKPSESDLERYYYYLTNGIRKDMIAPEEGEVMVRISKLISNTLLTSPFLEPLMVVLVQEKENDYYCSLMKSIVDYILMDPMERKRLFIESIPRLFPQRVIRAPVPWHSVYRSAKKWNEEHLHTVNPMMLRLKELWFAEFRDLRFVRTAEILAGKLPLQPQEFWDVIQKHCLEAHQTLLNKWIPTCAQLFTSRKEHWIHFAPKSNYDSSRNIEEYFASVASFMSLQLRELVIKSLEDLVSLFMIHKDGNDFKEPYQEMKFFIPQLIMIKLEVSEPIIVFNPSFDGCWELIRDSFLEIIKNSNGIPKVESVLFPELKGYNLLLGTVNAEEKLVSDFLIQTFKVFQKNQVGPCKYLNVYKKYVDLLDNTAEQNIAAFLKENHDIDDFVTKINAIKKRRNEIASMNITVPLAMFCLDATALNHDLCERAQNLKDHLIQFQVDVNRDTNTSICNQYSHIADKVSEVPANTKELVSLIEFLKKSSAVTVFKLRRQLRDASERLEFLMDYADLPYEDIKLNSTLFLWPDQIEDIFDNSRNLLLHKRDQAEMDLIKRYRESLGLSWK

SEQ ID NO: 293862 - DNA, 2262 bp, Artificial Sequence
  derived and/or modified sequence
atgggcgacatggactgtagctctcagaaaatcgcaaagtccgatagcattcaccatatgagtcactcccagggacagcccgaactcccacccctgcctgcatccgccaacgaggagccctcgggtctgtaccaaactgttatgtcacactcgttctaccctccactgatgcagcgcacctcatggaccctggccgctccttttaaggaacagcatcatcatcgcggtccctcggacagcattgcaaataattatagcttgatggctcaagacctcaagctgaaggacctactgaaagtctaccaacccgctaccattagcgtccctagggatcgcaccggccaggggctgccatcttcaggcaatcgttcctcctctgagcccatgcggaagaaaacgaaattctcaagtaggaacaaagaggactctacccggatcaagctggcattcaaaactagcatcttctccccaatgaaaaaggaggtcaagacctccctgaccttccctgggtcacgacccatgtctcccgagcaacaactggacgttatgctgcaacaagagatggagatggaatccaaggaaaagaagccttccgaatctgatttagaacgctattattactacctaaccaacggcatcagaaaggacatgattgctcctgaagagggcgaagtcatggtccgaatctccaagctcatctccaatacactgctgactagccccttcttagaacctctcatggttgtccttgtgcaggaaaaggaaaatgactattattgctctctgatgaaatctatagtggactacattctgatggatcctatggagcgaaagcgtctgtttattgagtcgattccccgcctgttcccgcagcgggtgatcagagcacccgtcccctggcattcagtttatcggtcggccaagaagtggaacgaggagcatctgcataccgtcaatccgatgatgttgaggcttaaagagctgtggttcgctgagttcagagacctgcggtttgtgagaacggccgagatcctggctgggaaactccctttacagcctcaggaattctgggacgtcatccagaaacattgcctggaggcccatcagacgcttttgaacaaatggatcccaacctgcgcccaactcttcacctcccggaaggagcactggatccacttcgcccctaagtcaaattacgatagttcccgcaacattgaagaatacttcgcatcggttgctagttttatgagcctgcagctccgcgaactcgtcatcaaaagtttggaagacctggtgtccttattcatgattcacaaagacggaaacgattttaaagaaccgtaccaggaaatgaagttctttatacctcaactaatcatgatcaagctggaagtgagtgaaccaatcatcgtgtttaatccttctttcgacgggtgctgggagctcattagagacagcttcctcgagattatcaagaacagcaacggaattcctaaggtggagtcagtgctcttccccgaactgaaagggtacaacttgctcctggggactgtgaatgccgaagaaaaattagtttcggatttcctgatccaaactttcaaagtctttcagaaaaaccaggtgggcccctgtaaatacttaaatgtttataaaaagtacgtcgatctgcttgataacacagcagaacaaaatatcgctgcatttctgaaggaaaaccacgacatagacgacttcgtcaccaagattaatgcaatcaaaaagcggagaaacgaaatcgcttctatgaacataacagttcctttggcaatgttttgcctggatgcgactgcccttaaccatgacctgtgcgagagagcccagaaccttaaagaccatttaattcagttccaagtggacgttaacagagacactaataccagcatttgcaatcagtattctcatatagccgacaaagtgagtgaagtgcctgccaacaccaaagaattagtgagcttaatcgagttcttgaaaaagtcttcagccgtgaccgtgttcaaactccgtagacagttgagggacgcttccgagcgtctggaattcctcatggattatgccgatctgccttacgaagatattaaactcaactcgaccctgttcttatggcctgatcagattgaagatatctttgacaattcccggaatctcttattacacaagagagaccaggcggaaatggatctcattaaacgctatcgtgaatctctgggcctgtcctggaagtag

SEQ ID NO: 293863 - DNA, 2262 bp, Artificial Sequence
  derived and/or modified sequence
atgggagacatggactgcagcagccagaagatcgccaagagtgacagcatccaccacatgagccacagccagggccagcctgagctgccccccctgcctgccagcgccaatgaggagcccagcggcctgtaccagacagtgatgagccacagcttctacccacccctgatgcagaggacctcctggaccctggccgcccccttcaaggagcagcaccaccaccggggccccagcgacagcatcgccaacaactacagcctgatggcccaggacctgaagctgaaggacctgctgaaggtgtaccagcctgccaccatctctgtgccccgggacagaacaggccagggcctgcccagcagcggcaacagaagcagcagcgagcccatgaggaagaagaccaagttcagcagcaggaacaaggaggacagcacccgcatcaagctggccttcaagaccagcatcttcagccccatgaagaaggaggtgaagaccagcctgaccttccctggcagccggcccatgagccctgagcagcagctggatgtgatgctgcagcaggagatggagatggagagcaaggagaagaagcccagcgagagtgacctggagcgctactactactacctgaccaacggcatcaggaaggacatgattgcccctgaggagggggaggtgatggtgcgcatcagcaagctgatcagcaacaccctgctgaccagccccttcctggagcccctgatggtggtgctggtgcaggagaaggaaaatgactactactgcagcctgatgaagagcatcgtggactacatcctgatggaccccatggagaggaagaggctcttcatcgagagcatccccaggctcttcccccagagggtcatccgggcccctgtgccctggcacagcgtgtaccgcagcgccaagaagtggaatgaggagcacctgcacacagtgaaccccatgatgctgcggctgaaggagctgtggtttgctgagttccgggacctgcgctttgtgaggacagctgagatcctggccggcaagctgcccctgcagccccaggagttctgggatgtgatccagaagcactgcctggaggcccaccagaccctgctgaacaagtggatccccacctgtgcccagctgttcaccagcaggaaggagcactggatccactttgcccccaagagcaactatgacagcagcagaaatattgaggagtactttgcctctgtggccagcttcatgagcctgcagctgcgggagctggtgatcaagagcctggaggacctggtgtccctcttcatgatccacaaggatggaaatgacttcaaggagccctaccaggagatgaagttcttcatcccccagctgatcatgatcaagctggaggtgtctgagcccatcatcgtgttcaaccccagctttgatggctgctgggagctgatccgggacagcttcctggagatcatcaagaacagcaatggcatccccaaggtggagagcgtgctcttccctgagctgaagggctacaacctgctgctgggcaccgtgaatgctgaggagaagctggtgtctgacttcctgatccagaccttcaaggtgttccagaagaaccaggtgggcccctgcaagtacctgaatgtgtacaagaagtatgtggacctgctggacaacacagctgagcagaacattgctgccttcctgaaggaaaatcatgacattgatgactttgtgaccaagatcaatgccatcaagaagagaagaaatgagatcgcctccatgaacatcaccgtgcccctggccatgttctgcctggatgccacagccctgaaccacgacctgtgtgagcgggcccagaacctgaaggaccacctgatccagttccaggtggatgtgaacagagacaccaacaccagcatctgcaaccagtacagccacatcgctgacaaggtgtctgaggtgcctgccaacaccaaggagctggtgtccctcatcgagttcctgaagaagagcagcgctgtgaccgtcttcaagctgcggcggcagctgagagatgccagcgagcggctggagttcctgatggactatgctgacctgccctatgaggacatcaagctgaacagcaccctcttcctgtggccagaccagatcgaggacatctttgacaacagcaggaacctgctgctgcacaagagggaccaggccgagatggacctgatcaagcgctaccgggagagcctgggcctgtcctggaagtag

SEQ ID NO: 293864 - DNA, 2262 bp, Artificial Sequence
  derived and/or modified sequence
atgggcgacatggactgcagcagccagaagatcgccaagagcgacagcatccaccatatgtcacacagccaggggcagccagaactgcctcctctgcccgcctctgctaatgaggagccttcagggctgtaccagactgtcatgagtcactctttttatccaccactaatgcagcggacttcctggaccttggctgccccttttaaggaacagcatcatcatagaggtcctagcgattccatagccaataactacagcttgatggcacaggatctgaagcttaaggacctgttaaaggtatatcagccggccaccatcagtgttcctagagatcgcactggacaaggattgccaagcagcggaaataggtcgtcctctgagcccatgcgaaaaaagaccaagttctcctcccggaataaggaggatagtacccgcatcaagctagccttcaagacaagtattttttcaccaatgaaaaaggaagtgaagactagcctcacctttcccggtagtcgccccatgagcccagagcaacagctggacgtgatgttgcaacaggaaatggagatggagagcaaggagaaaaaaccatctgagtccgatcttgagcgctattactattacctgactaacggaattagaaaagatatgattgcccctgaagagggcgaagtgatggtgagaattagcaagctcatttccaatactctgctgaccagcccatttctcgagccactcatggtggttctcgtgcaggagaaggagaacgactattactgtagcctgatgaaaagtatcgtggattacatcctgatggatccaatggagaggaagaggctcttcattgagagcatccccagactatttccccaacgagtgattcgtgcacccgtcccatggcacagcgtgtaccggagcgccaagaagtggaatgaggagcatctgcataccgttaatccaatgatgctgcgcctgaaagagctctggttcgccgaatttcgtgacctccgattcgttcgcacagctgaaatcttggcaggtaagctccctctgcagcctcaagaattctgggatgtgatccaaaagcattgtctggaggcacatcaaacccttctcaataaatggattcccacatgtgcgcagctctttactagcagaaaagaacactggatccatttcgctcctaagagtaattatgacagcagcagaaacatcgaggagtactttgcctcagtggcttccttcatgtccttacagctgcgggagttggtcattaaatccttagaagacctggtttcgctctttatgatccacaaggatgggaacgacttcaaggagccgtaccaagaaatgaagtttttcattccccaattaataatgataaaactcgaagtgagcgaacctatcattgtctttaacccatcatttgacggatgctgggaactcattagggattcattcttggagatcatcaaaaatagcaatggcatcccaaaagtggagagcgtcctctttcccgaactgaagggctataacctgctgctagggaccgtgaatgctgaggagaagctagtgagcgactttttaatccaaacttttaaagtctttcagaagaaccaggtgggtccttgcaagtacctgaatgtctataaaaaatacgtcgatttactcgacaacacagcggaacagaatatcgcagccttcttgaaggaaaaccatgatattgacgacttcgttactaaaataaacgctataaaaaaacggcggaatgaaatcgcgtcaatgaacattacagtgccattggcaatgttttgtctggacgctaccgcgcttaaccacgatctttgcgagcgagcacagaacctaaaagatcatttgattcagttccaggtcgatgttaatcgagatactaacaccagcatctgcaatcaatatagtcacatagcagacaaagtgtccgaagtgcctgccaacactaaggaactggtgtccttgattgaattcctgaaaaaatcatctgctgtcacggtttttaaactccgccgacagctgagggatgcttccgaaagattggaatttctgatggattacgccgacttaccttatgaagacatcaagctcaattctaccctgtttctttggcctgatcaaattgaggatattttcgataactcccggaatctgctcctgcacaaaagggaccaggccgaaatggacctgattaagcggtaccgagagagtctgggtctttcatggaaatag

SEQ ID NO: 293865 - DNA, 2262 bp, Artificial Sequence
  derived and/or modified sequence
atgggcgacatggattgttctagccaaaaaatcgccaagagtgattccatccaccacatgtcccattcccaaggccagcctgagctgccaccccttcccgcatcagcaaacgaggagcctagcggattataccagactgtgatgtcgcatagcttttaccctccactaatgcagaggacctcttggacccttgccgcaccattcaaagagcagcatcatcatcggggacctagtgactctatcgctaacaattactccctaatggcgcaggacctgaagctgaaagatctccttaaagtgtaccagccagcgacgattagcgtgcctcgtgatcgcaccgggcaggggctgccaagcagtggcaatcgatcttcttccgaacctatgaggaaaaaaacaaagttctcctctcggaacaaggaagactctaccaggatcaagctcgccttcaagaccagtattttctctcctatgaagaaagaggtgaagacatctctaacatttcccggaagtcgtccgatgtcaccagaacaacagctggacgtgatgcttcaacaagaaatggaaatggaaagcaaagagaaaaaaccgagcgagtcagacctggagaggtattactactacctaacaaacggaatcagaaaggacatgattgctccagaggagggcgaagtgatggtgcgcatctccaaacttatttcaaacaccctgctcaccagtccgttcctagaaccgttaatggtcgtgctggtgcaggagaaggagaacgactattactgctctctaatgaaaagtattgtcgattacattctcatggaccctatggagcgaaagcgcttgtttatcgagtctatcccgagactctttcctcaacgagttataagggcccctgtgccttggcattccgtgtatcggagcgccaagaaatggaacgaagaacatctgcatacagtgaaccctatgatgctgcggcttaaagagctgtggttcgcagaatttcgggacctgagatttgtgagaacagcggaaattctggccggaaagttgccgctccagcctcaagagttctgggatgtcatacagaaacactgtctggaggcccaccaaaccttactcaataagtggatccccacatgtgcccagttatttactagtcgcaaggaacactggatccatttcgcccctaagagtaattacgattcatctcggaatatcgaagaatacttcgcatcggttgcctctttcatgtcactccaactgagagaactggtcataaagagcctcgaggacctggtgtctctattcatgatccacaaggatggaaacgactttaaggagccttaccaggagatgaagtttttcattccccagttaataatgattaagttggaagtttccgagcccattattgtgtttaatccatccttcgacgggtgttgggagttgatccgggactctttcttagaaatcataaaaaatagcaacggtatcccgaaggtcgaatctgtcctgttccctgaactgaaggggtataatctgttactgggtactgtgaatgccgaagagaaactggtgtccgatttcctgattcagactttcaaagtgtttcagaagaatcaggttggcccatgcaaatatttaaacgtgtataaaaagtacgtcgacctgctggacaatactgccgagcagaatatagccgcattcctgaaggaaaaccacgacatcgacgattttgttaccaagatcaatgcaatcaagaagcgccgaaacgagattgctagcatgaacattactgttccacttgccatgttctgcttagatgctactgctttgaaccatgatctgtgcgagcgcgctcagaacctgaaagaccacctgattcagtttcaggtcgacgtgaaccgagacacaaatacatccatatgcaatcagtattcccatatcgccgacaaggtgtctgaggttcccgctaatacaaaggagttagtgtctctgatcgagtttttaaaaaaaagcagtgcagtcaccgtgtttaaactgcggaggcagctgagagacgcttctgaaaggctcgaattccttatggattacgcagacctcccctatgaagacataaagctgaacagcacgctgttcctgtggccagaccagatagaggacatctttgacaactctaggaatttgctgttgcacaagcgcgaccaagctgagatggatctcatcaaaagatatcgagagtcactcggcctgtcgtggaagtag

SEQ ID NO: 293866 - DNA, 2262 bp, Artificial Sequence
  derived and/or modified sequence
atgggcgacatggactgcagcagccagaagatcgccaagagcgacagcatccaccacatgagccacagccagggccagcccgagctgccccccctgcccgccagcgccaacgaggagcccagcggcctgtaccagaccgtgatgagccacagcttctacccccccctgatgcagagaaccagctggaccctggccgcccccttcaaggagcagcaccaccacagaggccccagcgacagcatcgccaacaactacagcctgatggcccaggacctgaagctgaaggacctgctgaaggtgtaccagcccgccaccatcagcgtgcccagagacagaaccggccagggcctgcccagcagcggcaacagaagcagcagcgagcccatgagaaagaagaccaagttcagcagcagaaacaaggaggacagcaccagaatcaagctggccttcaagaccagcatcttcagccccatgaagaaggaggtgaagaccagcctgaccttccccggcagcagacccatgagccccgagcagcagctggacgtgatgctgcagcaggagatggagatggagagcaaggagaagaagcccagcgagagcgacctggagagatactactactacctgaccaacggcatcagaaaggacatgatcgcccccgaggagggcgaggtgatggtgagaatcagcaagctgatcagcaacaccctgctgaccagccccttcctggagcccctgatggtggtgctggtgcaggagaaggagaacgactactactgcagcctgatgaagagcatcgtggactacatcctgatggaccccatggagagaaagagactgttcatcgagagcatccccagactgttcccccagagagtgatcagagcccccgtgccctggcacagcgtgtacagaagcgccaagaagtggaacgaggagcacctgcacaccgtgaaccccatgatgctgagactgaaggagctgtggttcgccgagttcagagacctgagattcgtgagaaccgccgagatcctggccggcaagctgcccctgcagccccaggagttctgggacgtgatccagaagcactgcctggaggcccaccagaccctgctgaacaagtggatccccacctgcgcccagctgttcaccagcagaaaggagcactggatccacttcgcccccaagagcaactacgacagcagcagaaacatcgaggagtacttcgccagcgtggccagcttcatgagcctgcagctgagagagctggtgatcaagagcctggaggacctggtgagcctgttcatgatccacaaggacggcaacgacttcaaggagccctaccaggagatgaagttcttcatcccccagctgatcatgatcaagctggaggtgagcgagcccatcatcgtgttcaaccccagcttcgacggctgctgggagctgatcagagacagcttcctggagatcatcaagaacagcaacggcatccccaaggtggagagcgtgctgttccccgagctgaagggctacaacctgctgctgggcaccgtgaacgccgaggagaagctggtgagcgacttcctgatccagaccttcaaggtgttccagaagaaccaggtgggcccctgcaagtacctgaacgtgtacaagaagtacgtggacctgctggacaacaccgccgagcagaacatcgccgccttcctgaaggagaaccacgacatcgacgacttcgtgaccaagatcaacgccatcaagaagagaagaaacgagatcgccagcatgaacatcaccgtgcccctggccatgttctgcctggacgccaccgccctgaaccacgacctgtgcgagagagcccagaacctgaaggaccacctgatccagttccaggtggacgtgaacagagacaccaacaccagcatctgcaaccagtacagccacatcgccgacaaggtgagcgaggtgcccgccaacaccaaggagctggtgagcctgatcgagttcctgaagaagagcagcgccgtgaccgtgttcaagctgagaagacagctgagagacgccagcgagagactggagttcctgatggactacgccgacctgccctacgaggacatcaagctgaacagcaccctgttcctgtggcccgaccagatcgaggacatcttcgacaacagcagaaacctgctgctgcacaagagagaccaggccgagatggacctgatcaagagatacagagagagcctgggcctgagctggaagtag

SEQ ID NO: 293867 - DNA, 3073 bp, Artificial Sequence
  derived and/or modified sequence
gttaagagtccagggaggaggagggagaacagttcgggctgccaggatgttgtttggagggggaactcctcagcgggccaaagtctatgacctcagagaggcaacctcatgaacagagctttcagaacatctggaaagttccattgttggtgtcatccccattatgctataaggaagtgtgaatttcagaccaactggataggagaggcacatccctggagaagctgaaagctctttattcattttaaaaaaatagctacaattagagtggacaccatgggtgacatggattgctcatctcagaagatcgccaaaagtgactccatacatcacatgagccactcccaggggcagccagagctgcctcctctgcctgcttctgctaatgaggaaccgtctggactctatcagactgtcatgtcacacagcttttacccgcccttgatgcaacgcacgtcatggaccttggctgcacccttcaaagaacagcatcaccaccgtggacccagtgattccatcgccaacaactactccttgatggcccaggacctgaagctgaaagatctgctgaaggtctaccaaccggccaccatcagtgtccctagggacaggaccggtcaggggctgccatcatcaggaaatagaagctcatcagagcccatgaggaaaaaaacgaagttttcctccagaaacaaagaggattccactaggatcaagttggccttcaagacgtcaatcttctcacccatgaagaaggaggtaaagacatctttgacgttcccaggaagcagaccaatgagtccagaacagcagctcgatgtcatgttacagcaggagatggaaatggaaagtaaagaaaagaagccatctgaatcggacctggagagatactattactatctgaccaatggaattcgcaaagacatgattgcccctgaggagggtgaagtgatggttcggatttcaaagctgatttctaacacgctgctgacgagtcccttcctggagcccctgatggtggtcctcgtgcaggagaaggagaatgactattactgtagcctcatgaaaagcatcgttgattacatcctcatggacccaatggagagaaaacggctctttattgagagcatcccccgcttgtttcctcaaagagtgatccgggcccctgtgccctggcacagtgtctacaggagcgccaagaagtggaacgaggagcatctgcacacggtgaaccccatgatgctcaggctgaaagaactgtggtttgcagaattcagagacctcaggtttgttcgaacagcagaaatactagcgggaaaattgcctctgcagcctcaggaattttgggatgtgatccagaaacactgcctggaggcacaccagactcttctcaacaagtggatccccacctgcgcccagctttttacctcacggaaggagcactggattcattttgctcccaagagcaactatgactcaagtcgaaacattgaggaatattttgcttctgtggcatcattcatgtcgctgcagcttagggagctggtcattaagtcacttgaggacctcgtttcccttttcatgatacacaaagatgggaatgattttaaggagccctaccaagagatgaagtttttcatacctcagctaatcatgatcaaacttgaagtcagtgaacccattattgtcttcaatccatcttttgatggctgctgggaattaatacgtgactctttcctggaaattattaagaactctaatgggatccccaaggtggaatctgtcctgttcccagagctgaaaggatataatctgctccttggaactgttaacgcagaagaaaaacttgtttctgattttttgattcaaactttcaaggtatttcagaaaaatcaagttggcccctgcaaatatttaaatgtctacaaaaagtatgttgacttattggataacacggcagagcaaaacatcgctgcgttcctgaaagaaaatcatgacattgatgattttgtgacgaagatcaatgccataaagaaacggagaaatgaaattgcatccatgaacatcaccgtgcctttagccatgttctgccttgatgctacggccctaaatcatgatctctgtgagcgagctcaaaatcttaaagaccatctgattcaattccaagtggatgtaaaccgagacaccaataccagcatttgtaatcagtacagccacatcgcagacaaagtcagtgaggttcctgccaacactaaggagctggtatccctcattgaattcctaaagaaatccagtgctgtcactgtgttcaaactcaggaggcaacttagagatgcaagtgaacggctggagttcctgatggactatgcagacttgccgtatgaggacatcaaattgaacagcactctgttcctctggccagaccagattgaagatatctttgacaacagccggaacttgctccttcacaagagggatcaggcagaaatggatctgattaaaaggtaccgggagagtctgggattgtcttggaaatgagacctgacttcttcacccatgctgcaggttcctggttctgtctaagccatcccccagctcactccatggcaacgtgtgggcgaagtctgaaaacaattggtggagaaggcatttcctttggtttcccactgagggatgttttctttaagactgcttcactgtaataacctctgctaatgtcttcccttcctgccttgaataattggaatttggtggtgcagagagaaaaacgcaaaactagtggcatgttataacggcctccccaataataatagtgaaattgtcagccttacattggagaccacagatctgtaagatatcaagatatcaagataataaaggcatggcaggggggctgagaaattgcctattttgcagctggtcttattcagagctaatgtggctgtaatcacttattcattcattatttgtcaattcagttggtatttattgcggattttcatgatgtgctatgctctgttctagacatctatgtgtgtttggctgctaaataaagattttaatccagcgacat

SEQ ID NO: 293868 - protein, 458 aa, Artificial Sequence
  derived and/or modified sequence
MEEHTEAGSAPEMGAQKALIDNPADILVIAAYFLLVIGVGLWSMCRTNRGTVGGYFLAGRSMVWWPVGASLFASNIGSGHFVGLAGTGAASGLAVAGFEWNALFVVLLLGWLFAPVYLTAGVITMPQYLRKRFGGRRIRLYLSVLSLFLYIFTKISVDMFSGAVFIQQALGWNIYASVIALLGITMIYTVTGGLAALMYTDTVQTFVILGGACILMGYAFHEVGGYSGLFDKYLGAATSLTVSEDPAVGNISSFCYRPRPDSYHLLRHPVTGDLPWPALLLGLTIVSGWYWCSDQVIVQRCLAGKSLTHIKAGCILCGYLKLTPMFLMVMPGMISRILYPDEVACVVPEVCRRVCGTEVGCSNIAYPRLVVKLMPNGRLLGTHRGPADGPGTPDSRVLLRLGQLCAALGVPSFPLRRALPLLRHCAVLLLWPPHPHGLPVHRAHPQKAPPPPGLQSPA

SEQ ID NO: 293869 - DNA, 1377 bp, Artificial Sequence
  derived and/or modified sequence
atggaggagcacaccgaggccggcagcgcccccgagatgggcgcccagaaggccctgatcgacaaccccgccgacatcctggtgatcgccgcctacttcctgctggtgatcggcgtgggcctgtggagcatgtgcagaaccaacagaggcaccgtgggcggctacttcctggccggcagaagcatggtgtggtggcccgtgggcgccagcctgttcgccagcaacatcggcagcggccacttcgtgggcctggccggcaccggcgccgccagcggcctggccgtggccggcttcgagtggaacgccctgttcgtggtgctgctgctgggctggctgttcgcccccgtgtacctgaccgccggcgtgatcaccatgccccagtacctgagaaagagattcggcggcagaagaatcagactgtacctgagcgtgctgagcctgttcctgtacatcttcaccaagatcagcgtggacatgttcagcggcgccgtgttcatccagcaggccctgggctggaacatctacgccagcgtgatcgccctgctgggcatcaccatgatctacaccgtgaccggcggcctggccgccctgatgtacaccgacaccgtgcagaccttcgtgatcctgggcggcgcctgcatcctgatgggctacgccttccacgaggtgggcggctacagcggcctgttcgacaagtacctgggcgccgccaccagcctgaccgtgagcgaggaccccgccgtgggcaacatcagcagcttctgctacagacccagacccgacagctaccacctgctgagacaccccgtgaccggcgacctgccctggcccgccctgctgctgggcctgaccatcgtgagcggctggtactggtgcagcgaccaggtgatcgtgcagagatgcctggccggcaagagcctgacccacatcaaggccggctgcatcctgtgcggctacctgaagctgacccccatgttcctgatggtgatgcccggcatgatcagcagaatcctgtaccccgacgaggtggcctgcgtggtgcccgaggtgtgcagaagagtgtgcggcaccgaggtgggctgcagcaacatcgcctaccccagactggtggtgaagctgatgcccaacggcagactgctgggcacccacagaggccccgccgacggccccggcacccccgacagcagagtgctgctgagactgggccagctgtgcgccgccctgggcgtgcccagcttccccctgagaagagccctgcccctgctgagacactgcgccgtgctgctgctgtggcccccccacccccacggcctgcccgtgcacagagcccacccccagaaggccccccccccccccggcctgcagagccccgcctag

SEQ ID NO: 293870 - DNA, 1377 bp, Artificial Sequence
  derived and/or modified sequence
atggaagaacacactgaggccggatccgctcctgagatgggtgctcagaaagctctgatcgataatccagctgacattctggttatcgcagcttattttctgcttgtcattggagtggggttgtggtctatgtgccggactaaccgcggaaccgtgggtggatattttcttgctggacgctccatggtctggtggcccgtgggagcgtctcttttcgccagcaacatcggttctgggcatttcgtgggtcttgctggcaccggtgcggccagcggtctcgccgtggccggctttgaatggaacgcactgttcgtggtcttattactaggatggttattcgcgccagtctatcttacagcaggagtaatcaccatgccccagtaccttcgaaaaagatttggggggaggcggattaggctttatctctccgtcctctcgctttttctatacatctttaccaagatcagcgtggacatgttctccggcgccgtcttcattcagcaggccctggggtggaatatttacgcttctgtgatcgccttgctggggatcaccatgatctatacggtgaccggagggctggctgcactaatgtacactgacacagttcaaaccttcgtgatcctgggtggggcttgcatcctgatggggtacgcatttcacgaggtgggcgggtactctggcctttttgacaagtacctgggcgccgccaccagtctcacagtatccgaggatccagcagttggaaacattagctcattctgctatcgcccccgccctgattcataccatctgcttaggcaccctgtgactggtgatttgccgtggcccgccttgcttctgggtcttaccattgtgagcggctggtattggtgttctgaccaggtcattgtgcagaggtgtctagcaggtaagtcacttactcacatcaaggctggctgcatactgtgtgggtatctcaaattgactcctatgtttcttatggtgatgccaggcatgataagtcggatcctctatcctgacgaagtggcctgcgtcgtacctgaggtatgccgtcgcgtctgcgggacagaggtcgggtgttcaaatattgcttaccccagattagtggttaagcttatgccgaatggtcgcttgctgggcacacacagggggcccgctgacggccccggaacccccgattcgagggtgctcctcaggctcggccaactctgtgcagcactgggagtaccaagcttccccctgagacgggcactgcctttgctccggcattgtgccgtgctgctgctctggccaccccatccacacgggctgcctgtgcatcgcgcccatccgcagaaggccccaccccctcccggactccaatcgccagcctag

SEQ ID NO: 293871 - DNA, 1377 bp, Artificial Sequence
  derived and/or modified sequence
atggaggagcacacagaagctggcagcgcccctgagatgggcgcccagaaggccctgattgacaacccagctgacatcctggtgattgctgcctacttcctgctggtgattggagtgggcctgtggagcatgtgcaggaccaacagaggaacagtgggcggctacttcctggccggccgctccatggtgtggtggcctgtgggcgccagcctgtttgccagcaacatcggcagcggccactttgtgggcctggccggcactggagctgccagcggcctggccgtggccggctttgagtggaatgccctgtttgtggtgctgctgctgggctggctgtttgcccctgtgtacctgacagctggggtcatcaccatgccccagtacctgaggaagagatttggaggccgccgcatccggctgtacctgtctgtgctgagcctcttcctgtacatcttcaccaagatctctgtggacatgttttctggagctgtgttcatccagcaggccctgggctggaacatctatgcctctgtgattgccctgctgggcatcaccatgatctacacagtgactggaggcctggccgccctgatgtacacagacacagtgcagaccttcgtcatcctgggcggggcctgcatcctgatgggctacgccttccacgaggtgggcggctacagcggcctgtttgacaagtacctgggcgccgccaccagcctgactgtgtctgaggaccctgctgtgggcaacatcagcagcttctgctaccggcccaggccagacagctaccacctgctgcggcaccctgtgactggagacctgccctggccagccctgctgctgggcctgaccatcgtgtctggctggtactggtgcagcgaccaggtgattgtgcagcgctgcctggccggcaagagcctgacccacatcaaggccggctgcatcctgtgtggctacctgaagctgacccccatgttcctgatggtgatgcctggcatgatcagccgcatcctgtacccagatgaggtggcctgtgtggtgcctgaggtgtgccggcgggtgtgtggcacagaggtgggctgcagcaacatcgcctacccccggctggtggtgaagctgatgcccaacggccgcctgctgggcacccaccggggccctgcagatggccctggcaccccagacagccgggtgctgctgcggctgggccagctgtgtgccgccctgggcgtgcccagcttccccctgcggcgggccctgcccctgctgcggcactgtgctgtgctgctgctgtggccaccccacccccacggcctgcctgtgcaccgggcccacccccagaaggcccctcctcctcctggcctgcagagccctgcctag

SEQ ID NO: 293872 - DNA, 1377 bp, Artificial Sequence
  derived and/or modified sequence
atggaggagcacaccgaggccggcagcgcccccgagatgggcgcccagaaggccttgatcgataaccctgcagacatcctggttatcgccgcctactttctactggtgataggggtgggcctatggagtatgtgcagaaccaaccggggcacggtggggggctactttctggcggggagatccatggtgtggtggcccgtaggcgcaagcctcttcgctagcaacatagggagtggacactttgtcggtttggccggcacaggagcagccagtgggctggcggtcgccggcttcgagtggaatgccctgttcgtagtgttacttctgggttggttgttcgctcccgtgtacctcaccgccggcgtcatcactatgccacagtatttgaggaagagattcggcggccgccgcatacggttgtacctgagcgtgctttcactctttctttatatttttactaagatttctgtggatatgtttagcggcgccgtatttattcagcaggccctggggtggaacatctacgctagtgtcattgccctgcttgggattactatgatatacaccgtaactggcggtctggccgctctaatgtacacagacaccgtgcaaacgtttgtcattctggggggcgcctgcatcctgatgggatacgcatttcatgaggtcggtggctatagtgggctttttgataaataccttggggcagctacatctctgaccgtgtccgaagacccagccgtgggcaacattagcagtttctgctatcgcccccggccggattcgtaccatctacttagacacccagtgacaggtgacctcccatggccagccctgttgttgggcctcacaatcgtgagcggctggtattggtgttccgatcaggtgatcgtccaacgctgtctcgccggcaaaagcctcacccatattaaagctggttgcatcctgtgcggatatctgaagctgacaccaatgtttctgatggtgatgccggggatgatctctagaatcctataccccgacgaagtcgcatgtgtggttcctgaggtgtgcagacgggtgtgtggcaccgaagtgggctgtagcaacattgcataccctaggctggtggtgaagctcatgccaaacggcagattgcttggtactcacaggggaccagctgatggccccgggacccctgacagcagagtcctgcttaggcttggccagttgtgcgcagcactgggagtgccctctttcccgctgcgccgcgccctgcctctcttgaggcactgcgcggtattgctgctttggccgccccacccccacggacttcctgtgcaccgagcccatccacagaaagccccccctccaccagggttgcaatcgcccgcatag

SEQ ID NO: 293873 - DNA, 1377 bp, Artificial Sequence
  derived and/or modified sequence
atggaagaacacactgaagccggaagcgcccctgagatgggtgctcaaaaggccctaatcgataaccccgcagatattctggtgatcgcggcatattttcttttggtgatcggtgttggtctgtggtcaatgtgtaggacaaaccgcggaaccgtgggtggatattttttagctggtaggagtatggtttggtggccagtgggcgcatctttgttcgctagcaatatcggttccgggcacttcgtcggccttgcgggaaccggcgcagcctcaggactggccgtggcgggatttgagtggaacgcgctgttcgtcgtgttgttgctgggttggctgtttgcccctgtctacctgaccgccggagttattacgatgccccaatatttaaggaagcgtttcgggggtaggagaatcaggctgtacttgagtgtgctttctttgttcctatatatctttaccaagataagtgtcgacatgttttccggcgctgtgtttatccaacaagccctgggatggaacatttacgcatcagtgatagccctcttgggcataacaatgatttacacagttactgggggtcttgccgctctgatgtacaccgacacagtgcagacatttgtcatcctcggcggtgcctgcatcctgatggggtacgcctttcacgaggtgggaggttactccgggctatttgacaagtacttgggagccgcaacctccctaactgtgagcgaagacccagctgttgggaacatctccagcttctgttaccggccacgacccgacagctatcaccttcttcgacatcctgtgactggggaccttccatggcccgcactcctgctgggactgacaatcgtgagtggctggtattggtgcagcgaccaagtaatcgtgcagagatgtctggctgggaagtcgcttacacacattaaggcaggttgtattttgtgtgggtatcttaaattgactccaatgttcctgatggtgatgccgggtatgatttctcgcattctgtacccagacgaagtggcctgcgtagtgccggaagtatgtcgcagagtgtgcgggacggaggtggggtgctccaacatcgcctaccccaggctcgtggtgaaacttatgccaaacggaaggctgcttggcacgcatcgcggacccgctgatggcccaggcacgccagattcacgcgtgctgcttagactcgggcagctgtgtgctgccttaggagtgcctagttttccactgcgcagggcacttccattgctgaggcattgtgccgtgctgcttctttggcccccacatcctcacggactgcccgttcacagggcccacccacagaaggcacccccacctccagggttgcaaagccctgcatag

SEQ ID NO: 293874 - DNA, 1852 bp, Artificial Sequence
  derived and/or modified sequence
ggggcagatcctggggagaatggaggagcacacagaggcaggctcggcaccagagatgggggcccagaaggccctgattgacaatcctgctgacatcctagtcattgctgcatatttcctgctggtcattggcgttggcttgtggtccatgtgcagaaccaacagaggcactgtgggcggctacttcctggcaggacgcagcatggtgtggtggccggttggggcctctctcttcgccagcaacatcggcagtggccactttgtgggcctggcagggactggcgctgcaagtggcttggctgttgctggattcgagtggaatgcgctcttcgtggtgctgctactgggctggctgtttgcacccgtgtacctgacagcgggggtcatcacgatgccacagtacctgcgcaagcgcttcggcggccgccgcatccgcctctacctgtctgtgctctcccttttcctgtacatcttcaccaagatctcagtggacatgttctccggagctgtattcatccagcaggctctgggctggaacatctatgcctccgtcatcgcgcttctgggcatcaccatgatttacacggtgacaggagggctggccgcgctgatgtacacggacacggtacagaccttcgtcattctggggggcgcctgcatcctcatgggttacgccttccacgaggtgggcgggtattcgggtctcttcgacaaatacctgggagcagcgacttcgctgacggtgtccgaggatccagccgtgggaaacatctccagcttctgctatcgaccccggcccgactcctaccacctgctccggcaccccgtgaccggggatctgccgtggcccgcgctgctcctcggactcacaatcgtctcgggctggtactggtgcagcgaccaggtcatcgtgcagcgctgcctggccgggaagagcctgacccacatcaaggcgggctgcatcctgtgtgggtacctgaagctgacgcccatgtttctcatggtcatgccaggcatgatcagccgcattctgtacccagacgaggtggcgtgcgtggtgcctgaggtgtgcaggcgcgtgtgcggcacggaggtgggctgctccaacatcgcctacccgcggctcgtcgtgaagctcatgcccaacgggcgccttctggggactcatcgggggcctgctgatgggcctggcacgcctgattcccgagttctccttcggctcgggcagctgtgtgcagccctcggcgtgcccagctttcctctgcggcgtgcactacctctacttcgccattgtgctgttcttctgctctggcctcctcaccctcacggtctccctgtgcaccgcgcccatccccagaaagcacctccaccgcctggtcttcagtctccggcatagcaaggaggaacgggaggacctggatgctgatgagcagcaaggctcctcactccctgtacagaatgggtgcccagagagtgccatggagatgaatgagccccaggccccggcaccaagcctcttccgccagtgcctgctctggttttgtggaatgagcagaggtggggtgggcagtcctccgccccttacccaggaggaggcagcggcagcagccaggcggctggaggacatcagcgaggacccgagctgggcccgtgtggtcaacctcaatgccctgctcatgatggcagtggccgtgttcctctggggcttctatgcctaagaccaactgcgttggacaccataagccacagcctcacaggaagtgggggtgaggagcctgcggtgctccccagaaaaggggaaggggcagtggggtgagaaggtcctggctccccttctcccggccttcctctg

SEQ ID NO: 293875 - protein, 295 aa, Artificial Sequence
  derived and/or modified sequence
MELIQDISRPPLEYVKGVPLIKYFAEALGPLQSFQARPDDLLISTYPKSGTTWVSQILDMIYQGGDLEKCHRAPIFMRVPFLEFKVPGIPSGMETLKNTPAPRLLKTHLPLALLPQTLLDQKVKVVYVARNAKDVAVSYYHFYHMAKVYPHPGTWESFLEKFMAGEVSYGSWYQHVQEWWELSRTHPVLYLFYEDMKENPKREIQKILEFVGRSLPEETVDLMVEHTSFKEMKKNPMTNYTTVRREFMDHSISPFMRKGMAGDWKTTFTVAQNERFDADYAKKMAGCSLSFRSEL

SEQ ID NO: 293876 - protein, 192 aa, Artificial Sequence
  derived and/or modified sequence
MELIQDISRPPLEYVKGVPLIKYFAEALGPLQSFQARPDDLLISTYPKSGTTWVSQILDMIYQGGDLEKCHRAPIFMRVPFLEFKVPGIPSGMETLKNTPAPRLLKTHLPLALLPQTLLDQKVKVVYVARNAKDVAVSYYHFYHMAKVYPHPGTWESFLEKFMAGEVSYGSWYQHVQEWWELSRTHPVLYLF

SEQ ID NO: 293877 - DNA, 888 bp, Artificial Sequence
  derived and/or modified sequence
atggagctgatccaggacatcagcagaccccccctggagtacgtgaagggcgtgcccctgatcaagtacttcgccgaggccctgggccccctgcagagcttccaggccagacccgacgacctgctgatcagcacctaccccaagagcggcaccacctgggtgagccagatcctggacatgatctaccagggcggcgacctggagaagtgccacagagcccccatcttcatgagagtgcccttcctggagttcaaggtgcccggcatccccagcggcatggagaccctgaagaacacccccgcccccagactgctgaagacccacctgcccctggccctgctgccccagaccctgctggaccagaaggtgaaggtggtgtacgtggccagaaacgccaaggacgtggccgtgagctactaccacttctaccacatggccaaggtgtacccccaccccggcacctgggagagcttcctggagaagttcatggccggcgaggtgagctacggcagctggtaccagcacgtgcaggagtggtgggagctgagcagaacccaccccgtgctgtacctgttctacgaggacatgaaggagaaccccaagagagagatccagaagatcctggagttcgtgggcagaagcctgcccgaggagaccgtggacctgatggtggagcacaccagcttcaaggagatgaagaagaaccccatgaccaactacaccaccgtgagaagagagttcatggaccacagcatcagccccttcatgagaaagggcatggccggcgactggaagaccaccttcaccgtggcccagaacgagagattcgacgccgactacgccaagaagatggccggctgcagcctgagcttcagaagcgagctgtag

SEQ ID NO: 293878 - DNA, 888 bp, Artificial Sequence
  derived and/or modified sequence
atggaactgatccaagatatttctagaccacccctcgaatacgtgaagggtgtgccactcattaaatatttcgccgaggcgctggggccattgcaaagctttcaggcccgcccagatgatctgttaatctctacctaccccaaaagtggtacaacttgggtttcacaaatcctagacatgatctaccagggcggggatctcgagaaatgccacagggcaccaatattcatgagagtgcccttcctcgaattcaaggtgccaggaattccttctgggatggaaaccctgaaaaacacaccggccccccgcctgctgaaaacacacttacccctggccctcctgcctcagacactcttggaccagaaagttaaagtcgtgtatgtggcccgaaacgccaaagacgttgcagtctcttactaccatttctatcatatggcaaaggtctacccgcacccaggaacttgggagagcttcctagagaaattcatggccggtgaggtctcatacgggagttggtaccagcacgttcaggagtggtgggaactgtcccgaacacatcccgtactgtacctcttctacgaagatatgaaggaaaaccctaagcgggagatccagaagattctggaattcgtcggaagaagcctgccagaagaaacggtggacctgatggtggagcacacatcttttaaagaaatgaagaagaaccctatgacaaactacacgacagtgcgacgggagtttatggatcactcaatctctccattcatgcgcaagggtatggcaggcgactggaagactacgttcaccgtggcccaaaacgaacggtttgacgcagattatgcgaaaaagatggctgggtgcagcctctctttccgctccgaactgtag

SEQ ID NO: 293879 - DNA, 888 bp, Artificial Sequence
  derived and/or modified sequence
atggaactgatacaagatatctccagaccgccgcttgaatacgtcaaaggagttccactgatcaagtactttgcagaagccctggggccactacagtcctttcaagcccgcccagatgatttgcttatcagcacctacccgaagtctgggacaacctgggtgagccaaatacttgacatgatctaccaaggtggagatctagaaaagtgccatcgggctcctatattcatgcgagtgccatttctcgagttcaaggtccccgggattccatctggaatggaaacccttaagaatactccagcgccacggctgctgaaaacacacctccccctggctctgctgccacagactttgctcgaccagaaggtcaaagtcgtctatgtagccagaaacgctaaagatgtggctgtgtcctactaccacttctatcatatggccaaagtttatccccaccctggaacctgggaatccttcttggagaaattcatggccggggaggtgtcatacggctcttggtaccagcacgtccaggagtggtgggagctcagtcggacccatcccgtgctctatctgttttacgaggacatgaaagaaaaccccaaacgcgaaatacagaagatcctggagttcgtgggccgttccctgcccgaagaaacagtggatctgatggtcgagcacacttcatttaaagagatgaaaaaaaaccccatgacgaattacaccactgtgcggcgagagtttatggatcattctatctccccattcatgagaaaaggcatggcaggggattggaaaactacatttaccgttgcccagaacgaaagattcgatgcggactacgccaaaaagatggcaggctgcagcttatccttcagaagtgaactctag

SEQ ID NO: 293880 - DNA, 888 bp, Artificial Sequence
  derived and/or modified sequence
atggagctgatccaggacatcagccggccccccctggagtatgtgaagggcgtgcccctcatcaagtactttgctgaggccctgggccccctgcagagcttccaggcccggccagatgacctgctgatcagcacctaccccaagagcggcaccacctgggtgtcccagatcctggacatgatctaccagggcggggacctggagaagtgccaccgggcccccatcttcatgagggtgcccttcctggagttcaaggtgcccggcatccccagcggcatggagaccctgaagaacaccccagccccccggctgctgaagacccacctgcccctggccctgctgccccagaccctgctggaccagaaggtgaaggtggtgtatgtggccagaaatgccaaggatgtggccgtgtcctactaccacttctaccacatggccaaggtgtacccccaccctggcacctgggagagcttcctggagaagttcatggccggggaggtgtcctatggctcctggtaccagcacgtgcaggagtggtgggagctgagcaggacccaccctgtgctgtacctgttctatgaggacatgaaggagaaccccaagcgggagatccagaagatcctggagtttgtgggccgcagcctgcctgaggagaccgtggacctgatggtggagcacaccagcttcaaggagatgaagaagaaccccatgaccaactacaccaccgtgcggcgggagttcatggaccacagcatcagccccttcatgaggaagggcatggccggggactggaagaccaccttcaccgtggcccagaatgaaagatttgatgctgactatgccaagaagatggccggctgcagcctgtccttccgctctgagctgtag

SEQ ID NO: 293881 - DNA, 888 bp, Artificial Sequence
  derived and/or modified sequence
atggagctgatccaggacatcagccggccccccctggagtacgtgaaaggcgtgccgttgattaagtacttcgcagaggctcttgggcctctgcaaagcttccaggccaggcctgacgatttgttgatctctacatacccaaaatcgggcacgacctgggtgtctcagatcctggacatgatttaccaaggcggtgacctggagaagtgtcatcgggcgccaatttttatgcgggtgccttttctggagttcaaggtgcccggcatcccctcaggtatggagaccctcaaaaacacgcctgcccctaggctgctgaaaacacacctccctctggcccttctcccccagacactgcttgatcagaaagtaaaagtggtgtatgtggctagaaacgcgaaagacgtcgcggtgtcttactaccatttctaccacatggccaaggtctaccctcatccggggacctgggagtctttcctggagaagttcatggctggtgaggtgtcttatggtagttggtatcagcacgtccaggaatggtgggaacttagtagaacacatcccgtgttgtacctattttacgaggatatgaaggagaatccaaaaagggaaattcaaaagatcctcgaattcgtcggaaggagcctgcctgaggagactgtcgacttaatggtcgaacacacgtcatttaaagaaatgaagaagaatcctatgaccaattataccacggtgcggcgggagttcatggatcactccatttccccatttatgcgcaaaggtatggctggcgactggaagacgacctttacagtcgcccagaacgagaggtttgatgctgactacgctaagaagatggccggatgctcattaagttttagatcagagttatag

SEQ ID NO: 293882 - DNA, 888 bp, Artificial Sequence
  derived and/or modified sequence
atggagctgatccaggacatcagccggccccccctggagtacgtgaagggcgtgccactgatcaagtacttcgcagaagccctagggcctttacagagtttccaggcccgccctgacgaccttctgatctcgacttaccctaagagcggcacaacttgggtctcccagatactcgatatgatatatcagggaggagacctggagaaatgtcaccgcgcccccatctttatgcgggtgcccttcttggaatttaaagttcctggcattcctagcggcatggaaactctgaagaatacgccagcccccagactcctaaagacccaccttccccttgccctacttccacagaccctcttggatcagaaggtgaaggtcgtgtatgtggccaggaacgccaaggacgttgcagttagctactaccatttttaccatatggcaaaggtgtacccccaccccggcacctgggaatctttccttgaaaagtttatggcgggcgaggtgagttacggcagttggtatcaacacgttcaggagtggtgggagctatccagaactcatcctgttttatacttattttatgaagacatgaaggaaaaccccaagcgagagatacagaagatcctagagttcgttgggagatccttgcccgaggaaactgtggacttgatggtggaacatactagcttcaaagaaatgaagaaaaacccaatgaccaactacacaacagtgcgacgcgagtttatggaccattccatctccccttttatgcgcaaaggaatggctggcgactggaagactacctttaccgtcgcccagaatgagaggttcgacgcagactacgctaaaaagatggctggctgctctctgtccttcaggagcgagctgtag

SEQ ID NO: 293883 - DNA, 888 bp, Artificial Sequence
  derived and/or modified sequence
atggagttgattcaggacattagtaggccaccactggagtacgttaaaggcgtaccactcatcaagtatttcgctgaggccctcggccctctgcagtcttttcaggcccgtcccgacgatctgctgatctctacatatccaaagtcaggcaccacctgggtcagccagatcctggacatgatctaccagggtggggatttggagaaatgccacagggctccaattttcatgcgggtaccttttctagagtttaaggtacctggaatcccttcaggtatggagacattgaagaacacccccgctcccagacttttgaagacgcatctacctctggctctcctgccccagactctactggatcagaaggtcaaagttgtgtacgtagctagaaacgcaaaggacgtggccgtgtcttactatcatttttaccacatggcaaaggtctacccccacccgggaacttgggagtcttttttggagaagtttatggccggagaagtttcctatggtagttggtaccagcacgtgcaggaatggtgggaattatctagaacacaccctgtcctgtacctgttctatgaggatatgaaagaaaacccgaaaagagagatacaaaagattttggaatttgtaggtagatccctcccagaggagactgtggatttgatggtggaacacacaagctttaaggagatgaaaaaaaacccaatgaccaattacacgacagtgcgacgcgagtttatggatcacagcattagtccttttatgcgtaaaggtatggctggcgattggaagaccacttttacagtcgcccagaatgaaagattcgacgcagactatgcaaagaaaatggcaggttgctccctgtcattcaggtctgaattgtag

SEQ ID NO: 293884 - DNA, 888 bp, Artificial Sequence
  derived and/or modified sequence
atggagcttattcaggacataagtaggcctcctttagaatatgtgaagggcgtgcctctgattaaatacttcgccgaagcgctcggtccgctgcagtcgttccaggcccgacccgacgacttgctgattagtacttatccaaagtcaggaacaacctgggtttcacagattctggacatgatttaccagggcggtgacctcgagaaatgtcatcgtgctccgatcttcatgagagtgccgtttctggagtttaaggtgccagggattccgtctggaatggagactctgaagaacacaccagcacctcggctattgaaaacccacctgccccttgccctgctgccacaaaccctcttagaccagaaggtaaaagtggtctacgtggcccgtaacgctaaagatgtagcagtaagctactaccacttttatcacatggcaaaagtttatccccatcccggtacctgggagtctttcctcgagaagtttatggcgggtgaagtgagttacggatcatggtatcagcatgtgcaggagtggtgggaattatcacgtactcaccctgtactgtacttattctatgaggacatgaaggaaaatcctaagagagagattcagaagattttggaatttgtgggacgatcactgccagaagagaccgtagatctgatggtggagcacacaagctttaaggagatgaaaaaaaaccctatgacgaactataccaccgtccgtcgggagttcatggatcacagcatttcccctttcatgcgtaagggaatggcaggtgactggaagacgacatttaccgtcgcgcagaatgagcgcttcgacgccgactacgctaagaagatggccggttgttctctgtccttcaggagtgaactgtag

SEQ ID NO: 293885 - DNA, 1090 bp, Artificial Sequence
  derived and/or modified sequence
acactgacctaagaaaccctcagcacagacaacacccctgcattccccacacaacacccacactcagccactgcgggcgaggagggcacaaggccaggttcccaagagctcaggaacatggagctgatccaggacatctctcgcccgccactggagtacgtgaagggggtcccgctcatcaagtactttgcagaggcactggggcccctgcagagcttccaggcccggcctgatgacctgctcatcagcacctaccccaagtccggcaccacctgggtgagccagattctggacatgatctaccagggcggtgacctggaaaagtgtcaccgagctcccatcttcatgcgggtgcccttccttgagttcaaagtcccagggattccctcagggatggagactctgaaaaacacaccagccccacgactcctgaagacacacctgcccctggctctgctcccccagactctgttggatcagaaggtcaaggtggtctatgttgcccgcaacgcaaaggatgtggcggtttcctactaccacttctaccacatggccaaagtgtaccctcaccctgggacctgggaaagcttcctggagaagttcatggctggagaagtgtcctatgggtcctggtaccagcacgtgcaagagtggtgggagctgagccgcacccaccctgttctctacctcttctatgaagacatgaaggagaaccccaaaagggagattcaaaagatcctggagtttgtggggcgctccctgccagaggagactgtggacctcatggttgagcacacgtcgttcaaggagatgaagaagaaccctatgaccaactacaccaccgtccgccgggagttcatggaccacagcatctcccccttcatgaggaaaggcatggctggggactggaagaccaccttcaccgtggcgcagaatgagcgcttcgatgcggactatgcgaagaagatggcaggctgcagcctcagcttccgctctgagctgtgagaggggttcctggagtcactgcagagggagtgtgcgaatcaagcctgaccaagaggctccagaataaagtatgatttgtgttcaa

SEQ ID NO: 293886 - DNA, 1322 bp, Artificial Sequence
  derived and/or modified sequence
gtttgtcctggagcccagatggactgtggccgggcaagtggatcacaggcctggccagcctaggagttgccacatgtgaggggccgaggggctcaaggaggggaacatcggggagaggagcctactgggtggaggctgggggtcccagcaggaaatggtgagacaaagggcgctggctggcaggaagacagcacaggaaggtcctagaggttcctcagtgcagctggactctcctggagaccttcacacaccctgacatctgggccccgcgccacgagggtgctttcactggtctgcaccatggcccaggccctgggattttgaacagctccgcaggtgaatgaaaggaacatggagctgatccaggacatctctcgcccgccactggagtacgtgaagggggtcccgctcatcaagtactttgcagaggcactggggcccctgcagagcttccaggcccggcctgatgacctgctcatcagcacctaccccaagtccggcaccacctgggtgagccagattctggacatgatctaccagggcggtgacctggaaaagtgtcaccgagctcccatcttcatgcgggtgcccttccttgagttcaaagtcccagggattccctcagggatggagactctgaaaaacacaccagccccacgactcctgaagacacacctgcccctggctctgctcccccagactctgttggatcagaaggtcaaggtggtctatgttgcccgcaacgcaaaggatgtggcggtttcctactaccacttctaccacatggccaaagtgtaccctcaccctgggacctgggaaagcttcctggagaagttcatggctggagaagtgtcctatgggtcctggtaccagcacgtgcaagagtggtgggagctgagccgcacccaccctgttctctacctcttctatgaagacatgaaggagaaccccaaaagggagattcaaaagatcctggagtttgtggggcgctccctgccagaggagactgtggacctcatggttgagcacacgtcgttcaaggagatgaagaagaaccctatgaccaactacaccaccgtccgccgggagttcatggaccacagcatctcccccttcatgaggaaaggcatggctggggactggaagaccaccttcaccgtggcgcagaatgagcgcttcgatgcggactatgcgaagaagatggcaggctgcagcctcagcttccgctctgagctgtgagaggggttcctggagtcactgcagagggagtgtgcgaatcaagcctgaccaagaggctccagaataaagtatgatttgtgttc

SEQ ID NO: 293887 - DNA, 2056 bp, Artificial Sequence
  derived and/or modified sequence
gtcacatgaccggctttaagcaacatggcggctgccgtggtgcagcgcccgggctgagcgacagcaagtgcagcgggctcctaccccgggtgaggggtggcctccgcgtgggatcgtgccctcttcagcccgctcctgtccccgacatcacgtgtattccgcacgtcccctccgcgctgtgtgtctactgagacggggaggcgtgacagggcccgggtcccttctcagtggtgctctgtgcttcagggcaagctccccgtctccgggcgcacttccctcgcctgtgttcggtccatcctcctttctccagcctcctcccctcgcaggtgggatcgtcggtgggaccggagcgcgggcgggcgcggccccccgggaccatggccgggtccgacaccgcgcccttcctcagccaggcggatgacccggacgacgggccagtgcctggcaccccggggttgccagggtccacggggaacccgaagtccgaggagcccgaggtcccggaccaggaggggctgcagcgcatcaccggcctgtctcccggccgttcggctctcatagtggcggtgctgtgctacatcaatctcctgaactacatggaccgcttcaccgtggctggcgtccttcccgacatcgagcagttcttcaacatcggggacagtagctctgggctcatccagaccgtgttcatctccagttacatggtgttggcacctgtgtttggctacctgggtgacaggtacaatcggaagtatctcatgtgcgggggcattgccttctggtccctggtgacactggggtcatccttcatccccggagagcatttctggctgctcctcctgacccggggcctggtgggggtcggggaggccagttattccaccatcgcgcccactctcattgccgacctctttgtggccgaccagcggagccggatgctcagcatcttctactttgccattccggtgggcagtggtctgggctacattgcaggctccaaagtgaaggatatggctggagactggcactgggctctgagggtgacaccgggtctaggagtggtggccgttctgctgctgttcctggtagtgcgggagccgccaaggggagccgtggagcgccactcagatttgccacccctgaaccccacctcgtggtgggcagatctgagggctctggcaagaaatctcatctttggactcatcacctgcctgaccggagtcctgggtgtgggcctgggtgtggagatcagccgccggctccgccactccaacccccgggctgatcccctggtctgtgccactggcctcctgggctctgcacccttcctcttcctgtcccttgcctgcgcccgtggtagcatcgtggccacttatattttcatcttcattggagagaccctcctgtccatgaactgggccatcgtggccgacattctgctgtacgtggtgatccctacccgacgctccaccgccgaggccttccagatcgtgctgtcccacctgctgggtgatgctgggagcccctacctcattggcctgatctctgaccgcctgcgccggaactggcccccctccttcttgtccgagttccgggctctgcagttctcgctcatgctctgcgcgtttgttggggcactgggcggcgcagccttcctgggcaccgccatcttcattgaggccgaccgccggcgggcacagctgcacgtgcagggcctgctgcacgaagcagggtccacagacgaccggattgtggtgccccagcggggccgctccacccgcgtgcccgtggccagtgtgctcatctgagaggctgccgctcacctacctgcacatctgccacagctggccctgggcccaccccacgaagggcctgggcctaaccccttggcctggcccagcttccagagggaccctgggccgtgtgccagctcccagacactacctgggtagctcaggggaggaggtgggggtccaggagggggatccctctccacaggggcagccccaagggctcggtgctatttgtaacggaataaaatttgtagccagacccc

SEQ ID NO: 293888 - DNA, 1990 bp, Artificial Sequence
  derived and/or modified sequence
gtcacatgaccggctttaagcaacatggcggctgccgtggtgcagcgcccgggctgagcgacagcaagtgcagcgggctcctaccccgggtgaggggtggcctccgcgtgggatcgtgccctcttcagcccgctcctgtccccgacatcacgtgtattccgcacgtcccctccgcgctgtgtgtctactgagacggggaggcgtgacagggcccgggtcccttctcagtggtgctctgtgcttcagggcaagctccccgtctccgggcgcacttccctcgcctgtgttcggtccatcctcctttctccagcctcctcccctcgcaggtgggatcgtcggtgggaccggagcgcgggcgggcgcggccccccgggaccatggccgggtccgacaccgcgcccttcctcagccaggcggatgacccggacgacgggccagtgcctggcaccccggggttgccagggtccacggggaacccgaagtccgaggagcccgaggtcccggaccaggaggggctgcagcgcatcaccggcctgtctcccggccgttcggctctcatagtggcggtgctgtgctacatcaatctcctgaactacatggaccgcttcaccgtggctgtgttcatctccagttacatggtgttggcacctgtgtttggctacctgggtgacaggtacaatcggaagtatctcatgtgcgggggcattgccttctggtccctggtgacactggggtcatccttcatccccggagagcatttctggctgctcctcctgacccggggcctggtgggggtcggggaggccagttattccaccatcgcgcccactctcattgccgacctctttgtggccgaccagcggagccggatgctcagcatcttctactttgccattccggtgggcagtggtctgggctacattgcaggctccaaagtgaaggatatggctggagactggcactgggctctgagggtgacaccgggtctaggagtggtggccgttctgctgctgttcctggtagtgcgggagccgccaaggggagccgtggagcgccactcagatttgccacccctgaaccccacctcgtggtgggcagatctgagggctctggcaagaaatctcatctttggactcatcacctgcctgaccggagtcctgggtgtgggcctgggtgtggagatcagccgccggctccgccactccaacccccgggctgatcccctggtctgtgccactggcctcctgggctctgcacccttcctcttcctgtcccttgcctgcgcccgtggtagcatcgtggccacttatattttcatcttcattggagagaccctcctgtccatgaactgggccatcgtggccgacattctgctgtacgtggtgatccctacccgacgctccaccgccgaggccttccagatcgtgctgtcccacctgctgggtgatgctgggagcccctacctcattggcctgatctctgaccgcctgcgccggaactggcccccctccttcttgtccgagttccgggctctgcagttctcgctcatgctctgcgcgtttgttggggcactgggcggcgcagccttcctgggcaccgccatcttcattgaggccgaccgccggcgggcacagctgcacgtgcagggcctgctgcacgaagcagggtccacagacgaccggattgtggtgccccagcggggccgctccacccgcgtgcccgtggccagtgtgctcatctgagaggctgccgctcacctacctgcacatctgccacagctggccctgggcccaccccacgaagggcctgggcctaaccccttggcctggcccagcttccagagggaccctgggccgtgtgccagctcccagacactacctgggtagctcaggggaggaggtgggggtccaggagggggatccctctccacaggggcagccccaagggctcggtgctatttgtaacggaataaaatttgtagccagacccc

SEQ ID NO: 293889 - protein, 1251 aa, Artificial Sequence
  derived and/or modified sequence
MLGWVQRVLPQPPGTPRKTKMQEEEEVEPEPEMEAEVEPEPNPEEAETESESMPPEESFKEEEVAVADPSPQETKEAALTSTISLRAQGAEISEMNSPSRRVLTWLMKGVEKVIPQPVHSITEDPAQILGHGSTGDTGCTDEPNEALEAQDTRPGLRLLLWLEQNLERVLPQPPKSSEVWRDEPAVATGAASDPAPPGRPQEMGPKLQARETPSLPTPIPLQPKEEPKEAPAPEPQPGSQAQTSSLPPTRDPARLVAWVLHRLEMALPQPVLHGKIGEQEPDSPGICDVQTISILPGGQVEPDLVLEEVEPPWEDAHQDVSTSPQGTEVVPAYEEENKAVEKMPRELSRIEEEKEDEEEEEEEEEEEEEEEVTEVLLDSCVVSQVGVGQSEEDGTRPQSTSDQKLWEEVGEEAKKEAEEKAKEEAEEVAEEEAEKEPQDWAETKEEPEAEAEAASSGVPATKQHPEVQVEDTDADSCPLMAEENPPSTVLPPPSPAKSDTLIVPSSASGTHRKKLPSEDDEAEELKALSPAESPVVAWSDPTTPKDTDGQDRAASTASTNSAIINDRLQELVKLFKERTEKVKEKLIDPDVTSDEESPKPSPAKKAPEPAPDTKPAEAEPVEEEHYCDMLCCKFKHRPWKKYQFPQSIDPLTNLMYVLWLFFVVMAWNWNCWLIPVRWAFPYQTPDNIHHWLLMDYLCDLIYFLDITVFQTRLQFVRGGDIITDKKDMRNNYLKSRRFKMDLLSLLPLDFLYLKVGVNPLLRLPRCLKYMAFFEFNSRLESILSKAYVYRVIRTTAYLLYSLHLNSCLYYWASAYQGLGSTHWVYDGVGNSYIRCYYFAVKTLITIGGLPDPKTLFEIVFQLLNYFTGVFAFSVMIGQMRDVVGAATAGQTYYRSCMDSTVKYMNFYKIPKSVQNRVKTWYEYTWHSQGMLDESELMVQLPDKMRLDLAIDVNYNIVSKVALFQGCDRQMIFDMLKRLRSVVYLPNDYVCKKGEIGREMYIIQAGQVQVLGGPDGKSVLVTLKAGSVFGEISLLAVGGGNRRTANVVAHGFTNLFILDKKDLNEILVHYPESQKLLRKKARRMLRSNNKPKEEKSVLILPPRAGTPKLFNAALAMTGKMGGKGAKGGKLAHLRARLKELAALEAAAKQQELVEQAKSSQDVKGEEGSAAPDQHTHPKEAATDPPAPRTPPEPPGSPPSSPPPASLGRPEGEEEGPAEPEEHSVRICMSPGPEPGEQILSVKMPEEREEKAE

SEQ ID NO: 293890 - DNA, 3756 bp, Artificial Sequence
  derived and/or modified sequence
atgctgggctgggtccagagagtcttgccgcagccacccggcacgcctagaaaaacaaaaatgcaggaggaggaggaggtggagcccgagcctgagatggaggctgaggtggagccagaacccaacccagaagaggccgaaaccgagtccgaaagcatgccccctgaagagtccttcaaggaggaggaagttgccgtagcagatccctccccccaagaaacgaaggaagcagccttaacttcaacaatcagtctcagggcacagggggcagagatttctgagatgaatagccccagccgaagagtcttaacatggctcatgaaaggcgttgagaaagttattccccagcctgtgcacagcataacggaagatcccgcccagatactagggcatggtagcacaggagatacgggctgcactgatgaacccaacgaggctttggaagcgcaggacacgcgcccaggcctccggctgctgctctggctggaacagaacctcgagcgcgtgctgccccagcccccaaagagcagcgaggtatggagggacgagcccgcagtagccactggcgccgcctccgatccagccccaccgggccgaccacaagaaatgggccctaaactccaggccagagagacgcccagtttgcctactccaatacccctgcaacctaaagaagagcccaaggaggctccagctccggagccacagcccggaagccaggcgcagacaagtagtttgccacctacacgagatcctgccaggcttgttgcgtgggtcttacatcgcctggagatggccctgccgcagcccgtgttacacggcaaaattggcgagcaggaacccgattctccagggatatgtgatgtccaaaccatttccatccttccaggtggccaggtagagcccgacctggtcctagaagaagtagagcccccttgggaagacgctcaccaagatgtctccactagcccgcagggaaccgaggtggtgcctgcttacgaagaagaaaataaagctgtggaaaagatgccccgcgaactgtcccgcattgaagaggagaaggaagatgaggaagaggaggaagaagaggaggaggaggaagaggaagaagaagtcaccgaggtgctgctggacagctgcgtggtatcccaggtgggggtcggccaatcggaagaagacggcactcgtccccagtctacatctgatcagaagctttgggaggaggtaggcgaggaggccaagaaggaggcagaagagaaagccaaagaggaggccgaagaggttgctgaggaggaagccgagaaggagccacaagactgggccgagacaaaagaagagcctgaagccgaggccgaggccgctagctcgggcgttcctgccaccaaacagcatcccgaggttcaggtggaagataccgacgccgacagctgtcccctcatggctgaggagaaccctcccagcaccgttctgcctccaccaagcccggccaaatccgataccctgattgtcccctcttccgcatccggaacccataggaaaaaactccccagcgaggacgacgaggctgaggaacttaaagccctgtcccctgccgagtcgcctgtggtcgcctggtctgatccaactacaccgaaagataccgacggccaggacagggctgcctctaccgcgtccaccaatagtgcaatcataaacgaccggctgcaagaattggtgaaactattcaaggaacggacagagaaagtcaaggaaaagcttattgacccagacgttaccagcgatgaagaatctcccaagccttcccctgccaaaaaggcaccagagcctgcaccagacactaaacctgctgaggcggaacccgtagaggaggaacattactgcgacatgctgtgttgcaagtttaaacaccggccctggaaaaagtaccagtttccacaaagtatcgatcctctgacaaatctgatgtatgtgctctggttattcttcgtggtgatggcttggaactggaactgttggcttattccagtcaggtgggccttcccgtaccagaccccagataatattcaccattggttgctgatggactacctttgtgacttaatttactttttggacataaccgtctttcagacacggttgcagtttgtcaggggaggagacatcataaccgataagaaggatatgagaaataactacctcaaatctcgtagattcaaaatggatctattatctctcttgccattggacttcctctacctcaaagtgggcgtgaatcccctattgcggctgccaaggtgcctgaagtatatggcctttttcgagtttaattcacggttagagtcaatcctgagcaaggcctacgtttaccgcgtcattaggaccaccgcatacctgctgtacagtcttcatctgaacagctgcctgtactactgggccagcgcataccagggcttaggatctacacactgggtctatgatggcgtggggaattcctacatcaggtgctactacttcgccgtcaagactctaatcacaatcggtggcttgcccgatcccaagaccctgttcgagattgttttccagctcctgaattacttcactggtgtcttcgcctttagtgtgatgatcggtcagatgcgggacgtggtgggagctgccacagctgggcagacctattacagaagctgcatggatagcaccgtaaagtacatgaatttctataagatacccaagtctgtgcaaaatagagtcaaaacatggtacgaatatacctggcactctcagggtatgctcgatgaaagtgagctcatggtccaactgccggacaagatgcggttagatctagcaattgacgtgaattacaatatcgtgtctaaggtagcactgttccagggttgtgaccggcagatgattttcgatatgctgaaaaggctccgctccgttgtatatctgcctaatgactacgtatgtaagaaaggcgaaattggacgtgagatgtacatcattcaggctggccaggtccaggtgctgggagggcccgacggaaaatcagtcttggtcactctcaaggcaggttctgtttttggagaaatctcattgctggcggtgggggggggcaaccgccgcacagccaacgtcgtggctcacggcttcaccaatctattcatcctagacaaaaaagacctcaatgaaattctggtgcactatcccgagagtcagaagctgctccgaaagaaggctcgcaggatgttgcgctccaataataagcccaaggaggagaagtcggtcttgatcctacccccccgagcgggaacacctaaactcttcaacgcagctctggccatgacaggcaaaatgggggggaaaggtgccaaaggtggaaaattggcccacttgcgggcgagactgaaggaactggccgccttggaagccgcagccaaacagcaagaactcgtggagcaggctaaatcatctcaggatgttaagggtgaggaggggtcggccgctccagaccaacatactcacccgaaggaagctgccacggaccctcctgcgcctcgcacacccccagagccccccgggtcccccccatccagccctccacccgccagcttgggaaggcctgagggggaagaggaaggtcctgctgagccagaggagcatagcgtccgcatttgtatgagtcccgggccggagcctggagagcagattctctctgtaaagatgcccgaggaacgcgaggaaaaagccgagtag

SEQ ID NO: 293891 - DNA, 3756 bp, Artificial Sequence
  derived and/or modified sequence
atgctgggctgggtgcagagggtgctgccccagcccccaggcacccccaggaagaccaagatgcaggaggaggaggaggtggagcctgagcctgagatggaggccgaggtggagcctgagcccaaccctgaggaggccgagacagagagcgagagcatgcctcctgaggagagcttcaaggaggaggaggtggccgtggccgaccccagcccccaggagaccaaggaggccgccctgaccagcaccatcagcctgcgggcccagggcgctgagatcagcgagatgaacagccccagccggcgggtgctgacctggctgatgaagggcgtggagaaggtgatcccccagcctgtgcacagcatcacagaagatcctgcccagatcctgggccacggcagcactggagacaccggctgcacagatgagcccaatgaggccctggaggcccaggacacccggcccggcctgcggctgctgctgtggctggagcagaacctggagcgggtgctgccccagccccccaagagcagcgaggtgtggagagatgagcctgctgtggccaccggggccgccagtgaccctgcccctcctggccggccccaggagatgggccccaagctgcaggcccgggagacccccagcctgcccacccccatccccctgcagcccaaggaggagcccaaggaggccccagcccctgagccccagcccggcagccaggcccagaccagcagcctgccccccacccgggaccctgcccggctggtggcctgggtgctgcaccggctggagatggccctgccccagcctgtgctgcacggcaagatcggggagcaggagccagacagccctggcatctgtgatgtgcagaccatcagcatcctgcccggcggccaggtggagccagacctggtgctggaggaggtggagcccccctgggaggatgcccaccaggatgtgtccaccagcccccagggcacagaggtggtgcctgcctatgaggaggagaacaaggctgtggagaagatgccccgggagctgagccgcatcgaggaggagaaggaggatgaggaggaggaggaggaggaggaggaggaggaggaggaggaggaggtgacagaggtgctgctggacagctgtgtggtgtcccaggtgggcgtgggccagagcgaggaggatggcacccggccccagagcaccagtgaccagaagctgtgggaggaggtgggggaggaggccaagaaggaggccgaggagaaggccaaggaggaggccgaggaggtggccgaggaggaggccgagaaggagccccaggactgggccgagaccaaggaggagcctgaggccgaggccgaggccgccagcagcggcgtgcctgccaccaagcagcaccctgaggtgcaggtggaggacacagatgctgacagctgccccctgatggccgaggagaacccccccagcacagtgctgcccccacccagccctgccaagagtgacaccctcatcgtgcccagcagcgccagcggcacccacaggaagaagctgcccagtgaagatgatgaggccgaggagctgaaggccctgagccctgctgagagccctgtggtggcctggagcgaccccaccacccccaaggacacagatggccaggacagagctgccagcacagccagcaccaacagcgccatcatcaatgaccggctgcaggagctggtgaagctgttcaaggagaggacagagaaggtgaaggagaagctgattgatcctgatgtgaccagtgatgaggagagccccaagcccagccctgccaagaaggcccctgagcccgccccagacaccaagccagctgaggccgagcctgtggaggaggagcactactgtgacatgctgtgctgcaagttcaagcaccggccctggaagaagtaccagttcccccagagcattgaccccctgaccaacctgatgtatgtgctgtggctgttctttgtggtgatggcctggaactggaactgctggctgatccctgtgcgctgggccttcccctaccagaccccagacaacatccaccactggctgctgatggactacctgtgtgacctgatctacttcctggacatcaccgtcttccagacccggctgcagtttgtgcggggcggggacatcatcacagacaagaaggacatgaggaacaactacctgaagagccgccgcttcaagatggacctgctgagcctgctgcccctggacttcctgtacctgaaggtgggcgtgaaccccctgctgcggctgccccgctgcctgaagtacatggccttctttgagttcaacagccggctggagagcatcctgagcaaggcctacgtgtacagagtcatccgcaccacagcctacctgctgtacagcctgcacctgaacagctgcctgtactactgggccagcgcctaccagggcctgggcagcacccactgggtgtatgatggagtgggcaacagctacatccgctgctactactttgctgtgaagaccctcatcaccatcggcggcctgcctgaccccaagaccctgtttgagatcgtgttccagctgctgaactacttcaccggggtgtttgccttctctgtgatgattggccagatgagagatgtggtgggcgccgccacagctggccagacctactaccgcagctgcatggacagcacagtgaagtacatgaacttctacaagatccccaagtctgtgcagaacagagtgaagacctggtatgagtacacctggcacagccagggcatgctggatgagagcgagctgatggtgcagctgcctgacaagatgaggctggacctggccattgatgtgaactacaacatcgtgtccaaggtggccctcttccagggctgtgaccggcagatgatctttgacatgctgaagaggctgcggtctgtggtgtacctgcccaatgactatgtgtgcaagaagggggagatcggccgggagatgtacatcatccaggccggccaggtgcaggtgctgggcggcccagatggcaagtctgtgctggtgaccctgaaggccggctctgtgtttggagagatcagcctgctggccgtgggcggcggcaacagaagaacagccaacgtggtggcccacggcttcaccaacctcttcatcctggacaagaaggacctgaatgagatcctggtgcactacccagagagccagaagctgctgaggaagaaggcccggaggatgctgcggagcaacaacaagcccaaggaggagaagtctgtgctgatcctgccccccagggctggcacccccaagctgttcaatgctgccctggccatgaccgggaagatgggcggcaagggggccaagggcggcaagctggcccacctgcgggcccggctgaaggagctggccgccctggaggccgccgccaagcagcaggagctggtggagcaggccaagagcagccaggatgtgaagggggaggagggcagcgctgccccagaccagcacacccaccccaaggaggccgccacagatcctccagcccccaggaccccacctgagcccccaggcagcccccccagcagccccccaccagccagcctgggccggcctgagggggaggaggagggccctgctgagcctgaggagcacagcgtgcgcatctgcatgagccctggccctgagcctggagagcagatcctgtctgtgaagatgcctgaggagcgggaggagaaggccgagtag

SEQ ID NO: 293892 - DNA, 3756 bp, Artificial Sequence
  derived and/or modified sequence
atgctgggctgggtgcagcgggtgctgccccagccccccggcaccccaagaaaaacgaagatgcaagaagaggaagaagtcgaaccggagcccgagatggaagctgaagtggagcccgaacccaaccctgaagaggccgaaaccgagtcagaatcaatgcccccagaggaatccttcaaggaggaagaagtagccgtggccgaccctagcccccaggaaaccaaggaggctgccctgacatctactatatctctacgggcccaaggggccgagatttccgagatgaacagcccctcgcggagagtgctgacttggctgatgaagggcgtggagaaagtgattcctcaacctgtccactctatcactgaagacccggcccagattttgggacatggaagcaccggcgacaccggctgtacagatgagccaaatgaggctttagaggcccaggacactaggccgggcctcaggctgctgttgtggctagaacaaaatctggagcgggtattgccccagcccccgaaaagctctgaggtttggagggacgaaccggccgtggccacaggggctgcttctgatccagccccaccagggaggcctcaggagatgggccctaagctccaagcaagagagacccccagcctgcctacgcctatcccgctgcagcccaaggaagaaccaaaggaagccccagctccagagccgcaaccaggctcgcaagctcagacctcctcgctaccaccaactcgagaccccgccaggctggttgcttgggtcttgcatcggctcgagatggcgttgcctcaacccgtactgcatggcaagatcggcgaacaggaacctgactcaccaggaatctgtgacgttcagactattagcatactgcctggcgggcaggtcgagccggaccttgtgctcgaggaggtggagccaccttgggaagatgcacatcaggacgtctccaccagtcctcagggtacagaggtggttccggcttatgaagaggagaataaagctgtagagaagatgccgcgtgagctttcgaggattgaggaggagaaggaagacgaagaagaggaggaagaagaagaagaggaagaggaggaagaagaggtgactgaagtactgctcgattcttgtgtagttagtcaggtcggtgtcgggcagtctgaagaggatggcacacgcccccagtcaaccagtgaccagaaattgtgggaggaagtgggggaggaggccaagaaggaagcagaggagaaggccaaagaggaagccgaagaggtggcagaagaggaagccgagaaggaaccacaggactgggccgagacgaaagaagagcccgaggccgaggccgaggccgcctctagtggtgtgcccgcaaccaagcagcaccctgaggtgcaggtggaggacactgacgccgacagctgtcctctgatggcagaagagaaccccccttccaccgtgcttccccccccttctcccgcaaaaagtgatacactcatcgtcccttcgtccgcgtccggaacacatcggaagaagctgccgagtgaagacgacgaagcagaagagcttaaagccctgtccccagccgagagccctgtggtggcttggtccgacccaacgacccctaaggatactgatggccaagaccgtgccgccagcactgcaagcactaacagtgcaatcataaatgaccgtctgcaggagcttgtgaaactctttaaggaacgaactgaaaaggtaaaggaaaagctgattgacccggacgtaacaagtgatgaagagagtcccaagccttctcccgccaaaaaagcccctgagccggccccagatacaaaacctgcagaggccgagccagtggaagaagagcactactgcgacatgctgtgctgtaaattcaaacaccgcccctggaagaaatatcaattccctcaatcaattgatcctcttacgaacttgatgtacgtgctttggctgtttttcgtagttatggcttggaactggaattgttggctgatcccagttcgttgggctttcccgtaccagacacccgataatatccatcattggctccttatggactacctgtgcgacctgatctacttcttggacatcaccgtttttcagactaggttgcagttcgtaaggggcggagacattatcacggataagaaggacatgcggaacaattatctgaaaagcaggcgctttaaaatggaccttctttccctgcttccactggacttcctctacctaaaggtgggggtgaacccccttctccggctgcctcgctgcttaaagtacatggctttcttcgagttcaatagccgtctagaatctatcctgtccaaggcctatgtctatcgagtcattagaactactgcctaccttctgtattcgctgcaccttaactcttgcttatattattgggcttcagcttatcagggacttggctctacacactgggtctatgatggagtgggcaatagctacattcgctgttattacttcgcagtcaaaactctgatcacaattggaggactgcccgaccccaaaacactctttgaaatagtctttcagctgctcaattatttcaccggggtattcgctttctctgtgatgataggtcaaatgagagacgttgttggggccgccacagctgggcaaacctattacaggagctgtatggactctacagtgaaatatatgaacttctataagatccccaagtctgtccaaaatcgcgtgaagacatggtacgaatacacctggcactcacagggcatgttggatgaaagtgagctgatggtccaactccccgataaaatgcgcttggacttggccattgacgtcaattataatattgtgtcaaaggtggctctgtttcagggctgcgaccggcagatgatcttcgacatgcttaagaggttgcgtagcgtggtttacttgcccaatgactacgtgtgtaaaaagggtgaaataggaagagaaatgtacatcatccaggctggccaggtgcaagttctgggcggtcctgatggaaagagcgtcctagttacactcaaggccggcagcgtgttcggagagatctctttgcttgcagtcggcggcggaaaccgacgcactgctaatgtggtggcccacgggttcacaaacctttttatactcgacaagaaagatctgaacgaaatacttgtgcactatccagaaagccagaaacttctccgaaagaaggcgcggcgcatgctccggtctaataataagcctaaggaggagaagtctgtcctcatccttccgcctagggctggaacgcccaagctctttaacgcagccctggccatgacaggcaagatgggtggtaaaggcgccaaaggcggaaaattggctcatctgagagcccgactgaaggaactagccgctctggaggcagccgccaaacagcaggagctggtggagcaagccaaatcatctcaggatgtgaaaggggaggagggttccgccgcacccgatcagcacacacatcctaaggaagctgcaaccgacccgccagcaccccggaccccccctgagcctcccggttccccaccttcttcccctcctcctgcgtctttggggaggcccgagggagaagaggaggggcccgccgagcctgaggagcattccgtgcggatctgtatgagtccgggcccagagcctggagagcagattcttagcgtcaaaatgcctgaggagcgggaagagaaggcagagtag

SEQ ID NO: 293893 - DNA, 3756 bp, Artificial Sequence
  derived and/or modified sequence
atgctgggatgggtacagcgagtgttgccccagccccctggcacccctcggaagactaaaatgcaggaagaagaggaggttgagccagagccggaaatggaagccgaggtggagccagagccaaaccccgaagaagctgaaactgaaagcgaatctatgccaccagaagagagctttaaagaagaggaagtggccgtggccgacccttccccacaggaaaccaaggaggctgcgctcaccagcaccatttcactcagggcacaaggagccgaaatctccgaaatgaattctccctcaaggagagtgctgacttggctcatgaaaggggtcgagaaagtgatccctcagcctgttcactctatcactgaggatcctgctcagattttaggccacggatccaccggtgacaccggctgcactgacgagccaaatgaggctctggaagctcaggacaccaggccgggactgcggctgttgctatggctcgaacagaacttggagcgtgtcctcccacagccaccgaaatctagcgaggtatggcgcgatgagcctgctgtggcaactggggcagccagtgaccccgctccacccggacgcccacaggaaatgggtcccaaactgcaggcaagagaaactcctagtctgcccacacccattcccttacagcctaaagaggaaccaaaggaggcgccagcccctgagcctcagcccggatcccaggcccagacctccagcctgccccctaccagagacccagcacgactggtggcctgggtcttacataggcttgagatggccttacctcaacctgtgttgcatgggaagatcggggagcaggagcctgactcaccgggaatttgcgatgtacagacgatatctatcttgcccggtggacaggtggagccagaccttgtcctagaggaggtcgagcccccttgggaggacgcccaccaagatgtgtctacctcccctcaggggaccgaagtggtgcccgcatacgaggaagaaaacaaggcggtggaaaagatgcccagggagctgagtaggatagaggaagagaaagaagacgaagaggaggaggaggaggaagaagaggaggaggaggaggaagaggtaaccgaggtgctgcttgacagctgtgttgtgtctcaggtgggggtcggacagagcgaagaagatgggacccggccacagtccaccagcgatcagaagttatgggaggaagtaggtgaagaggccaaaaaagaggcagaggaaaaggccaaagaggaagccgaagaagtggccgaagaggaggcagagaaggaaccccaggactgggcagaaaccaaggaagaaccggaggctgaagctgaggctgccagttcgggcgtgcccgctactaagcaacatcccgaggttcaggtcgaggataccgatgcagacagttgcccgctaatggcagaagaaaatccacccagcaccgtactgccacctcccagccccgctaaaagcgataccctgatagtgccatcaagtgccagcggaacacacaggaagaaactgccatctgaggatgatgaagctgaagaactgaaggccctttcgcccgcagaaagccccgtcgttgcttggtccgatcccaccacacctaaagacaccgatgggcaggatcgagcggcttctacagcaagtacaaatagcgcaatcattaatgaccggctgcaagaacttgttaagttgttcaaagagaggacagaaaaggtcaaggaaaaattaattgaccctgacgtaacaagtgatgaagaatcaccaaaaccatcccctgctaagaaggcccctgaaccggctcccgatacaaaaccggcagaagctgaacctgttgaggaagaacactactgcgatatgctttgttgtaaatttaagcaccgcccatggaagaagtatcagttcccccaatctatcgaccctctgacaaacttaatgtacgttctgtggttgttcttcgtcgtcatggcttggaactggaactgttggctcattcctgtgaggtgggctttcccctaccagacgcccgataacatccaccattggctcttgatggactatttgtgcgacctgatatatttcctggacattaccgtgtttcagacgaggttgcagttcgtcagaggcggagacataattacggacaaaaaggacatgcggaataattacttgaaatctagacggtttaaaatggatttactatcccttttaccccttgactttttatacttgaaagtgggggtgaatcctctgcttcggctgcctcgctgtttgaagtacatggcattttttgaattcaattcaaggctagaatctatcctctccaaggcttacgtctacagggtgatccgcacgaccgcctaccttctgtattcccttcacctgaactcttgcctgtactactgggcaagtgcttaccaaggccttggctccactcactgggtgtatgacggcgtagggaactcttatataagatgctactactttgcagtgaagacgctcataacgattggaggactgcctgatcctaagacgctctttgaaatcgtgttccagctgcttaactattttacgggcgtcttcgctttctccgttatgatcgggcagatgcgggacgttgtgggagccgctaccgcaggtcagacctattatagaagttgtatggattctaccgttaaatatatgaacttttataaaattcctaagtctgtacagaaccgtgtaaagacctggtacgagtacacatggcacagccagggcatgctagatgagtcagaattaatggtccaactgcctgataagatgcgtctcgacctcgccattgacgtcaactataacattgtttccaaggtcgcgctgttccagggttgtgataggcagatgatatttgacatgctgaagcgattgagaagtgtggtgtacctccctaatgactacgtgtgcaaaaaaggcgagatcggacgggaaatgtatatcatccaagcaggccaggtccaggtgttagggggaccggacggtaaatctgtgctggtgacacttaaggccggaagcgtcttcggggagatatctctgctcgccgtggggggtggcaatcgcagaactgccaatgtggtggcccacggctttacaaacctgtttatactggacaagaaagatctcaatgaaattctggtgcattaccccgaatcacaaaagttgttaagaaaaaaggctcgaaggatgttgaggtccaacaataagcccaaagaagagaaatctgtcctgattctcccacctcgtgctgggactccaaaactcttcaatgctgctctagccatgacaggtaagatgggaggtaagggcgctaaagggggaaaacttgcccatcttcgggcaagattaaaggaactcgcagcccttgaagccgctgctaagcagcaggaacttgtcgagcaggccaagtccagccaggacgtcaagggagaggagggaagtgccgcacctgaccagcatacccaccccaaggaggctgccacagatccgccagctccgaggaccccacccgagcccccaggttcccctccatccagtccaccaccggcttctctggggagaccggagggagaggaagaggggcctgccgaaccggaggagcattccgtgagaatttgtatgtcccccggtcctgagcctggggagcagatactgtctgttaaaatgccagaggagcgcgaggaaaaagctgaatag

SEQ ID NO: 293894 - DNA, 4034 bp, Artificial Sequence
  derived and/or modified sequence
gagtggcagcaagaaggcaattcctggctggcggttggcatctaagcaggcatcaggatgttgggctgggtccagagggtgctgcctcagcccccagggacccctcggaagaccaagatgcaggaggaagaggaagtggaaccagagccagagatggaggcggaggtggaaccagaaccgaatcctgaggaggccgagacagagtccgagtccatgccccccgaagagtcattcaaggaggaggaagtggctgtggcagacccaagccctcaggagaccaaggaggctgcccttacttccaccatatccctccgggcccagggcgctgagatttctgaaatgaatagtcccagccgcagggtactgacctggctcatgaagggcgtagagaaggtgatcccgcagcctgttcacagcatcacggaggacccggctcagatcctggggcatggcagcactggggacacagggtgcacagatgaacccaatgaggcccttgaggcccaagacactaggcctgggctgcggctgcttctgtggctggagcagaatctggaaagagtgcttcctcagccccccaaatcctctgaggtctggagagatgagcctgcagttgctacaggtgctgcctcagacccagcgcctccaggacgcccccaggaaatggggcccaagctgcaggcccgggagaccccctccctgcccacacccatccccctgcagcccaaggaggaacccaaggaggcaccagctccagagccccagcccggctcccaggcccagacctcctccctgccaccaaccagggaccctgccaggctggtggcatgggtcctgcacaggctggagatggccttgccgcagccagtgctacatgggaaaataggggaacaggagcctgactcccctgggatatgtgatgtgcagaccatcagcatccttcctggaggacaagtggagcctgaccttgtcctagaggaggttgaaccgccctgggaggatgcccaccaggatgtcagtaccagcccacagggtacagaggtggttccagcttatgaagaagagaacaaagctgtggagaagatgcccagagagctgtcccggattgaagaggagaaagaagatgaggaggaggaagaggaagaggaggaggaggaggaagaggaggaggtgactgaggtgctgctggatagctgtgtggtgtcgcaggtgggcgtgggccagagtgaagaagacgggacccggccccagagcacttcagatcagaagctgtgggaggaagttggggaggaggccaagaaggaggctgaagagaaggccaaggaggaggccgaggaggtggctgaagaggaggctgaaaaggagccccaggactgggcggagaccaaggaggagcctgaggctgaggccgaggctgccagttcaggagtgcctgccacgaaacagcacccagaagtgcaggtggaagatactgatgctgatagctgccccctcatggcagaagagaatccaccctcaaccgtgttgccgccaccgtctcctgccaaatcagacacccttatagtcccaagctcagcctcggggacacacaggaagaagctgccctctgaggatgatgaggctgaagagctcaaggcgttgtcaccagcagagtccccagtggttgcctggtctgaccccaccaccccgaaggacactgatggccaggaccgtgcggcctccacggccagcacaaatagcgccatcatcaacgaccggctccaggagctggtgaagctcttcaaggagcggacagagaaagtgaaggagaaactcattgaccctgacgtcacctctgatgaggagagccccaagccctccccagccaagaaagccccagagccagctccagacacaaagcccgctgaagccgagccagtggaagaggagcactattgcgacatgctctgctgcaagttcaaacaccgcccctggaagaagtaccagtttccccagagcattgacccgctgaccaacctgatgtatgtcctatggctgttcttcgtggtgatggcctggaattggaactgttggctgattcccgtgcgctgggccttcccctaccagaccccggacaacatccaccactggctgctgatggattacctatgcgacctcatctacttcctggacatcaccgtgttccagacacgcctgcagtttgtcagaggcggggacatcattacggacaaaaaggacatgcgaaataactacctgaagtctcgccgcttcaagatggacctgctcagcctcctgcccttggattttctctatttgaaagtcggtgtgaaccccctcctccgcctgccccgctgtttaaagtacatggccttcttcgagtttaacagccgcctggaatccatcctcagcaaagcctacgtgtacagggtcatcaggaccacagcctaccttctctacagcctgcatttgaattcctgtctttattactgggcatcggcctatcagggcctcggctccactcactgggtttacgatggcgtgggaaacagttatattcgctgttactactttgctgtgaagaccctcatcaccatcggggggctgcctgaccccaagacactctttgaaattgtcttccagctgctgaattatttcacgggcgtctttgctttctctgtgatgatcggacagatgagagatgtggtaggggccgccaccgccggacagacctactaccgcagctgcatggacagcacggtgaagtacatgaatttctacaagatccccaagtccgtgcagaaccgcgtcaagacctggtacgagtacacctggcactcgcaaggcatgctggatgagtcagagctgatggtgcagcttccagacaagatgcggctggacctcgccatcgacgtgaactacaacatcgttagcaaagtcgcactctttcagggctgtgaccggcagatgatctttgacatgctgaagaggcttcgctctgttgtctacctgcccaacgactatgtgtgcaagaagggggagatcggccgtgagatgtacatcatccaggcagggcaagtgcaggtcttgggcggccctgatgggaaatctgtgctggtgacgctgaaagctggatctgtgtttggagaaataagcttgctggctgttgggggcgggaaccggcgcacggccaacgtggtggcgcacgggtttaccaacctcttcatcctggataagaaggacctgaatgagattttggtgcattatcctgagtctcagaagttactccggaagaaagccaggcgcatgctgagaagcaacaataagcccaaggaggagaagagcgtgctgatccttccaccccgggcgggcaccccaaagctcttcaacgctgccctcgctatgacaggaaagatgggtggcaagggggcaaaaggcggcaaacttgctcacctccgggcccggctcaaagaactggccgcgctggaggcggctgcaaagcagcaagagttggtggaacaggccaagagctcgcaagacgtcaagggagaggaaggctccgccgccccagaccagcacacgcacccaaaggaggccgccaccgacccacccgcgccccggacgccccccgagcccccggggtctccaccgagctctccaccgcctgcctcccttgggaggccggagggagaggaggaggggccggccgagcccgaagagcactcggtgaggatctgcatgagcccgggcccggagccgggagagcagatcctgtcggtgaagatgccggaggaaagggaggagaaggcggagtaaggtggggtgaggcggatcccgcgcgcagttccagcaggtgtgtccccagcgcccgctgcgcccctgcgccccagcgccccaccttcccccacggctcaagagaagatgcttttccgtagtcgtgacctcagtggctgcagctctgaccgtcccgccagcacgccagccccgactcagctcctcgcggggctgggcctgagctcgacaagttgcatcaagtg

SEQ ID NO: 293895 - DNA, 3756 bp, Artificial Sequence
  derived and/or modified sequence
atgctgggctgggtgcagagagtgctgccccagccccccggcacccccagaaagaccaagatgcaggaggaggaggaggtggagcccgagcccgagatggaggccgaggtggagcccgagcccaaccccgaggaggccgagaccgagagcgagagcatgccccccgaggagagcttcaaggaggaggaggtggccgtggccgaccccagcccccaggagaccaaggaggccgccctgaccagcaccatcagcctgagagcccagggcgccgagatcagcgagatgaacagccccagcagaagagtgctgacctggctgatgaagggcgtggagaaggtgatcccccagcccgtgcacagcatcaccgaggaccccgcccagatcctgggccacggcagcaccggcgacaccggctgcaccgacgagcccaacgaggccctggaggcccaggacaccagacccggcctgagactgctgctgtggctggagcagaacctggagagagtgctgccccagccccccaagagcagcgaggtgtggagagacgagcccgccgtggccaccggcgccgccagcgaccccgccccccccggcagaccccaggagatgggccccaagctgcaggccagagagacccccagcctgcccacccccatccccctgcagcccaaggaggagcccaaggaggcccccgcccccgagccccagcccggcagccaggcccagaccagcagcctgccccccaccagagaccccgccagactggtggcctgggtgctgcacagactggagatggccctgccccagcccgtgctgcacggcaagatcggcgagcaggagcccgacagccccggcatctgcgacgtgcagaccatcagcatcctgcccggcggccaggtggagcccgacctggtgctggaggaggtggagcccccctgggaggacgcccaccaggacgtgagcaccagcccccagggcaccgaggtggtgcccgcctacgaggaggagaacaaggccgtggagaagatgcccagagagctgagcagaatcgaggaggagaaggaggacgaggaggaggaggaggaggaggaggaggaggaggaggaggaggaggtgaccgaggtgctgctggacagctgcgtggtgagccaggtgggcgtgggccagagcgaggaggacggcaccagaccccagagcaccagcgaccagaagctgtgggaggaggtgggcgaggaggccaagaaggaggccgaggagaaggccaaggaggaggccgaggaggtggccgaggaggaggccgagaaggagccccaggactgggccgagaccaaggaggagcccgaggccgaggccgaggccgccagcagcggcgtgcccgccaccaagcagcaccccgaggtgcaggtggaggacaccgacgccgacagctgccccctgatggccgaggagaacccccccagcaccgtgctgcccccccccagccccgccaagagcgacaccctgatcgtgcccagcagcgccagcggcacccacagaaagaagctgcccagcgaggacgacgaggccgaggagctgaaggccctgagccccgccgagagccccgtggtggcctggagcgaccccaccacccccaaggacaccgacggccaggacagagccgccagcaccgccagcaccaacagcgccatcatcaacgacagactgcaggagctggtgaagctgttcaaggagagaaccgagaaggtgaaggagaagctgatcgaccccgacgtgaccagcgacgaggagagccccaagcccagccccgccaagaaggcccccgagcccgcccccgacaccaagcccgccgaggccgagcccgtggaggaggagcactactgcgacatgctgtgctgcaagttcaagcacagaccctggaagaagtaccagttcccccagagcatcgaccccctgaccaacctgatgtacgtgctgtggctgttcttcgtggtgatggcctggaactggaactgctggctgatccccgtgagatgggccttcccctaccagacccccgacaacatccaccactggctgctgatggactacctgtgcgacctgatctacttcctggacatcaccgtgttccagaccagactgcagttcgtgagaggcggcgacatcatcaccgacaagaaggacatgagaaacaactacctgaagagcagaagattcaagatggacctgctgagcctgctgcccctggacttcctgtacctgaaggtgggcgtgaaccccctgctgagactgcccagatgcctgaagtacatggccttcttcgagttcaacagcagactggagagcatcctgagcaaggcctacgtgtacagagtgatcagaaccaccgcctacctgctgtacagcctgcacctgaacagctgcctgtactactgggccagcgcctaccagggcctgggcagcacccactgggtgtacgacggcgtgggcaacagctacatcagatgctactacttcgccgtgaagaccctgatcaccatcggcggcctgcccgaccccaagaccctgttcgagatcgtgttccagctgctgaactacttcaccggcgtgttcgccttcagcgtgatgatcggccagatgagagacgtggtgggcgccgccaccgccggccagacctactacagaagctgcatggacagcaccgtgaagtacatgaacttctacaagatccccaagagcgtgcagaacagagtgaagacctggtacgagtacacctggcacagccagggcatgctggacgagagcgagctgatggtgcagctgcccgacaagatgagactggacctggccatcgacgtgaactacaacatcgtgagcaaggtggccctgttccagggctgcgacagacagatgatcttcgacatgctgaagagactgagaagcgtggtgtacctgcccaacgactacgtgtgcaagaagggcgagatcggcagagagatgtacatcatccaggccggccaggtgcaggtgctgggcggccccgacggcaagagcgtgctggtgaccctgaaggccggcagcgtgttcggcgagatcagcctgctggccgtgggcggcggcaacagaagaaccgccaacgtggtggcccacggcttcaccaacctgttcatcctggacaagaaggacctgaacgagatcctggtgcactaccccgagagccagaagctgctgagaaagaaggccagaagaatgctgagaagcaacaacaagcccaaggaggagaagagcgtgctgatcctgccccccagagccggcacccccaagctgttcaacgccgccctggccatgaccggcaagatgggcggcaagggcgccaagggcggcaagctggcccacctgagagccagactgaaggagctggccgccctggaggccgccgccaagcagcaggagctggtggagcaggccaagagcagccaggacgtgaagggcgaggagggcagcgccgcccccgaccagcacacccaccccaaggaggccgccaccgacccccccgcccccagaaccccccccgagccccccggcagcccccccagcagccccccccccgccagcctgggcagacccgagggcgaggaggagggccccgccgagcccgaggagcacagcgtgagaatctgcatgagccccggccccgagcccggcgagcagatcctgagcgtgaagatgcccgaggagagagaggagaaggccgagtag

SEQ ID NO: 293896 - DNA, 225 bp, Artificial Sequence
  derived and/or modified sequence
atgttcgtgatcatcagcctgcacaactgcgtggtgatcagcttcgtgcttttcctattcggaggcaataattttattcagaatttctatctgcctcaaaactacattgaccagtttctgctgacaagtttcccgacattcacatcggtgggagtgctgatcgttctggtcctgtgctctgccttcctgttactctggcaaggtgagggggtgaacctgagatag

SEQ ID NO: 293897 - DNA, 378 bp, Artificial Sequence
  derived and/or modified sequence
atgagggtagttatggcgcgtctcttatcagaaggagaacagggcatccccaccgcctgtgccgcatttgcccagcagccagcgggccctaggcggggactggcgggagtgggtgaaggagggccccaatgttcttgggtaaattaccgctgtaccctggaattcctggtaagcctgctcggaaccgacctggcccgcgggcgcggcaactccgcatcaggcccaacagcccctgccgacagcaaacaactgatgaactctggaagcccagcccgggacaacgccccgtcacagcgattctgcacaaatttatctgagggcctgaggtttggaatctctccatcctggagagaggcgctttacgggtgccacgcctag

SEQ ID NO: 293898 - DNA, 297 bp, Artificial Sequence
  derived and/or modified sequence
atgcgggtggtgatggcccggctgctgagcgagggcgagcagggcattcccacggcctgcgccgcctttgctcaacaacctgcaggcccacggcgtggattggccggcgtcggagaggggggtccacagtgctcttgggtaaactataggtgtaccttagagtttctggtcagtctgctgggcacggacttggctcgcgggaggggcaactcagcgagtgggcccacagcccccgctgactccaaacagctgtcatgtaaaaccttcattgctgtattaagtttaagtaaggaatag

SEQ ID NO: 293899 - DNA, 1836 bp, Artificial Sequence
  derived and/or modified sequence
agcattcccaagatggaggtcaagagctacacaaagaacaacaccattgccccgaagaaggcctcacatcggattctaagtgacacatctgatgaagaagatgcgtccgtgacggtgggtacgggagagaagctgagactatccgcccacaccattttaccaggctctaagacgcgtgaaccgtcaaacgcaaaacagcagaaagaaaagaataaggtgaaaaaaaagcgcaaaaaggaaacaaaggggagagaagtgcggtttggaaagcgatccgacaaattctgttcctcagagtccgagagcgaatctagtgagtcaggtgaggatgaccgagattctctcggctcatctgggtgcttaaagggctctcctttggtcctaaaggaccccagcctgttttcttccttatcagccagctccacctcaagtcatggctctagcgcagcacagaagcagaacccctcccacacagaccagcacacaaagcactggcggacggataattggaagactatatcaagccctgcttggagtgaagttagctccctctccgatagtaccaggacccggctgacctcagagtcagactacagctccgaaggatcttcagtggagagcttgaagcccgttcggaaacggcaggaacacaggaagagggccagtctgtccgagaagaaatctcccttcttgtctagtgcggagggggccgtccctaaactcgacaaagaggggaaagtagtgaagaaacacaaaaccaaacacaaacataagaacaaagaaaaaggtcagtgctcaatatcgcaggaactaaagctcaaaagcttcacgtatgaatatgaggattctaagcagaaatccgataaggccatcctgctggaaaatgacctgagtacagaaaataagcttaaggtgctgaagcacgaccgtgatcactttaagaaagaggaaaagctcagcaaaatgaagctggaggagaaggaatggttgtttaaggacgagaaaagccttaaacgtattaaggacacaaataaagatatttctcgcagctttagagaagagaaagataggtccaataaagccgagaaggagcgctccctcaaagaaaagagcccgaaagaggagaaactgagactttataaggaggaaaggaaaaaaaaatctaaggaccgtccatctaaactggagaagaagaatgaccttaaggaggacaagatttccaaggaaaaggagaaaatctttaaggaagacaaggaaaagttaaagaaggaaaaagtgtatagggaagatagcgcttttgatgaatactgtaataagaatcagttcctggaaaacgaagatactaaattctcactctcggacgaccagcgcgaccgctggtttagtgatctttcagactcctctttcgatttcaagggggaggattcctgggatagccctgtgacagactacagagacatgaaatccgattcagtggccaagttgattctggaaaccgtgaaggaggactccaaagagcggagaagggatagccgcgctcgcgaaaaaagagattaccgtgaacccttttttcgcaaaaaggatagggactacctcgataaaaactcagagaagcggaaggagcagaccgagaagcacaagagcgttcccggctacctgtctgagaaacatgagcggagaaggcggagaatggctccaattcggaagggtcggcgccgtcagaaccagaaggacacaaagagaaatccggtcaccaggacgaaggtgaggaaccagtcctggaagaatgttagacgaaccaagaacttgatcaacgttcttaagcgtaaaaagtag

SEQ ID NO: 293900 - DNA, 1836 bp, Artificial Sequence
  derived and/or modified sequence
tccatccccaagatggaggtgaagagctacaccaagaacaacaccatcgcccccaagaaggccagccaccgcatcctgagtgacaccagtgatgaagaagatgcctctgtgacagtgggcactggagagaagctgcggctgagcgcccacaccatcctgcccggcagcaagacccgggagcccagcaatgccaagcagcagaaggagaagaacaaggtgaagaagaagaggaagaaggagaccaagggccgggaggtgcgctttgggaagagaagtgacaagttctgcagcagcgagagcgagagcgagagcagcgagagcggagaagatgaccgggacagcctgggcagcagcggctgcctgaagggcagccccctggtgctgaaggaccccagcctcttcagcagcctgagcgccagcagcaccagcagccacggcagcagcgctgcccagaagcagaaccccagccacacagaccagcacaccaagcactggaggacagacaactggaagaccatcagcagccctgcctggagcgaggtgagcagcctgagtgacagcaccaggacccggctgaccagcgagagtgactacagcagcgagggcagctctgtggagagcctgaagcctgtgaggaagaggcaggagcacaggaagagggccagcctgtctgagaagaagagccccttcctgagcagcgctgagggcgctgtgcccaagctggacaaggagggcaaggtggtgaagaagcacaagaccaagcacaagcacaagaacaaggagaagggccagtgcagcatcagccaggagctgaagctgaagagcttcacctatgaatatgaggacagcaagcagaagagtgacaaggccatcctgctggagaatgacctgagcacagagaacaagctgaaggtgctgaagcatgaccgggaccacttcaagaaggaggagaagctgagcaagatgaagctggaggagaaggagtggctgttcaaggatgagaagagcctgaagaggatcaaggacaccaacaaggacatcagccgctccttccgggaggagaaggacaggagcaacaaggccgagaaggagaggagcctgaaggagaagagccccaaggaggagaagctgcggctgtacaaggaggagaggaagaagaagagcaaggaccggcccagcaagctggagaagaagaatgacctgaaggaggacaagatcagcaaggagaaggagaagatcttcaaggaggacaaggagaagctgaagaaggagaaggtgtacagagaagattctgcctttgatgagtactgcaacaagaaccagttcctggagaatgaagacaccaagttcagcctgagtgatgaccagagggaccgctggttcagtgacctgagtgacagcagctttgacttcaagggggaggacagctgggacagccctgtgacagactacagagacatgaagagtgacagcgtggccaagctgatcctggagaccgtgaaggaggacagcaaggagcggcggcgggacagccgggcccgggagaagagggactaccgggagcccttcttcaggaagaaggaccgggactacctggacaagaacagcgagaagaggaaggagcagacagagaagcacaagtctgtgcccggctacctgtctgagaagcatgaaagaagaagaagaaggatggcccccatcagaaaaggaagaagacggcagaaccagaaggacaccaagagaaatcctgtgaccaggaccaaggtgaggaaccagagctggaagaatgtgcggaggaccaagaacctgatcaacgtgctgaagaggaagaagtag

SEQ ID NO: 293901 - DNA, 1836 bp, Artificial Sequence
  derived and/or modified sequence
agcatccccaagatggaggtgaagagctacaccaagaacaacaccattgcacctaagaaagccagtcatcgcatcttatccgatacgtccgatgaggaggacgcatcggtaacagttggtacaggagaaaaactgaggctgagcgcccacaccattctgccgggatcaaagactcgggagccctccaacgcaaaacagcaaaaggagaagaataaggtgaagaaaaaaaggaagaaggaaactaagggccgcgaagtcaggttcgggaaacggtcagacaagttttgctcatcagagtctgaaagtgagtcctctgaatctggtgaggacgaccgcgactccctcggttcttcgggttgcttgaaggggagtcctctggtgctaaaggacccctcactgttctcttccctcagtgccagctctacttccagtcacggatcctctgcggctcaaaagcagaaccctagccacacagatcagcacacgaaacactggcgcaccgacaattggaagaccatcagctcacccgcctggtccgaggtgtcatcgctgtcagactccactagaactcgactgacatccgagagtgattactccagtgagggaagctccgtggagagtcttaaacccgtgcggaagcggcaggagcaccggaagcgcgccagcctgagcgaaaaaaagtctccctttttgtcgtcagcagagggcgctgtgccaaagctggataaggaaggcaaggtggtcaagaaacataagaccaagcacaaacataaaaacaaggagaagggccagtgtagcatcagccaggagcttaagttgaaatccttcacctatgaatatgaggatagcaagcaaaaatctgataaagctattctgctggaaaacgatctctccactgagaataaacttaaggtgctgaagcatgatcgagatcactttaagaaagaggaaaagctctcgaaaatgaagttggaagagaaagagtggcttttcaaggacgagaaatccctgaaaaggatcaaagacaccaataaggatatctcaaggtcatttagagaagagaaggatcggagcaacaaggcagaaaaggagaggagcctgaaagaaaagtctcccaaggaagaaaagctgagactgtacaaggaggagaggaagaagaagtcaaaggaccggccaagcaagctcgagaagaagaatgacctcaaggaagacaaaatctccaaggagaaagagaagattttcaaggaggataaggagaagctgaaaaaggagaaggtttaccgagaggacagcgcctttgacgagtactgtaacaagaatcagttcctagagaatgaagacactaagttcagcttgtcggacgaccaaagagaccgatggttctcagatctcagcgacagcagctttgactttaaaggtgaagatagttgggattcacccgtcacagattatcgtgacatgaaatccgatagtgttgctaagctaatcctggagaccgtgaaggaggattccaaagagcgcagacgagacagccgtgctcgcgagaagagggactatcgagagcctttttttcggaaaaaggatcgcgactatctggacaagaatagtgagaaacgcaaggagcagaccgaaaaacataaatccgttcctggttatctgtcagagaaacatgaaaggcgcagaagacgaatggcccccattagaaaaggaaggaggcggcagaatcagaaggacactaaaagaaatcctgtcacccgcacaaaggtgcgaaatcagagttggaaaaatgtgaggcgcaccaaaaaccttatcaatgtgctcaaaaggaaaaagtag

SEQ ID NO: 293902 - DNA, 1833 bp, Artificial Sequence
  derived and/or modified sequence
tctatacccaaaatggaggttaaaagttacactaaaaataacacgattgcaccaaagaaagcgtcccatcgtatcctgtcagacacgtcggacgaggaggacgcgagtgtcaccgtggggacaggagagaagctgagactctcggcacatacgatattgcctggtagtaagacacgagagccttctaatgccaagcagcagaaggaaaaaaataaagtgaaaaagaagcgaaagaaagaaacaaaaggcagagaggttcgcttcggaaagcggagcgacaagttctgctcctcggagtcggagagcgagtcctcagagagtggggaggatgacagggactctctggggagctctggctgcctcaaggggtccccgctggtgctgaaggacccctccctgttcagctccctctctgcctcctccacctcgtctcacgggagctctgccgcccagaagcagaaccccagccacacagaccagcacaccaagcactggcggacagacaattggaaaaccatttcttccccggcttggtcagaggtcagttctttatcagactccacaaggacgagactgacaagcgagtctgactactcctctgagggctccagtgtggaatcgctgaagccagtgaggaagaggcaggagcacaggaagcgagcctccctgtcggagaagaagagccccttcctgtccagcgcggagggcgctgtccccaaactggacaaggaggggaaagttgtcaaaaaacataaaacaaaacacaaacacaaaaacaaggagaagggacagtgttccatcagccaagagctgaagttgaaaagttttacttacgaatatgaggactccaagcagaagtcagataaggctatactgttagagaatgatctttccactgaaaacaagctaaaagtgttaaagcacgatcgcgaccactttaaaaaagaagagaaacttagcaaaatgaaattagaagaaaaagaatggctctttaaagatgaaaaatcactgaagagaatcaaagacacaaacaaagacatcagcaggtctttccgagaagagaaagaccgttcgaataaagcagaaaaggagagatcgctgaaggaaaagtctccgaaagaagaaaaactgagactgtacaaagaggagagaaagaagaaatcaaaagaccggccctcaaaattagagaagaagaatgatttaaaagaggacaaaatttcaaaagagaaggagaagatttttaaagaagataaagaaaaactcaaaaaagaaaaggtttatagggaagattctgcttttgacgaatattgtaacaaaaatcagtttctggagaatgaagacaccaaatttagcctttctgacgatcagcgagatcggtggttttctgacttgtccgattcatcctttgatttcaaaggggaggacagctgggactcgccagtgacagactacagggacatgaagagcgactctgtggccaagctcatcttggagacggtgaaggaggacagcaaggagaggaggcgggacagccgggcccgggagaagcgagactacagagagcccttcttccgaaagaaggacagggactatttggataaaaactctgagaagaggaaagagcagaccgaaaagcataaaagtgtccctggctacctttcggaaaagcacgagagaaggagaagaaggatggccccgataaggaaaggaaggagaagacaaaaccagaaagatacaaagagaaatccagtgacaaggacaaaagtgagaaatcaatcctggaaaaatgtcagaaggacaaagaatttgataaatgttttaaagagaaaaaag

SEQ ID NO: 293903 - DNA, 1836 bp, Artificial Sequence
  derived and/or modified sequence
agtatccccaaaatggaggtaaagagttacacgaagaacaatacgatcgcaccaaaaaaggcgagccaccggatactgagcgacaccagtgacgaggaggacgcttccgtgaccgtaggcactggcgagaagctaaggttgtctgctcacacaatcctgccagggtctaaaacccgggagccatccaatgccaagcagcagaaagagaagaataaagtaaaaaagaaacggaagaaggaaaccaaaggaagagaggttcgttttggtaagcggagcgataaattctgttcttccgagagcgagtctgagtcctcagagtccggcgaggacgaccgtgactcactcggctcatctgggtgtcttaaagggtcacctttggttctgaaggacccctctctattttccagcctctccgcctcctcgactagttctcacggatcatccgcagctcaaaaacagaacccctcccatacagatcaacatactaagcactggcgcacagataattggaagacgatctcttccccggcatggagtgaggtctcaagcttgtccgacagcacgcgcaccagattgacatccgagagtgactactcgtcagaggggtcctctgtagaatccctgaagccagtacggaagaggcaggagcaccgaaagcgggcatccctctcggagaaaaagtccccatttctatcctctgccgagggtgctgttcctaagctcgataaagaggggaaggttgtcaagaaacacaagacgaagcataagcacaagaataaagaaaaggggcagtgtagtattagccaggagctgaagctcaaaagctttacgtacgaatacgaagatagcaagcaaaagagcgataaggccatccttctggagaacgatctgagcactgagaataagctgaaggtgctgaaacacgatagggaccacttcaagaaggaggagaaacttagcaaaatgaaactcgaagaaaaagagtggcttttcaaggatgaaaaaagcttgaaacgtattaaggataccaataaggatatttcccgttccttccgcgaggagaaggaccggtccaataaagctgagaaggaaagaagcttaaaggagaaaagtcccaaagaggaaaaactaagattatacaaagaggaacgcaaaaagaagagcaaagataggcctagcaagctggagaagaaaaatgacttgaaggaagataagatttctaaagaaaaggagaaaatcttcaaggaagataaagaaaagctgaagaaggagaaagtgtaccgagaggattctgcctttgacgagtactgcaataaaaatcagttcctggaaaacgaggatacaaagttttccctcagtgacgaccagcgcgatcgttggttctcagatctaagcgatagctcattcgatttcaaaggggaagattcgtgggatagcccggttacagattacagggatatgaaaagcgatagcgtggccaagctgattcttgagaccgtcaaagaggattctaaagagcggagacgcgattcgagggctcgagagaaacgggattaccgggagcccttttttaggaaaaaggaccgagactatttggataagaactccgagaaacgcaaagaacaaaccgaaaagcacaaatccgtgccgggatatctgagcgagaagcacgagcgcaggagacgtaggatggccccaataagaaaaggtcgccgtcgacagaatcagaaggacactaagagaaacccagtaacacgcacaaaagttcgaaatcagtcctggaaaaatgtgagaaggaccaagaatcttattaatgtcctcaagaggaagaagtag

SEQ ID NO: 293904 - DNA, 1836 bp, Artificial Sequence
  derived and/or modified sequence
agcatccccaagatggaggtgaagagctacaccaagaacaacaccatcgcccccaagaaggccagccacagaatcctgagcgacaccagcgacgaggaggacgccagcgtgaccgtgggcaccggcgagaagctgagactgagcgcccacaccatcctgcccggcagcaagaccagagagcccagcaacgccaagcagcagaaggagaagaacaaggtgaagaagaagagaaagaaggagaccaagggcagagaggtgagattcggcaagagaagcgacaagttctgcagcagcgagagcgagagcgagagcagcgagagcggcgaggacgacagagacagcctgggcagcagcggctgcctgaagggcagccccctggtgctgaaggaccccagcctgttcagcagcctgagcgccagcagcaccagcagccacggcagcagcgccgcccagaagcagaaccccagccacaccgaccagcacaccaagcactggagaaccgacaactggaagaccatcagcagccccgcctggagcgaggtgagcagcctgagcgacagcaccagaaccagactgaccagcgagagcgactacagcagcgagggcagcagcgtggagagcctgaagcccgtgagaaagagacaggagcacagaaagagagccagcctgagcgagaagaagagccccttcctgagcagcgccgagggcgccgtgcccaagctggacaaggagggcaaggtggtgaagaagcacaagaccaagcacaagcacaagaacaaggagaagggccagtgcagcatcagccaggagctgaagctgaagagcttcacctacgagtacgaggacagcaagcagaagagcgacaaggccatcctgctggagaacgacctgagcaccgagaacaagctgaaggtgctgaagcacgacagagaccacttcaagaaggaggagaagctgagcaagatgaagctggaggagaaggagtggctgttcaaggacgagaagagcctgaagagaatcaaggacaccaacaaggacatcagcagaagcttcagagaggagaaggacagaagcaacaaggccgagaaggagagaagcctgaaggagaagagccccaaggaggagaagctgagactgtacaaggaggagagaaagaagaagagcaaggacagacccagcaagctggagaagaagaacgacctgaaggaggacaagatcagcaaggagaaggagaagatcttcaaggaggacaaggagaagctgaagaaggagaaggtgtacagagaggacagcgccttcgacgagtactgcaacaagaaccagttcctggagaacgaggacaccaagttcagcctgagcgacgaccagagagacagatggttcagcgacctgagcgacagcagcttcgacttcaagggcgaggacagctgggacagccccgtgaccgactacagagacatgaagagcgacagcgtggccaagctgatcctggagaccgtgaaggaggacagcaaggagagaagaagagacagcagagccagagagaagagagactacagagagcccttcttcagaaagaaggacagagactacctggacaagaacagcgagaagagaaaggagcagaccgagaagcacaagagcgtgcccggctacctgagcgagaagcacgagagaagaagaagaagaatggcccccatcagaaagggcagaagaagacagaaccagaaggacaccaagagaaaccccgtgaccagaaccaaggtgagaaaccagagctggaagaacgtgagaagaaccaagaacctgatcaacgtgctgaagagaaagaagtag

SEQ ID NO: 293905 - protein, 409 aa, Artificial Sequence
  derived and/or modified sequence
MTLSRGKVDFATIQCGQCLMETIQLSNHLQVPCEWFVQSQKPVDKLEKHMPKYLRQKLRAELKPKTRIFEIQPISGVLDPGEKSNVQVKFMPKEEKFYSQTLVFQIAQSAQKLTLLARGQGLEPRLEFSPSVLDLGPLLLCAPGDEAEVIVKNPCNFPIEFYSLEFDQQYLIEEKILRKLKGYDSYNTLLLPPRNPGEKLPPELYEYFKEIKKSKEEQMRAKYLENLAQENEEEDITSSDQGTSNSTKRTSLSRGISVTSNLEEWHALLVESKTYLEEEEDEESLEKIIFQTDKLQSIDSHSMEEVGEVENNPVSKAIARHLGIDISAEGRLAKNRKGIAIIIHGTPLSGKSANAVSVAKYYNAACLSIDSIVLEAVANSNNIPGIRACELCIRAAIEQSMKEGEEAAE

SEQ ID NO: 293906 - DNA, 15719 bp, Artificial Sequence
  derived and/or modified sequence
gcatggagagtgcgggcggcttcaagctgggtatggagcccctcagcggcggcggggtctgtgagttggacgcggggtcttggcggggaatggaggtagaataaacgtgggacccggagtgcaccaaggtgagaaaaaaaaattactaaaaatgacaagtagaagacttgaggagtccatgggggctgttcagatgggattggtcaatatgttcaaaggatttcaaagcaaggttttgccacccctgagtccaaaggtggttacagaagaagaagtaaaccgaatgcttacaccctcagagttcctgaaggaaatgtccctgaccaccgagcagagactggcaaaaacacgtttgatgtgccgaccacagatcatcgaactcttagatatgggggaaacaacacatcagaagttttcaggaattgacctggatcaggcattattccagccctttccatcagaaattatatttcagaactacactccctgtgaagtctatgaagttccactgattttgaggaacaatgacaaaattccaaggttggtgaaagttgtggaagaaagttcgccttactttaaagtaatcagccccaaagatattggccacaaagtggctcctggagtgccttccatattccgaatcctctttactccagaggagaacaaggattacgcccatacgttgacctgtgttactgaaagagaaaagtttattgtacccatcaaagctagaggggcacgagccattctcgattttcctgacaagctgaatttttccacttgtcctgtcaaatacagcacccagaagattctgctggtacgaaacattggcaacaaaaatgctgtatttcacatcaaaacttgtaggcctttctctatagaaccagctattggaactcttaatgtgggagagtccatgcaactggaagtggagtttgagccacagagtgtgggcgatcacagtggaagacttatcgtgtgttatgacacaggtgaaaaggtgtttgtatctctctatggagctgccatagacatgaatataaggctggataagaattccttgaccatcgagaaaacctacatatctctggccaatcagcgaactataaccattcacaatcgcagtaatatcattgcccatttcctgtggaaggtatttgctacccagcaagaagaggacagagaaaaatatagggcctgtgatgatctgatcaaagaggagaaggatgagactgatgagttttttgaagagtgcattactgatcctttactccgagaacatctttctgttctgtcccgaacctttgcgaatcagaggaggctggtgcagggagacagcaagctgttcttcaataacgttttcactgtggagcccctggaaggtgatgtctggcccaactcatcagctgaaatcaccgtgtactttaacccactagaagccaagctctatcaacagaccatttactgcgacattttaggccgagaaatccgtctgcccctccgaatcaaaggggaaggcatgggacctaagattcacttcaactttgaattgctggatattgggaaagttttcactggatctgcacattgttatgaggcgatactgtacaacaaaggcagcatcgatgctctcttcaacatgacccctccaacttcagctttgggggcctgctttgttttcagtcccaaggaaggcatcattgaaccaagtggagtccaagctatccagatctccttcagctctaccatcctgggaaactttgaagaagagttcctggtcaatgtcaatgggtcacctgagcctgtgaaactgaccattagaggctgtgtcattggacctaccttccattttaatgttccagctctgcactttggtgatgtttcctttgggtttcctcataccttgatatgttccctcaataatacctctttgatccccatgacttacaaactgcgtatccctggggatggccttggccataaaagcatttcatattgtgagcagcatgtggactacaaaagaccatcttggaccaaggaagaaatatcctcaatgaaaccaaaagaattcaccatctctcctgactgtggcaccattcgcccccagggatttgctgctatcagggtgacattatgctccaacactgtgcagaaatacgagctggcactcgtggtggacgtggagggcatcggagaagaggtgctggcgctcttaattacagcaaggtgtgttgtacctgccctccacctggtcaatacagaggtggactttgggcactgcttcctgaagtacccgtatgagaaaacactccagcttgccaatcaagatgacctcccaggattctatgaggtccagcctcaggtgtgtgaggaggtgcctactgtgctgttttccagccccacccccagcggggtcatctccccaagcagcaccatccacataccactggtcctggagacccaggtcactggagaacacagatccacggtttacatctcaatctttgggagccaggacccccctttggtatgtcacttaaagagcgctggagaaggcccagttatctacgtccatcccaatcaagtggacttcgggaatatctacgtcctaaaagactcttccaggattctcaacctatgcaaccagtccttcattcccgcatttttccaggcacacatggcacacaaaaaatccctttggacgattgaacccaatgaaggcatggttcctccagaaactgatgttcaactggcactgaccgccaacctgaatgacacactgacattcaaggactgtgttattttggacattgaaaatagcagtacctatcggattcctgttcaggcttccggaactggttccactattgtttcagataagccctttgctccagaactcaatttgggggcacattttagcctggatacccactattaccactttaagttgatcaacaagggacgtcggatccaacagttgttctggatgaatgatagcttccgaccccaggccaagctgagtaagaagggccgggttaagaagggacatgctcatgtccaaccccagcccagtggctctcaggagcccagggatccacagagccccgtgtttcatctccaccccgccagcatggagctgtacccaggccaggcaattgatgtgatactcgaaggctattctgctactcccaggatagtgaaagagaagctggtgtgccacgccatcatcggggcacagaaggggaagagcttggtgatggctgtgaacatcacctgtgagttcgtcgcacctctcatccagctctccaccaagcagctcatctaccgactggagaagaaacctaacagtatcctgaaacctgattaccagcccttggccataaagaacatttccaccctgcccgtgaacttgttgctgtcaacatctggacccttctttatatgtgagactgataaatccctgctgccggcaactcctgagcctattaaactggaaattgatgaagaaaaaaacctgctgatcaagtttgacccttcctacagaaacgatctgaacaactgggtggcagaagaaattctagcaattaagtatgtggaacaccctcagatagacagcctggacctgcgcggagaagtgcattaccccaacctcagctttgagacaaaggagctggattttggctgcatcctgaacgatactgagctcattcgctacgttaccatcaccaactgcagtccgttggttgtgaagtttcgctggttcttcttggtgaatgatgaggaaaatcagataaggtttgtgacattgccgaagaagccctacagtgccccagtgtcccagatggagtccatcccagcaacctcagaggctgccagcccaccagcaatcctagttacagtagagtcccccgagatggatttaaatgattttgttaagactgtccttgtggatgaagatgccaggcctgaagaaaaagaactaagaaaaacgaaagcttccagtgtgatctcagatgaaataaaaattagctctactgaaatagaaagaatatactcaagccagagccaggtggaggatcaggaatccctacagacctgtgaacagaatgagatgctttccattgggatagaagaagtgtttgatattttgcccctgtttggagtgttgcagccacacagtagccaccaaatatcgttcaccttctatggacacgctaacatcattgcacaagctaaagctctgtgtgaagtggaagaaggacccacctacgaaataacactgaagggagaggcgtccctggtcaactattcctttgacaccaaggatattcactacggattacagctgtttgaccatgtcacagagagggaaatcacgctgacgaacatggggaaagttggctttgagttcaaggttctgactgaccaccagtcttctccagacaaccttctccctggagtgccactaatcctgcctgtgtctggctttatcagttcacatcaagagcaggtattaaaagtttactacctacctggagtacctgaggtctttaaaaggagtttccagatacagatcgcccacctggacccagaaaatatcactctgagcggagagggaatctttccccaaatctgcctcgatctccccaggaacctcacagcaaatgaaaagtatgaaatgttcttgaatcaagccaggaaaaacacagacaaagagtataacaaatgtgaaatgctcgatcactttgacataataactgaggaagtgccagaagacgagcctgctgaggtaagtgctcatctccagatggaggtagaaagacttatagtccaaagctatgtcctagaacatcagaaaacaaccacccctgatcctatggatgacccctgcttcagccatcggagtcgccgcaaactggccaaaatccagctaccagagtacatcctggactttggctacatcatccttggcgaagtccgaacccacatcatcaagatcatcaacaccagtcactttccagtgtcattccatgcagacaagcgtgtccttcatgagacaggattcagtactgagctagatcgtgtaaagaatctacctcattgtgaaacggaaatatttgaagtgagatttgacccacagggggccaatcttcctgttggaagcaaagaagtcattctgcccatcaaggtggttggagggccaacagttcacatctgtctccaagccaaggtgaccattccaaccatgactctctctcgtggaaaagtggactttgccacaattcagtgtggacagtgcctggtggaaactattcagctttccaatcatctccaagtcccttgtgaatggttcgtccagagccaaaagcctgttgacaagctggagaaacacatgccgaagtacttaagacagaaactacgcgctgaattaaagccaaagacacggatcttcgaaatccagcccatttctggagtcttggatcctggtgagaagtccaacgtgcaagtgaaattcatgccaaaagaagagaaattctacagccaaaccctggtgtttcagattgcccagagtgctcaaaagcttaccctcctggcacgtgggcaaggtctagagccacgcctggaatttagtccttcagtcctggatctggggccactgctactttgtgcacctggagacgaggccgaggtgatagtgaagaatccctgcaacttccccattgagttttattccttagaatttgatcagcagtatctcatagaagaaaagatcttgcggaagctgaagggctatgattcctacaacaccctgctgctgcctccccgcaaccctggggagaagctgcccccagaactgtacgagtacttcaaagagataaagaagtcaaaagaggagcagatgagggcgaaatatctggagaatctggcacaggagaatgaagaggaagatataacctcatcagatcagggaacctccaatagcacaaagaggacatcgctgagccgagggatctctgtcacatccaacctggaagaatggcacgccctgttggtcgagtccaaaacctacctagaggaagaggaggatgaggaaagcctggaaaaaatcattttccaaactgacaagcttcagagcattgacagccactccatggaggaagttggagaggtggaaaacaacccagtgagcaaagcaatcgctcgccacctgggcattgacatttctgcagaaggccgcctggccaagaaccggaaaggcatcgccattatcattcatgggacacccttgtcaggaaagtcagccaatgccgttagcgtggccaagtactacaacgcagcctgcctgagcatcgactccattgtgctggaagctgtggccaacagcaacaacatcccagggatccgggcccgtgagctctgcatcagggctgccatagagcagtccgtgaaggaaggagaggaggctgcccaggaggcagctgtgggtcaaaacgtcatagggcaaggacgactgagcactgacaccttgggcaagttagcctccgagatgactctggtggccccagaaattaaacctggaaagagtgttcgtgggagcgtggtgatcaccaaaagcaaggcagacagccatggctccgggtcacagaagcagcatcactcacaccagtctgaaacaccacagatttcctccagccctctccccccggggcccatccaccgctggctcagtgttagtcccagtgtcggaggcgagaccgggctgatgagctgtgtgctcccggatgaacttctcgtgcagatcctggcagagcggatacagctgagtgactgctaccgaggagtggtgtttgatggcctcgacactctctttgctcagaatgctgcagccgccctcctctgcctgctgaaggccattggcagccgggagcatatatacattctcaacatggcccaggattacgcagccatgaaggcccaggagaaagccaaaaaggagcaagaagaacgcaagcacaagggagctcttgagaaagagaaggagcgtctccaaaacatggatgaggaagaatatgatgccctgactgaggaggagaaactcacattcgatcgggggattcagcaggcgctccgcgagcggaagaagagggagcaggagaggctggcaaaggaaatgcaagaaaagaagctacagcaggagctggagcgacaaaaggaagaggatgagctgaaacggagggtcaaaaaaggaaagcagggacccattaaggaggagccccccatgaagaaatctcaagcagcaaacaagcaggttcctccgctcaccaaagtggatgtcaagatggagacaatcgaaaggaaaatatctgttagggaacaaacaatgtctgagaaggaagagctaaataagaagaaaaggaacatgggcgatgtcagcatgcatgggcttcctcttgtccaggaccaagaggacagtgaaggggacaactcaaaggaccccgacaagcaactggccccgaagtttaagacctatgaattgacactgaaggatgtccagaacatcctcatgtactgggaccggaagcaaggagtccagctgcctcctgcagggatggaggaagcgccccatgagcccgacgaccagcgccaggtccccttgggtgggcgcaggggccgcaaggaccgggagagagagcgcctggagaaggagcgcacggagaaggagcgcctggagagggagaaggcggagcgggagcgcctggagaagctgcgagccctggaggagcggagcgactgggagggggaaggggaggaggaccacgaagggaagaaggagaaggacctgggcgtacccttcctagacatccagacaccagactttgaaggcttgagctggaagcaggccctagagagcgacaagcttcccaaaggagagcagatcctagacatcttgggtctgggtgcctccggaccacccatcccgcctcccgccttattctcaatcgtctcctacccggtgaagcggccacctttgaccatgacagacgacctggagcattttgtatttgtgatcccaccatccgaagatatatctctggatgaaaaaaaagaaatggaaatagaatcagactttttggccaccacaaacactacaaaggctcaagaggagcagaccagctcatctaaggggggcaaacagaaaatgaaagaaaagatagaccaagtcttcgagattcagaaagacaagcgtcacatggccttaaacaggaaggtcctttctggggaacctgctggaaccatttcccagctgtcagatacagacctggacaacttcaacgggcagcactcccaggagaaattcaccagactgaatcacttccggtggatcgtgccagccaatggcgaggtaacgttgcaggtgcacttctcttctgatgagttcgggaactttgaccaaacctttaactttgagatcctaggaacttgctgccagtaccagctctactgccgaggcatctgcacttacccatacatttgccaagacccaaaagtggtatttcctcagcggaagatggacatgaagacaaatgaggtcatctttaagaagtatgttatgagcacggagacgtactactttgggccactactttgtggaaaatcaagagataagtacaagtcatccttattcccaggcaacatggagacgctaacaatcctgaacacttccttaatggtggtggaggcatccttctattttcagaatgatgtcaaagcaaacacgtacttcctggaacccaacaccatggtcctgaaacccaatgagaagcagatattaaacgtatgggcctaccctacttcagttggtgtctttgaagacagcattgtctgctgcatcaatgacaacccagagccagccatcttccaattaagctgccaggggatccgcccggaactagagctggaacccaggcaattacattttgaccggctcttgctgcacagacaggaatccagggtagttcttctccgcaatgtcacgctcctgcctgtggcctggcggatcaccagcctggagcacttgggtgatgatttcactgtatccctgatgcaggggaccatcccccctgaggctgagtacggcctgcacctgtactttcagcccaccaagcctgtcaacatcaagaaggctattcggttggaggttttagatgcagaaaatcttcttggtgttgttcagattgaaaatatcatggtctttgcagaggcatacgacatcgccttggacatcaccttccccaaaggagctgaagggggactggattttgggattgtcagggtcacagaggaggcgaagcagcccctgcaattgaagaaccgtgggaaatatgagatcgcgttcagcttttccgtggactctgtagggatttcaacacctaatataaattccatgatctcagtccaacccaaaaagggttcactgaccccaacagaaaaacccacaaatgtccaagttttcttccatgcaaaaaaggaagtgaagattgagcaccagcctgttctgcgctgtcagattattgagcccaatatttcagaaggaggtgagatcattgccagcatcccaattaagttttccgcgaatgcagtatattccaaatacaacatcaccccctcctctgtcatcaactttggagctttgatctgtggcactcgtaaaagcaccaccttcaccatagaaaatcaaggtgttactgacttcaagttcgccctttataagctgacaggggagagccccattcatcaaaagaaagcagccagccacgtcagacatgcaagatcccgagaaagtgagagcttctacaaaactggctcttccagagcagccaagttctctgacacgattcagaaagaagtaaccaccacaggccaggcccgcttcgcccatggcatgttcaccgtgtaccctgggtttggctccattccttccggaggacagcaggtcatcaacgttgactgtgtggctgacgccatgggaaagtgtgaggagtttatagccatcgatatctccggccgagaccctgcagtccaccctgccggcattctttacactttgctagctgaagcctgtctaccagccttcgtgaccgaaaacaatgccttgatatttgaagagcaccagatatgtaccagtgccaacctgcaccacatcctgcagaccatagagagcggggggctgttcgtcgaggatgagaacaagttcatcttctgcaatgtcctggtgggccgccaagccaaggctcgtttcaagatcagcaacgtgggaaagatcacctgtgatgtcaacattgtagtcaggcctatctccaataagccctttgcccgcatcgtcgacatttttgaagtggaacccagcaagatgtgcattgccagtcattcccatgcctttgccacggtgtccttcaccccgcagatcatgcagaactaccagtgcatctttgaggctaccttggatggcttgcccagcaccctggccaagagccgaggcctcgtgtttgacatcgctggtgaggggaacctccctcgagtgacggttgtgcggccagttcttcataaccaatatggaaaccccttgctcctctttaagaggcttctccttggtcattcagagaagctgcctctcatcctcaagaacaatggtgtcctccctgcccagctgcatgttgacctgcaggatgagctaggagtcttctccctgaaagggaggcccaccaccgcgtatatctacatcacagaggaaaataaaccacatgtaaaagcaaagaaagctcacacagcctccttggttgtttctcctggagatacagctgaatttgatgtcgttttccactcccagaaggttgggaggatgagaggtatcatccacttgtcagtgatcaacaaccaatatgaggagacctccatccacatggtgggagagggctatgaggatgacatcaccttggacaacatccatggactggtggcccccaccagccaggaagacataagtatctctgagttcacagagatcatcgaggacaatgatatggaagacttggtggcagctgctctggtggaccacatccaatttggggactgccacattggacacagctataatgcgagcttcacagtcacaaatcacagccaagtgaacttgatacggtttgaatggcctgtttcagctacaattgctttctccccacagatgggccacctccaccctgggtgtgccaaggacatagtggtgaccatgaagtcagatgtacccatcaacctaaagaatatgcggatcaggtgcaagctctccaggattatgtttcagctccctgcagaccaggtccccgactgggatgaccgcatgcacacagtcaagtgggtggacgtacccagaaacatgcctgggactttcactacaaaacgaaaagtgatagagacggatccggaacctgctcactcagtactagaagaaaactaccaagaactgcagcttcaaatcagtgccaatgtggatttcgcttcataccattgccaagcaagagatgtgcgctttaaggaaaccttggtttaccagacccgagtgtttgagttcgatgtgattaattcaggacgtgtccagctggaattcagctgggtctcagaagatacctcaaaggcagtcagctttgcaaaaccagatcaccaaggttcagctcaaaaagatcagcttagtcagggcacgatgcatacaggcagcaccctggacagcaccatggaccactgggccgagggttccccacagcccttctctgtggagccctcttcgggaatcgtgccggtggggaagattcagaagttcaaagtaaaattctccccgttggacattggagacttcgagagcaaccttttctgccagattcccaacctgccacctggagagcaaggtccggtcctggtagcaaaagggcggagcaccttgcccatctgccattttgatctgaaagactcggactacataagtggccatcagcgcaacccagagctccgagggtccagtgggggagctctggatccaaacacccgggtgattgagttcaccactgtgggcataggagggaagaatctccggacctttaccatcctaaacccaaccaatagcacctactccttctgctggatctctgaagaaattgaaagtctccagaaccctgcagcattcacatgccttacagaaaagggcttcatccaccctgaaaagaaagccgagatcgtgttccagttcacacctttccatctgggcatcactgagtcatcatggaccttcctaattcccgagcacaacatcacagtccctttcctgctggtaggcaaaactaccgaacctctcatctctctgaacaagtcacacctcaacttcagctctctcctcattggcagagaagccagggagactgtgcagatcattaacaaggaggagcaggggttcgatttttccttccaggacaactcccgctattctgaaggtttcagcaacagcctgcttgtatgtcccatggaaggctggatcccaccactgtccaggttcccaattgatattttcttcacaccaaagcaggaaggagatgtgaactttaatttgatctgcaatgtggaaaagaaagtccaccctgtgacattaaatgtcaaggccgagggctacactatgaatgtggagatcaagtgcaaggacaggacaggctccatcactctgttgactcccaaccagactaacatcatcaacttctatgaggtggagttaaatgaatgtgtccagtgtgaattcaactttatcaacactggaaagttcaccttcagcttccaggcacagctgtgtggctccaaaaccttgctgcagtacttggaattttcacccatcgacagcactgtggatgtaggacagagtgtacatgccaccctgtcttttcaaccattaaagaagtgtgtcttgacagacctggaactcataatcaagatcagccatggtccaacatttatgtgcaacatctcaggctgtgctgtgagcccggctatccatttctccttcaccagctacaactttgggacctgctttatctatcaagctgggatgcccccatacaaacaaaccctggtaattaccaacaaggaagaaacacctatgagcatagattgtctgtacaccaacaccactcacctcgaggtgaactcccgtgttgatgtggtaaagccaggaaacacattggagattccaataactttttatcctcgagaaagtatcaactatcaagaactcattccctttgaaatcaatgggctctcacaacaaacagtcgaaatcaaagggaagggtaccaaaatgaagattttagtcctagatccagccaacaggattgtgaagttgggagctgtcctaccagggcaggttgtgaaaagaacagtttccatcatgaacaacagcctggcccagctcacatttaatcagtccattctgttcacaattccagaactccaggaacccaaggtccttaccctggcgcccttccacaacatcacactgaagcccaaagaagtctgtaaactggaagtcatctttgccccgaagaagcgtgtccctcccttctctgaggaagtgttcatggaatgcatggggctcctgcgccccctcttcctccttagcggctgctgccaggccctggagatctcactggaccaggaacatattccctttggacccgtggtgtatcagacgcaagccacacgtcgcatcctcatgatgaacacaggcgatgtgggtgcaaggtttaaatgggacatcaaaaaatttgagcctcatttctccattagcccagaagaaggctatattacctcaggcatggaggtttcttttgaagtgacctaccatcccaccgaggtgggaaaggagagcctttgtaaaaacattctctgctacatccagggaggcagtcctctgagtctaaccctgtctggagtctgcgtgggaccacctgcggtaaaagaggtagtgaatttcacgtgccaggtgcgctccaagcacacgcagaccatcctgctgtcaaaccgcaccaaccagacctggaatctgcaccccatctttgagggcgagcactgggaggggcctgagttcatcaccctggaggcccaccagcaaaacaagccctatgagatcacctacaggccccgcaccatgaacttggagaaccgcaagcaccagggcaccctcttcttccccctcccagatgggaccggctggctgtatgctctgcatgggacttctgagctccccaaagctgtagccaatatctatcgtgaagtgccatgtaagaccccctacactgagcttctgccaatcaccaactggctgaacaagccccagagattccgggtcatcgtggaaatactgaaaccagagaagccggacctaagcatcactatgaagggccttgattacattgatgtactgtctggctctaagaaagactacaagctgaacttcttttcccacaaggagggaacgtacgctgcaaaggtgatcttccgaaacgaggtgacaaatgagttcttgtactacaatgtgagtttcagggtcatcccttcaggcatcatcaaaaccatcgagatggtgaccccagtccggcaagttgcgtcagcctccatcaagttggagaaccctctgccctactcggtgaccttctccacggaatgccggatgcccgacatcgccctgccctcccagtttgtggtgcctgccaactccgagggcacgttctcatttgaatttcagcccctgaaagctggagaaaccttcggaagactaactttgcacaacactgacttgggttactaccaatatgagctctatctgaaagccacgccagcacttccggaaaagcctgttcacttccagactgtccttggcagcagccaaatcatccttgtgaagttcatcaattacacacggcagaggacagaatactactgcaggaccgactgtacagacttccacgcagaaaaactcattaatgcagccccaggaggccagggaggcactgaagccagtgtggaagtcttattcgagcccagccacctgggtgagaccaagggcatcctgatcctatcatcgctcgcaggtggagagtatatcatccccctctttggaatggctctgcctcccaagccccaaggtcccttctcgatccgagccgggtacagcataatcatccccttcaagaatgtcttctatcacatggtgaccttctccatcatcgtggataacccagccttcaccattcgcgctggagagtctgtgcggcccaagaagatcaacaacatcacagtctcctttgaaggaaacccatctggcagcaaaacccccatcaccaccaagctgactgtgagctgccctcctggtgaagggagtgagactggagttaaatgggtttattatctgaaggggatcaccctttagtggtaaccagggttacctgtatcaaccaaaagctatgcattgtcttagcctgaaaaagaatagagaaaacaataagaattctaaaggaactgtttttattcttctcatacaattatagggcagttatttccctattatgtgttttccaaatatagatatgaaatatctattccatattaaacattataactacacacaacag

SEQ ID NO: 293907 - DNA, 15480 bp, Artificial Sequence
  derived and/or modified sequence
ggagcccctcagcggcggcggggtctgtgagttggacgcggggtcttggcggggaatggaggtagaataaacgtgggacccggagtgcaccaaggtgagaaaaaaaaattactaaaaatgacaagtagaagacttgaggagtccatgggggctgttcagatgggattggtcaatatgttcaaaggatttcaaagcaaggttttgccacccctgagtccaaaggtggttacagaagaagaagtaaaccgaatgcttacaccctcagagttcctgaaggaaatgtccctgaccaccgagcagagactggcaaaaacacgtttgatgtgccgaccacagatcatcgaactcttagatatgggggaaacaacacatcagaagttttcaggaattgacctggatcaggcattattccagccctttccatcagaaattatatttcagaactacactccctgtgaagtctatgaagttccactgattttgaggaacaatgacaaaattccaaggttggtgaaagttgtggaagaaagttcgccttactttaaagtaatcagccccaaagatattggccacaaagtggctcctggagtgccttccatattccgaatcctctttactccagaggagaacaaggattacgcccatacgttgacctgtgttactgaaagagaaaagtttattgtacccatcaaagctagaggggcacgagccattctcgattttcctgacaagctgaatttttccacttgtcctgtcaaatacagcacccagaagattctgctggtacgaaacattggcaacaaaaatgctgtatttcacatcaaaacttgtaggcctttctctatagaaccagctattggaactcttaatgtgggagagtccatgcaactggaagtggagtttgagccacagagtgtgggcgatcacagtggaagacttatcgtgtgttatgacacaggtgaaaaggtgtttgtatctctctatggagctgccatagacatgaatataaggctggataagaattccttgaccatcgagaaaacctacatatctctggccaatcagcgaactataaccattcacaatcgcagtaatatcattgcccatttcctgtggaaggtatttgctacccagcaagaagaggacagagaaaaatatagggcctgtgatgatctgatcaaagaggagaaggatgagactgatgagttttttgaagagtgcattactgatcctttactccgagaacatctttctgttctgtcccgaacctttgcgaatcagaggaggctggtgcagggagacagcaagctgttcttcaataacgttttcactgtggagcccctggaaggtgatgtctggcccaactcatcagctgaaatcaccgtgtactttaacccactagaagccaagctctatcaacagaccatttactgcgacattttaggccgagaaatccgtctgcccctccgaatcaaaggggaaggcatgggacctaagattcacttcaactttgaattgctggatattgggaaagttttcactggatctgcacattgttatgaggcgatactgtacaacaaaggcagcatcgatgctctcttcaacatgacccctccaacttcagctttgggggcctgctttgttttcagtcccaaggaaggcatcattgaaccaagtggagtccaagctatccagatctccttcagctctaccatcctgggaaactttgaagaagagttcctggtcaatgtcaatgggtcacctgagcctgtgaaactgaccattagaggctgtgtcattggacctaccttccattttaatgttccagctctgcactttggtgatgtttcctttgggtttcctcataccttgatatgttccctcaataatacctctttgatccccatgacttacaaactgcgtatccctggggatggccttggccataaaagcatttcatattgtgagcagcatgtggactacaaaagaccatcttggaccaaggaagaaatatcctcaatgaaaccaaaagaattcaccatctctcctgactgtggcaccattcgcccccagggatttgctgctatcagggtgacattatgctccaacactgtgcagaaatacgagctggcactcgtggtggacgtggagggcatcggagaagaggtgctggcgctcttaattacagcaaggtgtgttgtacctgccctccacctggtcaatacagaggtggactttgggcactgcttcctgaagtacccgtatgagaaaacactccagcttgccaatcaagatgacctcccaggattctatgaggtccagcctcaggtgtgtgaggaggtgcctactgtgctgttttccagccccacccccagcggggtcatctccccaagcagcaccatccacataccactggtcctggagacccaggtcactggagaacacagatccacggtttacatctcaatctttgggagccaggacccccctttggtatgtcacttaaagagcgctggagaaggcccagttatctacgtccatcccaatcaagtggacttcgggaatatctacgtcctaaaagactcttccaggattctcaacctatgcaaccagtccttcattcccgcatttttccaggcacacatggcacacaaaaaatccctttggacgattgaacccaatgaaggcatggttcctccagaaactgatgttcaactggcactgaccgccaacctgaatgacacactgacattcaaggactgtgttattttggacattgaaaatagcagtacctatcggattcctgttcaggcttccggaactggttccactattgtttcagataagccctttgctccagaactcaatttgggggcacattttagcctggatacccactattaccactttaagttgatcaacaagggacgtcggatccaacagttgttctggatgaatgatagcttccgaccccaggccaagctgagtaagaagggccgggttaagaagggacatgctcatgtccaaccccagcccagtggctctcaggagcccagggatccacagagccccgtgtttcatctccaccccgccagcatggagctgtacccaggccaggcaattgatgtgatactcgaaggctattctgctactcccaggatagtgaaagagaagctggtgtgccacgccatcatcggggcacagaaggggaagagcttggtgatggctgtgaacatcacctgtgagttcgtcgcacctctcatccagctctccaccaagcagctcatctaccgactggagaagaaacctaacagtatcctgaaacctgattaccagcccttggccataaagaacatttccaccctgcccgtgaacttgttgctgtcaacatctggacccttctttatatgtgagactgataaatccctgctgccggcaactcctgagcctattaaactggaaattgatgaagaaaaaaacctgctgatcaagtttgacccttcctacagaaacgatctgaacaactgggtggcagaagaaattctagcaattaagtatgtggaacaccctcagatagacagcctggacctgcgcggagaagtgcattaccccaacctcagctttgagacaaaggagctggattttggctgcatcctgaacgatactgagctcattcgctacgttaccatcaccaactgcagtccgttggttgtgaagtttcgctggttcttcttggtgaatgatgaggaaaatcagataaggtttgtgacattgccgaagaagccctacagtgccccagtgtcccagatggagtccatcccagcaacctcagaggctgccagcccaccagcaatcctagttacagtagagtcccccgagatggatttaaatgattttgttaagactgtccttgtggatgaagatgccaggcctgaagaaaaagaactaagaaaaacgaaagcttccagtgtgatctcagatgtacggtgtcctttccatggggaggaaagaatatactcaagccagagccaggtggaggatcaggaatccctacagacctgtgaacagaatgagatgctttccattgggatagaagaagtgtttgatattttgcccctgtttggagtgttgcagccacacagtagccaccaaatatcgttcaccttctatggacacgctaacatcattgcacaagctaaagctctgtgtgaagtggaagaaggacccacctacgaaataacactgaagggagaggcgtccctggtcaactattcctttgacaccaaggatattcactacggattacagctgtttgaccatgtcacagagagggaaatcacgctgacgaacatggggaaagttggctttgagttcaaggttctgactgaccaccagtcttctccagacaaccttctccctggagtgccactaatcctgcctgtgtctggctttatcagttcacatcaagagcaggtattaaaagtttactacctacctggagtacctgaggtctttaaaaggagtttccagatacagatcgcccacctggacccagaaaatatcactctgagcggagagggaatctttccccaaatctgcctcgatctccccaggaacctcacagcaaatgaaaagtatgaaatgttcttgaatcaagccaggaaaaacacagacaaagagtataacaaatgtgaaatgctcgatcactttgacataataactgaggaagtgccagaagacgagcctgctgaggtaagtgctcatctccagatggaggtagaaagacttatagtccaaagctatgtcctagaacatcagaaaacaaccacccctgatcctatggatgacccctgcttcagccatcggagtcgccgcaaactggccaaaatccagctaccagagtacatcctggactttggctacatcatccttggcgaagtccgaacccacatcatcaagatcatcaacaccagtcactttccagtgtcattccatgcagacaagcgtgtccttcatgagacaggattcagtactgagctagatcgtgtaaagaatctacctcattgtgaaacggaaatatttgaagtgagatttgacccacagggggccaatcttcctgttggaagcaaagaagtcattctgcccatcaaggtggttggagggccaacagttcacatctgtctccaagccaaggtgaccattccaaccatgactctctctcgtggaaaagtggactttgccacaattcagtgtggacagtgcctggtggaaactattcagctttccaatcatctccaagtcccttgtgaatggttcgtccagagccaaaagcctgttgacaagctggagaaacacatgccgaagtacttaagacagaaactacgcgctgaattaaagccaaagacacggatcttcgaaatccagcccatttctggagtcttggatcctggtgagaagtccaacgtgcaagtgaaattcatgccaaaagaagagaaattctacagccaaaccctggtgtttcagattgcccagagtgctcaaaagcttaccctcctggcacgtgggcaaggtctagagccacgcctggaatttagtccttcagtcctggatctggggccactgctactttgtgcacctggagacgaggccgaggtgatagtgaagaatccctgcaacttccccattgagttttattccttagaatttgatcagcagtatctcatagaagaaaagatcttgcggaagctgaagggctatgattcctacaacaccctgctgctgcctccccgcaaccctggggagaagctgcccccagaactgtacgagtacttcaaagagataaagaagtcaaaagaggagcagatgagggcgaaatatctggagaatctggcacaggagaatgaagaggaagatataacctcatcagatcagggaacctccaatagcacaaagaggacatcgctgagccgagggatctctgtcacatccaacctggaagaatggcacgccctgttggtcgagtccaaaacctacctagaggaagaggaggatgaggaaagcctggaaaaaatcattttccaaactgacaagcttcagagcattgacagccactccatggaggaagttggagaggtggaaaacaacccagtgagcaaagcaatcgctcgccacctgggcattgacatttctgcagaaggccgcctggccaagaaccggaaaggcatcgccattatcattcatgggacacccttgtcaggaaagtcagccaatgccgttagcgtggccaagtactacaacgcagcctgcctgagcatcgactccattgtgctggaagctgtggccaacagcaacaacatcccagggatccgggcccgtgagctctgcatcagggctgccatagagcagtccgtgaaggaaggagaggaggctgcccaggaggcagctgtgggtcaaaacgtcatagggcaaggacgactgagcactgacaccttgggcaagttagcctccgagatgactctggtggccccagaaattaaacctggaaagagtgttcgtgggagcgtggtgatcaccaaaagcaaggcagacagccatggctccgggtcacagaagcagcatcactcacaccagtctgaaacaccacagatttcctccagccctctccccccggggcccatccaccgctggctcagtgttagtcccagtgtcggaggcgagaccgggctgatgagctgtgtgctcccggatgaacttctcgtgcagatcctggcagagcggatacagctgagtgactgctaccgaggagtggtgtttgatggcctcgacactctctttgctcagaatgctgcagccgccctcctctgcctgctgaaggccattggcagccgggagcatatatacattctcaacatggcccaggattacgcagccatgaaggcccaggagaaagccaaaaaggagcaagaagaacgcaagcacaagggagctcttgagaaagagaaggagcgtctccaaaacatggatgaggaagaatatgatgccctgactgaggaggagaaactcacattcgatcgggggattcagcaggcgctccgcgagcggaagaagagggagcaggagaggctggcaaaggaaatgcaagaaaagaagctacagcaggagctggagcgacaaaaggaagaggatgagctgaaacggagggtcaaaaaaggaaagcagggacccattaaggaggagccccccatgaagaaatctcaagcagcaaacaagcaggttcctccgctcaccaaagtggatgtcaagatggagacaatcgaaaggaaaatatctgttagggaacaaacaatgtctgagaaggaagagctaaataagaagaaaaggaacatgggcgatgtcagcatgcatgggcttcctcttgtccaggaccaagaggacagtgaaggggacaactcaaaggaccccgacaagcaactggccccgaagtttaagacctatgaattgacactgaaggatgtccagaacatcctcatgtactgggaccggaagcaaggagtccagctgcctcctgcagggatggaggaagcgccccatgagcccgacgaccagcgccaggtccccttgggtgggcgcaggggccgcaaggaccgggagagagagcgcctggagaaggagcgcacggagaaggagcgcctggagagggagaaggcggagcgggagcgcctggagaagctgcgagccctggaggagcggagcgactgggagggggaaggggaggaggaccacgaagggaagaaggagaaggacctgggcgtacccttcctagacatccagacaccagactttgaaggcttgagctggaagcaggccctagagagcgacaagcttcccaaaggagagcagatcctagacatcttgggtctgggtgcctccggaccacccatcccgcctcccgccttattctcaatcgtctcctacccggtgaagcggccacctttgaccatgacagacgacctggagcattttgtatttgtgatcccaccatccgaagatatatctctggatgaaaaaaaagaaatggaaatagaatcagactttttggccaccacaaacactacaaaggctcaagaggagcagaccagctcatctaaggggggcaaacagaaaatgaaagaaaagatagaccaagtcttcgagattcagaaagacaagcgtcacatggccttaaacaggaaggtcctttctggggaacctgctggaaccatttcccagctgtcagatacagacctggacaacttcaacgggcagcactcccaggagaaattcaccagactgaatcacttccggtggatcgtgccagccaatggcgaggtaacgttgcaggtgcacttctcttctgatgagttcgggaactttgaccaaacctttaactttgagatcctaggaacttgctgccagtaccagctctactgccgaggcatctgcacttacccatacatttgccaagacccaaaagtggtatttcctcagcggaagatggacatgaagacaaatgaggtcatctttaagaagtatgttatgagcacggagacgtactactttgggccactactttgtggaaaatcaagagataagtacaagtcatccttattcccaggcaacatggagacgctaacaatcctgaacacttccttaatggtggtggaggcatccttctattttcagaatgatgtcaaagcaaacacgtacttcctggaacccaacaccatggtcctgaaacccaatgagaagcagatattaaacgtatgggcctaccctacttcagttggtgtctttgaagacagcattgtctgctgcatcaatgacaacccagagccagccatcttccaattaagctgccaggggatccgcccggaactagagctggaacccaggcaattacattttgaccggctcttgctgcacagacaggaatccagggtagttcttctccgcaatgtcacgctcctgcctgtggcctggcggatcaccagcctggagcacttgggtgatgatttcactgtatccctgatgcaggggaccatcccccctgaggctgagtacggcctgcacctgtactttcagcccaccaagcctgtcaacatcaagaaggctattcggttggaggttttagatgcagaaaatcttcttggtgttgttcagattgaaaatatcatggtctttgcagaggcatacgacatcgccttggacatcaccttccccaaaggagctgaagggggactggattttgggattgtcagggtcacagaggaggcgaagcagcccctgcaattgaagaaccgtgggaaatatgagatcgcgttcagcttttccgtggactctgtagggatttcaacacctaatataaattccatgatctcagtccaacccaaaaagggttcactgaccccaacagaaaaacccacaaatgtccaagttttcttccatgcaaaaaaggaagtgaagattgagcaccagcctgttctgcgctgtcagattattgagcccaatatttcagaaggaggtgagatcattgccagcatcccaattaagttttccgcgaatgcagtatattccaaatacaacatcaccccctcctctgtcatcaactttggagctttgatctgtggcactcgtaaaagcaccaccttcaccatagaaaatcaaggtgttactgacttcaagttcgccctttataagctgacaggggagagccccattcatcaaaagaaagcagccagccacgtcagacatgcaagatcccgagaaagtgagagcttctacaaaactggctcttccagagcagccaagttctctgacacgattcagaaagaagtaaccaccacaggccaggcccgcttcgcccatggcatgttcaccgtgtaccctgggtttggctccattccttccggaggacagcaggtcatcaacgttgactgtgtggctgacgccatgggaaagtgtgaggagtttatagccatcgatatctccggccgagaccctgcagtccaccctgccggcattctttacactttgctagctgaagcctgtctaccagccttcgtgaccgaaaacaatgccttgatatttgaagagcaccagatatgtaccagtgccaacctgcaccacatcctgcagaccatagagagcggggggctgttcgtcgaggatgagaacaagttcatcttctgcaatgtcctggtgggccgccaagccaaggctcgtttcaagatcagcaacgtgggaaagatcacctgtgatgtcaacattgtagtcaggcctatctccaataagccctttgcccgcatcgtcgacatttttgaagtggaacccagcaagatgtgcattgccagtcattcccatgcctttgccacggtgtccttcaccccgcagatcatgcagaactaccagtgcatctttgaggctaccttggatggcttgcccagcaccctggccaagagccgaggcctcgtgtttgacatcgctggtgaggggaacctccctcgagtgacggttgtgcggccagttcttcataaccaatatggaaaccccttgctcctctttaagaggcttctccttggtcattcagagaagctgcctctcatcctcaagaacaatggtgtcctccctgcccagctgcatgttgacctgcaggatgagctaggagtcttctccctgaaagggaggcccaccaccgcgtatatctacatcacagaggaaaataaaccacatgtaaaagcaaagaaagctcacacagcctccttggttgtttctcctggagatacagctgaatttgatgtcgttttccactcccagaaggttgggaggatgagaggtatcatccacttgtcagtgatcaacaaccaatatgaggagacctccatccacatggtgggagagggctatgaggatgacatcaccttggacaacatccatggactggtggcccccaccagccaggaagacataagtatctctgagttcacagagatcatcgaggacaatgatatggaagacttggtggcagctgctctggtggaccacatccaatttggggactgccacattggacacagctataatgcgagcttcacagtcacaaatcacagccaagtgaacttgatacggtttgaatggcctgtttcagctacaattgctttctccccacagatgggccacctccaccctgggtgtgccaaggacatagtggtgaccatgaagtcagatgtacccatcaacctaaagaatatgcggatcaggtgcaagctctccaggattatgtttcagctccctgcagaccaggtccccgactgggatgaccgcatgcacacagtcaagtgggtggacgtacccagaaacatgcctgggactttcactacaaaacgaaaagtgatagagacggatccggaacctgctcactcagtactagaagaaaactaccaagaactgcagcttcaaatcagtgccaatgtggatttcgcttcataccattgccaagcaagagatgtgcgctttaaggaaaccttggtttaccagacccgagtgtttgagttcgatgtgattaattcaggacgtgtccagctggaattcagctgggtctcagaagatacctcaaaggcagtcagctttgcaaaaccagatcaccaaggttcagctcaaaaagatcagcttagtcagggcacgatgcatacaggcagcaccctggacagcaccatggaccactgggccgagggttccccacagcccttctctgtggagccctcttcgggaatcgtgccggtggggaagattcagaagttcaaagtaaaattctccccgttggacattggagacttcgagagcaaccttttctgccagattcccaacctgccacctggagagcaaggtccggtcctggtagcaaaagggcggagcaccttgcccatctgccattttgatctgaaagactcggactacataagtggccatcagcgcaacccagagctccgagggtccagtgggggagctctggatccaaacacccgggtgattgagttcaccactgtgggcataggagggaagaatctccggacctttaccatcctaaacccaaccaatagcacctactccttctgctggatctctgaagaaattgaaagtctccagaaccctgcagcattcacatgccttacagaaaagggcttcatccaccctgaaaagaaagccgagatcgtgttccagttcacacctttccatctgggcatcactgagtcatcatggaccttcctaattcccgagcacaacatcacagtccctttcctgctggtaggcaaaactaccgaacctctcatctctctgaacaagtcacacctcaacttcagctctctcctcattggcagagaagccagggagactgtgcagatcattaacaaggaggagcaggggttcgatttttccttccaggacaactcccgctattctgaaggtttcagcaacagcctgcttgtatgtcccatggaaggctggatcccaccactgtccaggttcccaattgatattttcttcacaccaaagcaggaaggagatgtgaactttaatttgatctgcaatgtggaaaagaaagtccaccctgtgacattaaatgtcaaggccgagggctacactatgaatgtggagatcaagtgcaaggacaggacaggctccatcactctgttgactcccaaccagactaacatcatcaacttctatgaggtggagttaaatgaatgtgtccagtgtgaattcaactttatcaacactggaaagttcaccttcagcttccaggcacagctgtgtggctccaaaaccttgctgcagtacttggaattttcacccatcgacagcactgtggatgtaggacagagtgtacatgccaccctgtcttttcaaccattaaagaagtgtgtcttgacagacctggaactcataatcaagatcagccatggtccaacatttatgtgcaacatctcaggctgtgctgtgagcccggctatccatttctccttcaccagctacaactttgggacctgctttatctatcaagctgggatgcccccatacaaacaaaccctggtaattaccaacaaggaagaaacacctatgagcatagattgtctgtacaccaacaccactcacctcgaggtgaactcccgtgttgatgtggtaaagccaggaaacacattggagattccaataactttttatcctcgagaaagtatcaactatcaagaactcattccctttgaaatcaatgggctctcacaacaaacagtcgaaatcaaagggaagggtaccaaaatgaagattttagtcctagatccagccaacaggattgtgaagttgggagctgtcctaccagggcaggttgtgaaaagaacagtttccatcatgaacaacagcctggcccagctcacatttaatcagtccattctgttcacaattccagaactccaggaacccaaggtccttaccctggcgcccttccacaacatcacactgaagcccaaagaagtctgtaaactggaagtcatctttgccccgaagaagcgtgtccctcccttctctgaggaagtgttcatggaatgcatggggctcctgcgccccctcttcctccttagcggctgctgccaggccctggagatctcactggaccaggaacatattccctttggacccgtggtgtatcagacgcaagccacacgtcgcatcctcatgatgaacacaggcgatgtgggtgcaaggtttaaatgggacatcaaaaaatttgagcctcatttctccattagcccagaagaaggctatattacctcaggcatggaggtttcttttgaagtgacctaccatcccaccgaggtgggaaaggagagcctttgtaaaaacattctctgctacatccagggaggcagtcctctgagtctaaccctgtctggagtctgcgtgggaccacctgcggtaaaagaggtagtgaatttcacgtgccaggtgcgctccaagcacacgcagaccatcctgctgtcaaaccgcaccaaccagacctggaatctgcaccccatctttgagggcgagcactgggaggggcctgagttcatcaccctggaggcccaccagcaaaacaagccctatgagatcacctacaggccccgcaccatgaacttggagaaccgcaagcaccagggcaccctcttcttccccctcccagatgggaccggctggctgtatgctctgcatgggacttctgagctccccaaagctgtagccaatatctatcgtgaagtgccatgtaagaccccctacactgagcttctgccaatcaccaactggctgaacaagccccagagattccgggtcatcgtggaaatactgaaaccagagaagccggacctaagcatcactatgaagggccttgattacattgatgtactgtctggctctaagaaagactacaagctgaacttcttttcccacaaggagggaacgtacgctgcaaaggtgatcttccgaaacgaggtgacaaatgagttcttgtactacaatgtgagtttcagggtcatcccttcaggcatcatcaaaaccatcgagatggtgaccccagtccggcaagttgcgtcagcctccatcaagttggagaaccctctgccctactcggtgaccttctccacggaatgccggatgcccgacatcgccctgccctcccagtttgtggtgcctgccaactccgagggcacgttctcatttgaatttcagcccctgaaagctggagaaaccttcggaagactaactttgcacaacactgacttgggttactaccaatatgagctctatctgaaagccacgccagcacttccggaaaagcctgttcacttccagactgtccttggcagcagccaaatcatccttgtgaagttcatcaattacacacggcagaggacagaatactactgcaggaccgactgtacagacttccacgcagaaaaactcattaatgcagccccaggaggccagggaggcactgaagccagtgtggaagtcttattcgagcccagccacctgggtgagaccaagggcatcctgatcctatcatcgctcgcaggtggagagtatatcatccccctctttggaatggctctgcctcccaagccccaaggtcccttctcgatccgagccgggtacagcataatcatccccttcaagaatgtcttctatcacatggtgaccttctccatcatcgtggataacccagccttcaccattcgcgctggagagtctgtgcggcccaagaagatcaacaacatcacagtctcctttgaaggaaacccatctggcagcaaaacccccatcaccaccaagctgactgtgagctgccctcctggtgaagggagtgagactggagttaaatgggtttattatctgaaggggatcaccctttag

SEQ ID NO: 293908 - DNA, 3685 bp, Artificial Sequence
  derived and/or modified sequence
gcatggagagtgcgggcggcttcaagctgggtatggagcccctcagcggcggcggggtctgtgagttggacgcggggtcttggcggggaatggaggtagaataaacgtgggacccggagtgcaccaaggtgagaaaaaaaaattactaaaaatgacaagtagaagacttgaggagtccatgggggctgttcagatgggattggtcaatatgttcaaaggatttcaaagcaaggttttgccacccctgagtccaaaggtggttacagaagaagaagtaaaccgaatgcttacaccctcagagttcctgaaggaaatgtccctgaccaccgagcagagactggcaaaaacacgtttgatgtgccgaccacagatcatcgaactcttagatatgggggaaacaacacatcagaagttttcaggaattgacctggatcaggcattattccagccctttccatcagaaattatatttcagaactacactccctgtgaagtctatgaagttccactgattttgaggaacaatgacaaaattccaaggttggtgaaagttgtggaagaaagttcgccttactttaaagtaatcagccccaaagatattggccacaaagtggctcctggagtgccttccatattccgaatcctctttactccagaggagaacaaggattacgcccatacgttgacctgtgttactgaaagagaaaagtttattgtacccatcaaagctagaggggcacgagccattctcgattttcctgacaagctgaatttttccacttgtcctgtcaaatacagcacccagaagattctgctggtacgaaacattggcaacaaaaatgctgtatttcacatcaaaacttgtaggcctttctctatagaaccagctattggaactcttaatgtgggagagtccatgcaactggaagtggagtttgagccacagagtgtgggcgatcacagtggaagacttatcgtgtgttatgacacaggtgaaaaggtgtttgtatctctctatggagctgccatagacatgaatataaggctggataagaattccttgaccatcgagaaaacctacatatctctggccaatcagcgaactataaccattcacaatcgcagtaatatcattgcccatttcctgtggaaggtatttgctacccagcaagaagaggacagagaaaaatatagggcctgtgatgatctgatcaaagaggagaaggatgagactgatgagttttttgaagagtgcattactgatcctttactccgagaacatctttctgttctgtcccgaacctttgcgaatcagaggaggctggtgcagggagacagcaagctgttcttcaataacgttttcactgtggagcccctggaaggtgatgtctggcccaactcatcagctgaaatcaccgtgtactttaacccactagaagccaagctctatcaacagaccatttactgcgacattttaggccgagaaatccgtctgcccctccgaatcaaaggggaaggcatgggacctaagattcacttcaactttgaattgctggatattgggaaagttttcactggatctgcacattgttatgaggcgatactgtacaacaaaggcagcatcgatgctctcttcaacatgacccctccaacttcagctttgggggcctgctttgttttcagtcccaaggaaggcatcattgaaccaagtggagtccaagctatccagatctccttcagctctaccatcctgggaaactttgaagaagagttcctggtcaatgtcaatgggtcacctgagcctgtgaaactgaccattagaggctgtgtcattggacctaccttccattttaatgttccagctctgcactttggtgatgtttcctttgggtttcctcataccttgatatgttccctcaataatacctctttgatccccatgacttacaaactgcgtatccctggggatggccttggccataaaagcatttcatattgtgagcagcatgtggactacaaaagaccatcttggaccaaggaagaaatatcctcaatgaaaccaaaagaattcaccatctctcctgactgtggcaccattcgcccccagggatttgctgctatcagggtgacattatgctccaacactgtgcagaaatacgagctggcactcgtggtggacgtggagggcatcggagaagaggtgctggcgctcttaattacagcaaggtgtgttgtacctgccctccacctggtcaatacagaggtggactttgggcactgcttcctgaagtacccgtatgagaaaacactccagcttgccaatcaagatgacctcccaggattctatgaggtccagcctcaggtgtgtgaggaggtgcctactgtgctgttttccagccccacccccagcggggtcatctccccaagcagcaccatccacataccactggtcctggagacccaggtcactggagaacacagatccacggtttacatctcaatctttgggagccaggacccccctttggtatgtcacttaaagagcgctggagaaggcccagttatctacgtccatcccaatcaagtggacttcgggaatatctacgtcctaaaagactcttccaggattctcaacctatgcaaccagtccttcattcccgcatttttccaggcacacatggcacacaaaaaatccctttggacgattgaacccaatgaaggcatggttcctccagaaactgatgttcaactggcactgaccgccaacctgaatgacacactgacattcaaggactgtgttattttggacattgaaaatagcagtacctatcggattcctgttcaggcttccggaactggttccactattgtttcagataagccctttgctccagaactcaatttgggggcacattttagcctggatacccactattaccactttaagttgatcaacaagggacgtcggatccaacagttgttctggatgaatgatagcttccgaccccaggccaagctgagtaagaagggccgggttaagaagggacatgctcatgtccaaccccagcccagtggctctcaggagcccagggatccacagagccccgtgtttcatctccaccccgccagcatggagctgtacccaggccaggcaattgatgtgatactcgaaggctattctgctactcccagggtaaggggatagcacatttggaagctattgttttttcctaaataaatctctactgtatctatttcttaggaaagtcccttgacatttatctgaggaaggatatggtttctcaaggattgtgtacaatcctgagttaccatagtagcatccgttgctttcggggtgcagctctgctcagtcttcaatttgtttctgtagctactgtgaacccaatcttaaaggaggttctcatgcccagggtccacagtgaccagccagcaagtctctggtagaaaaacacccagtttttagccaaagcaaattctcctattaacacttagcaggatgaatttaatattcattcaaaaagggtgtttatatcgacactctgggctgcctctcctattcaggtattgggacatccctgttcctttctttccagcctgactgcaactcacatttcaaaacatcttctttttatgcattaataaaagagccacatttatcttcagc

SEQ ID NO: 293909 - DNA, 3762 bp, Artificial Sequence
  derived and/or modified sequence
ggagcccctcagcggcggcggggtctgtgagttggacgcggggtcttggcggggaatggaggtagaataaacgtgggacccggagtgcaccaaggtgagaaaaaaaaattactaaaaatgacaagtagaagacttgaggagtccatgggggctgttcagatgggattggtcaatatgttcaaaggatttcaaagcaaggttttgccacccctgagtccaaaggtggttacagaagaagaagtaaaccgaatgcttacaccctcagagttcctgaaggaaatgtccctgaccaccgagcagagactggcaaaaacacgtttgatgtgccgaccacagatcatcgaactcttagatatgggggaaacaacacatcagaagttttcaggaattgacctggatcaggcattattccagccctttccatcagaaattatatttcagaactacactccctgtgaagtctatgaagttccactgattttgaggaacaatgacaaaattccaaggttggtgaaagttgtggaagaaagttcgccttactttaaagtaatcagccccaaagatattggccacaaagtggctcctggagtgccttccatattccgaatcctctttactccagaggagaacaaggattacgcccatacgttgacctgtgttactgaaagagaaaagtttattgtacccatcaaagctagaggggcacgagccattctcgattttcctgacaagctgaatttttccacttgtcctgtcaaatacagcacccagaagattctgctggtacgaaacattggcaacaaaaatgctgtatttcacatcaaaacttgtaggcctttctctatagaaccagctattggaactcttaatgtgggagagtccatgcaactggaagtggagtttgagccacagagtgtgggcgatcacagtggaagacttatcgtgtgttatgacacaggtgaaaaggtgtttgtatctctctatggagctgccatagacatgaatataaggctggataagaattccttgaccatcgagaaaacctacatatctctggccaatcagcgaactataaccattcacaatcgcagtaatatcattgcccatttcctgtggaaggtatttgctacccagcaagaagaggacagagaaaaatatagggcctgtgatgatctgatcaaagaggagaaggatgagactgatgagttttttgaagagtgcattactgatcctttactccgagaacatctttctgttctgtcccgaacctttgcgaatcagaggaggctggtgcagggagacagcaagctgttcttcaataacgttttcactgtggagcccctggaaggtgatgtctggcccaactcatcagctgaaatcaccgtgtactttaacccactagaagccaagctctatcaacagaccatttactgcgacattttaggccgagaaatccgtctgcccctccgaatcaaaggggaaggcatgggacctaagattcacttcaactttgaattgctggatattgggaaagttttcactggatctgcacattgttatgaggcgatactgtacaacaaaggcagcatcgatgctctcttcaacatgacccctccaacttcagctttgggggcctgctttgttttcagtcccaaggaaggcatcattgaaccaagtggagtccaagctatccagatctccttcagctctaccatcctgggaaactttgaagaagagttcctggtcaatgtcaatgggtcacctgagcctgtgaaactgaccattagaggctgtgtcattggacctaccttccattttaatgttccagctctgcactttggtgatgtttcctttgggtttcctcataccttgatatgttccctcaataatacctctttgatccccatgacttacaaactgcgtatccctggggatggccttggccataaaagcatttcatattgtgagcagcatgtggactacaaaagaccatcttggaccaaggaagaaatatcctcaatgaaaccaaaagaattcaccatctctcctgactgtggcaccattcgcccccagggatttgctgctatcagggtgacattatgctccaacactgtgcagaaatacgagctggcactcgtggtggacgtggagggcatcggagaagaggtgctggcgctcttaattacagcaaggtgtgttgtacctgccctccacctggtcaatacagaggtggactttgggcactgcttcctgaagtacccgtatgagaaaacactccagcttgccaatcaagatgacctcccaggattctatgaggtccagcctcaggtgtgtgaggaggtgcctactgtgctgttttccagccccacccccagcggggtcatctccccaagcagcaccatccacataccactggtcctggagacccaggtcactggagaacacagatccacggtttacatctcaatctttgggagccaggacccccctttggtatgtcacttaaagagcgctggagaaggcccagttatctacgtccatcccaatcaagtggacttcgggaatatctacgtcctaaaagactcttccaggattctcaacctatgcaaccagtccttcattcccgcatttttccaggcacacatggcacacaaaaaatccctttggacgattgaacccaatgaaggcatggttcctccagaaactgatgttcaactggcactgaccgccaacctgaatgacacactgacattcaaggactgtgttattttggacattgaaaatagcagtacctatcggattcctgttcaggcttccggaactggttccactattgtttcagataagccctttgctccagaactcaatttgggggcacattttagcctggatacccactattaccactttaagttgatcaacaagggacgtcggatccaacagttgttctggatgaatgatagcttccgaccccaggccaagctgagtaagaagggccgggttaagaagggacatgctcatgtccaaccccagcccagtggctctcaggagcccagggatccacagagccccgtgtttcatctccaccccgccagcatggagctgtacccaggccaggcaattgatgtgatactcgaaggctattctgctactcccaggaaacctaacagtatcctgaaacctgattaccagcccttggccataaagaacatttccaccctgcccgtgaacttgttgctgtcaacatctggacccttctttatatgtgagactgataaatccctgctgccggcaactcctgagcctattaaactggaaattgatgaagaaaaaaacctgctgatcaagtttgacccttcctacagaaacgatctgaacaactgggtggcagaagaaattctagcaattaagtatgtggaacaccctcagatagacagcctggacctgcgcggagaagtgcattaccccaacctcagctttgagacaaaggagctggattttggctgcatcctgaacgatactgagctcattcgctacgttaccatcaccaactgcagtccgttggttgtgaagtttcgctggttcttcttggtgaatgatgaggaaaatcagataaggtttgtgacattgccgaagaagccctacagtgccccagtgtcccagatggagtccatcccagcaacctcagaggctgccagcccaccagcaatcctagttacagtagagtcccccgagatggatttaaatgattttgttaagtaa

SEQ ID NO: 293910 - protein, 582 aa, Artificial Sequence
  derived and/or modified sequence
MGGSSPVTSKAIVDADGRIYIRNWQGGILSGGFEKNPKPIFTEGKNQLEIQNLQEDWDHFEPLLSSLLRRMPELETLEIMKLVNCPETFTPDMRCIMGESPAVQGYFVLAGMNSAGLSFGGGAGKYLAEWMVHGYPSENVWELDLKRFGALQSSRTFLRHRVMEVMPLMYDLKVPRWDFQTGRQLRTSPLYDRLDAQGARWMEKHGFERPKYFVPPDKDLLALEQSKTFYKPDWFDIVESEVKCCKEAVCVIDMSSFTKFEITSTGDQALEVLQYLFSNDLDVPVGHIVHTGMLNEGGGYENDCSIARLNKRSFFMISPTDQQVHCWAWLKKHMPKDSNLLLEDVTWKYTALNLIGPRAVDVLSELSYAPMTPDHFPSLFCKEMSVGYANGIRVMSMTHTGEPGFMLYIPIEGMDFIGRDALLQQKQNGVYKRLTMFILDDHDSDLDLWPWWGEPIYRNGQYVGKTTSSAYSYSLERHVCLGFVHNFSEDTGEEQVVTADFINRGEYEIDIAGYRFQAKAKLYPVASLFTQKRRKDDMELSAFLALPPPPPNIHSGLFFPSHPSLSFSWWQEVCLTGQKQAP

SEQ ID NO: 293911 - DNA, 1746 bp, Artificial Sequence
  derived and/or modified sequence
atgggaggatcttcccccgtgacctcaaaagctattgtggatgctgatggaagaatttatattcggaactggcagggtggcatcctgtctgggggctttgagaagaacccgaaaccaattttcactgagggcaagaaccagctggagattcagaatctacaggaagactgggatcactttgagcctctgttgagttcccttctgaggaggatgccagaattagagactctggagatcatgaagttggtgaactgcccagagaccttcacaccagacatgaggtgcatcatgggcgagtctcctgcagtgcagggctactttgtcctggcaggaatgaactctgctggcctttcatttggtggaggagccggaaagtaccttgccgaatggatggtacatggttatccctcagaaaacgtttgggaattggacctgaaacgttttggagccctccagagcagccgcacctttctgcgccaccgggtcatggaagtcatgcctttgatgtatgatctgaaggttccccgctgggacttccagaccggtaggcagttacgcacctctcctctctacgaccggctggatgcacagggagccaggtggatggagaaacatggatttgagaggccaaagtactttgttccccccgacaaggacctcctggcattggagcagagcaagactttctataagccagattggtttgacatcgtggagtctgaagtcaagtgctgtaaggaagctgtgtgtgtcattgacatgtcctctttcacaaagtttgagataacatccactggggatcaggcattagaagttctacagtacctcttctccaatgacctggatgtgcctgtgggccacattgtgcatactggcatgctcaacgagggtggagggtatgaaaatgactgcagcatagcacgactgaacaagcgcagtttcttcatgatctctccaaccgaccagcaggtccactgttgggcctggcttaagaaacacatgccgaaagacagcaacctgctcctggaggacgtcacctggaagtacacagccctcaatctgattggccctcgagctgtggatgtgctgtctgagttgtcctatgcccctatgactccagaccacttcccaagcctcttttgcaaggagatgagtgtgggctatgcaaatgggatccgggtgatgagcatgacgcacacaggagagccaggattcatgctctacatccccatagagggcatggatttcattggtcgcgacgccctcctgcagcagaagcagaatggagtgtataaacgcctcaccatgttcatcctggacgaccatgattcagacctagacctttggccttggtggggagagcccatttaccggaatgggcagtatgttggcaagaccaccagcagtgcctacagctacagcctggagcgccacgtttgcctgggctttgtgcacaatttttctgaggacacgggggaagagcaagtggtgacagcagatttcatcaaccggggagagtatgagattgacatcgcgggataccgcttccaggccaaggccaagctctaccctgtcgcctccctcttcacccagaagcgccgaaaggatgacatggagctgagtgccttccttgcccttccacctcctcctcctaatattcactctgggctcttcttcccttcccacccctcactcagcttctcgtggtggcaggaggtatgtctgacaggacagaagcaagctcca

SEQ ID NO: 293912 - DNA, 1749 bp, Artificial Sequence
  derived and/or modified sequence
atggggggatcaagcccagtaactagcaaggcgatagtcgatgcagatggtaggatatatatcagaaactggcaaggcggcattctgtccgggggatttgagaaaaatcccaaaccaattttcactgaggggaagaaccaactcgaaattcagaacctgcaggaggactgggatcatttcgaacctcttttatcgtcactcttgagacgaatgccagagcttgaaactctcgaaataatgaaactcgtcaattgtcccgagacctttacccccgatatgaggtgtattatgggggaaagcccggccgttcagggatattttgtgctcgctgggatgaacagtgctggactttccttcgggggcggcgccggaaaatatctggcggagtggatggtgcacggctaccccagtgagaacgtatgggagttggacctgaagaggtttggagccctccagagttccagaacattcctgagacatcgcgtcatggaggtgatgcccctgatgtatgatctcaaggtgcctcgctgggatttccagacggggcggcagcttaggacttcccccctctatgaccgcctggacgcacaaggcgctagatggatggaaaaacacgggtttgagagacctaagtattttgtgccccccgacaaggacctgctggcactggaacagtcaaagaccttttataaacctgactggtttgatatcgtagagtctgaagtaaagtgctgcaaagaagctgtgtgcgtcattgatatgagctcattcactaagttcgagataacgagcacaggagaccaggcacttgaagtccttcagtatctgttttccaatgatcttgacgtcccggtagggcacatcgtacacacaggcatgctgaatgagggtggaggctacgaaaacgattgctccatcgcccgccttaataagcggagcttttttatgatcagccctacagatcagcaggtgcactgctgggcgtggctgaaaaaacatatgcccaaggactccaacctcttgctcgaagatgtcacgtggaagtacaccgcactaaaccttattgggcctcgggccgtggatgtcctaagtgagctatcctatgcgcctatgactccagaccatttcccatcgctgttttgcaaggaaatgtccgtggggtacgccaacgggattagagtgatgtccatgacccataccggcgaaccaggcttcatgctgtatatcccaattgagggcatggacttcataggcagagatgccctgctgcagcagaagcaaaacggggtttataagaggctgacgatgttcattctggacgatcacgacagtgacctagacctgtggccatggtggggggagccaatttacagaaatggacagtatgtggggaaaactacttctagcgcctactcctacagtctggaacgacatgtgtgtcttggtttcgtccataatttctctgaggataccggcgaagagcaagtggtcacagctgactttatcaatagaggtgaatatgaaatcgatattgcagggtaccgctttcaggctaaggcaaagctttatcctgtggcctccttgttcacccagaaacgccggaaagatgacatggagcttagtgccttcttagccctgcctcctccacctcccaacatccatagtggcctgttctttccttcgcatccatctctgtctttctcgtggtggcaagaggtgtgcctgaccggccagaagcaggcgccttag

SEQ ID NO: 293913 - DNA, 1749 bp, Artificial Sequence
  derived and/or modified sequence
atgggcggcagcagccctgtgaccagcaaggccatcgtggatgctgatggccgcatctacatccggaactggcagggcggcatcctgagcggcggctttgagaagaaccccaagcccatcttcacagagggcaagaaccagctggagatccagaacctgcaggaggactgggaccactttgagcccctgctgagcagcctgctgcggaggatgcctgagctggagaccctggagatcatgaagctggtgaactgcccagagaccttcaccccagacatgcgctgcatcatgggagagagccctgctgtgcagggctactttgtgctggccggcatgaacagcgctggcctgagctttggaggaggagctgggaagtacctggccgagtggatggtgcacggctaccccagtgaaaatgtgtgggagctggacctgaagagatttggagccctgcagagcagcaggaccttcctgcggcaccgggtgatggaggtgatgcccctgatgtatgacctgaaggtgccccgctgggacttccagacaggccggcagctgcggaccagccccctgtatgaccggctggatgcccagggcgcccgctggatggagaagcacggctttgagcggcccaagtactttgtgcccccagacaaggacctgctggccctggagcagagcaagaccttctacaagccagactggtttgatattgtggagagcgaggtgaagtgctgcaaggaggccgtgtgtgtgattgacatgagcagcttcaccaagtttgagatcaccagcactggagaccaggccctggaggtgctgcagtacctgttcagcaatgacctggatgtgcctgtgggccacatcgtgcacacaggcatgctgaatgaaggaggcggctatgaaaatgactgcagcatcgcccggctgaacaagaggagcttcttcatgatcagccccacagaccagcaggtgcactgctgggcctggctgaagaagcacatgcccaaggacagcaacctgctgctggaggatgtgacctggaagtacacagccctgaacctgattggccccagggctgtggatgtgctgtctgagctgtcctatgcccccatgaccccagaccacttccccagcctcttctgcaaggagatgtctgtgggctacgccaacggcatccgggtgatgtccatgacccacactggagagcccggcttcatgctgtacatccccatcgagggcatggacttcatcggcagagatgccctgctgcagcagaagcagaatggagtgtacaagaggctgaccatgttcatcctggatgaccatgacagcgacctggacctgtggccctggtggggcgagcccatctacagaaatggccagtatgtgggcaagaccaccagcagcgcctacagctacagcctggagcggcacgtgtgcctgggctttgtgcacaacttctctgaagatactggagaggagcaggtggtgacagctgacttcatcaacagaggagaatatgaaattgatattgctggctaccgcttccaggccaaggccaagctgtaccctgtggccagcctcttcacccagaagaggaggaaggatgacatggagctgagcgccttcctggccctgcccccacctccacccaacatccacagcggcctcttcttccccagccaccccagcctgtccttctcctggtggcaggaggtgtgcctgaccggccagaagcaggccccctag

SEQ ID NO: 293914 - DNA, 1749 bp, Artificial Sequence
  derived and/or modified sequence
atgggcggcagcagccccgtgaccagcaaggccatcgtggacgccgatggtcgaatttacatccgtaactggcaagggggtatcctctccggcggattcgagaaaaatcctaaaccaatctttactgagggcaagaaccagctggagatccagaacctgcaggaagactgggatcacttcgagcctttgctgagttcacttctgagacgaatgcctgaattggagaccctggagattatgaagttagttaattgtccagagacatttactccggatatgagatgcattatgggagagagtccagccgtacagggctattttgtactcgctgggatgaacagcgccggcctatcattcggcgggggagctggcaaatatctggccgagtggatggtgcacggctatccgtctgagaatgtatgggagctggatcttaagcgctttggggcgctgcaaagttcaaggacgtttctgcggcaccgagtcatggaagttatgcctctaatgtacgacttgaaagtccctcggtgggactttcaaacaggcaggcagctgagaaccagtccgctgtacgatcggttagacgcacagggggcccgctggatggagaagcatgggtttgaaaggccaaagtacttcgttcccccagacaaggaccttctggccctcgaacagtcgaagacattttacaagccagattggttcgatattgttgaatcagaggtgaaatgttgtaaggaagccgtgtgcgttattgacatgtctagcttcactaagttcgagatcaccagcaccggagatcaggccctagaggtcctgcagtatctcttttccaacgaccttgatgttccagttggtcatatcgtccataccgggatgctcaacgagggcggaggttacgagaacgactgctcgattgctcgactgaataaaagaagtttttttatgatttcaccaacagaccagcaagtgcactgttgggcttggctgaaaaaacatatgcctaaggattccaatctgctcctagaggatgtgacctggaaatataccgccttaaatctcattggccctagggcagtggacgtcttaagcgagctatcatacgcccctatgacaccagaccattttccgtctttgttctgcaaagagatgtctgtaggctatgctaatggcatccgcgtgatgagtatgactcataccggagagccgggctttatgctctatatcccgattgaaggcatggatttcatcggcagagacgctttactgcaacaaaagcaaaatggggtgtacaaacggttgacaatgtttattttggacgatcacgacagcgacctggacctgtggccgtggtggggagagcccatttataggaacggacagtacgtgggcaaaaccacttcctctgcctattcttacagcctcgaacgccatgtgtgtctgggcttcgtgcacaactttagcgaagatactggcgaagagcaagttgtgacagccgatttcattaacagaggcgagtacgaaatcgacatcgcaggatatcgttttcaggccaaagctaagctgtatcccgtggcaagcttattcacccagaaacgaagaaaagatgatatggagctgagtgccttcttagctctcccacccccccctcctaacatccattctggtttgttctttccctcccatcctagcctgtctttttcctggtggcaagaagtctgtctgacaggacaaaagcaagctccgtag

SEQ ID NO: 293915 - DNA, 1749 bp, Artificial Sequence
  derived and/or modified sequence
atggggggtagcagccccgtgacctccaaggcgatcgtcgatgctgacggcaggatttatatccgcaattggcagggcggtattctttcgggcggtttcgagaaaaaccccaaacctattttcacagaggggaagaaccagctggagatccagaatctgcaggaagactgggaccacttcgaaccattattgagttctcttttacggcgaatgcctgagttagaaacccttgagattatgaagctggtcaactgtcctgagacattcacccctgatatgcggtgcataatgggagagtccccggcagtacaggggtatttcgtactcgccggtatgaattcagccggactttctttcgggggaggcgctggtaagtatctagcggaatggatggttcacggttatccttcggaaaatgtctgggaactggacttgaaacggttcggcgcattacagagctcccgtaccttcttacgccacagggtgatggaggtgatgccactgatgtatgatctcaaagttccacgttgggacttccagacaggcagacagctgaggacaagccccctctatgacaggctcgacgcacaaggcgcacgctggatggaaaagcacgggtttgagcggcctaaatactttgttcccccagataaggatttacttgcactcgagcagtcaaagactttttacaaacccgactggtttgatattgtggagtctgaagtcaaatgctgtaaagaggccgtgtgtgtcattgatatgtcctctttcacaaagttcgagatcacatcgacaggggaccaggctctggaagtcctgcaatacctcttctcaaatgatcttgacgtgccagtaggtcacattgttcacaccggcatgttgaatgaggggggaggctatgaaaacgattgttctatagctcgcctgaataaaagatcctttttcatgataagcccaacagaccagcaggtgcattgctgggcctggctcaaaaaacatatgccaaaggacagcaaccttctgttggaggacgtgacctggaaatataccgcacttaatctgatcgggccaagagctgtggatgtgctctccgaactgagctacgctccgatgacccctgaccactttccctcactgttttgtaaggaaatgagcgtaggctacgcaaatggtatccgggtaatgagcatgacccatacgggcgagccaggattcatgctttacatcccaatcgagggaatggatttcatcgggcgtgatgccttgttacagcagaagcagaatggcgtttacaaaagactgactatgttcatccttgatgatcacgatagcgatctagacctgtggccttggtggggcgagcctatctatcgtaacggccagtacgtcgggaaaaccacatcgtccgcgtatagctactccctggagagacatgtgtgtctgggcttcgtgcacaacttcagtgaggacacaggagaagagcaggtggtgactgctgatttcatcaatcgcggagagtacgagatcgacatagccggttacaggttccaggctaaggcaaaactttatccagttgcctctctctttacccaaaaaagacgtaaggacgacatggaacttagcgcctttctcgccctaccaccccctccacccaacatccactccggactgttcttcccatcacaccctagcctgtctttctcttggtggcaagaagtctgcctaacaggccagaagcaagcgccatag

SEQ ID NO: 293916 - DNA, 1749 bp, Artificial Sequence
  derived and/or modified sequence
atgggcggcagcagccccgtgaccagcaaggccatcgtggacgccgacggcagaatctacatcagaaactggcagggcggcatcctgagcggcggcttcgagaagaaccccaagcccatcttcaccgagggcaagaaccagctggagatccagaacctgcaggaggactgggaccacttcgagcccctgctgagcagcctgctgagaagaatgcccgagctggagaccctggagatcatgaagctggtgaactgccccgagaccttcacccccgacatgagatgcatcatgggcgagagccccgccgtgcagggctacttcgtgctggccggcatgaacagcgccggcctgagcttcggcggcggcgccggcaagtacctggccgagtggatggtgcacggctaccccagcgagaacgtgtgggagctggacctgaagagattcggcgccctgcagagcagcagaaccttcctgagacacagagtgatggaggtgatgcccctgatgtacgacctgaaggtgcccagatgggacttccagaccggcagacagctgagaaccagccccctgtacgacagactggacgcccagggcgccagatggatggagaagcacggcttcgagagacccaagtacttcgtgccccccgacaaggacctgctggccctggagcagagcaagaccttctacaagcccgactggttcgacatcgtggagagcgaggtgaagtgctgcaaggaggccgtgtgcgtgatcgacatgagcagcttcaccaagttcgagatcaccagcaccggcgaccaggccctggaggtgctgcagtacctgttcagcaacgacctggacgtgcccgtgggccacatcgtgcacaccggcatgctgaacgagggcggcggctacgagaacgactgcagcatcgccagactgaacaagagaagcttcttcatgatcagccccaccgaccagcaggtgcactgctgggcctggctgaagaagcacatgcccaaggacagcaacctgctgctggaggacgtgacctggaagtacaccgccctgaacctgatcggccccagagccgtggacgtgctgagcgagctgagctacgcccccatgacccccgaccacttccccagcctgttctgcaaggagatgagcgtgggctacgccaacggcatcagagtgatgagcatgacccacaccggcgagcccggcttcatgctgtacatccccatcgagggcatggacttcatcggcagagacgccctgctgcagcagaagcagaacggcgtgtacaagagactgaccatgttcatcctggacgaccacgacagcgacctggacctgtggccctggtggggcgagcccatctacagaaacggccagtacgtgggcaagaccaccagcagcgcctacagctacagcctggagagacacgtgtgcctgggcttcgtgcacaacttcagcgaggacaccggcgaggagcaggtggtgaccgccgacttcatcaacagaggcgagtacgagatcgacatcgccggctacagattccaggccaaggccaagctgtaccccgtggccagcctgttcacccagaagagaagaaaggacgacatggagctgagcgccttcctggccctgcccccccccccccccaacatccacagcggcctgttcttccccagccaccccagcctgagcttcagctggtggcaggaggtgtgcctgaccggccagaagcaggccccctag

SEQ ID NO: 293917 - protein, 224 aa, Artificial Sequence
  derived and/or modified sequence
MSVGYANGIRVMSMTHTGEPGFMLYIPIEYALHVYNEVMSVGQKYGIRNAGYYALRSLRIEKFFAFWGQDINNLTTPLECGRESRVKLEKGMDFIGRDALLQQKQNGVYKRLTMFILDDHDSDLDLWPWWGEPIYRNGQYVGKTTSSAYSYSLERHVCLGFVHNFSEDTGEEQVVTADFINRGEYEIDIAGYRFQAKAKLYPVASLFTQKRRKDDMELSDLHGK

SEQ ID NO: 293918 - protein, 263 aa, Artificial Sequence
  derived and/or modified sequence
MAHEAMEYDVQVQLNHAEQQPAPAGMASSQGGPALLQPVPADVVSSQGVPSILQPAPAEVISSQATPPLLQPAPQLSVDLTEVEVLGEDTVENINPRTSEQHRQGSDGNHTIPASSLHSMPLEPGGCIDFQTENSSRHCLVTYRPDKNHTTIRSVLMEMSYRLDDTGNPICSCQPVHTFFGGPTCKLLTKNAIFQSPENDGNILVCTGDEAANSALLWDAASGSLLQDLQTDQPVLDICPFEVNRNSYLATLTEKMVHIYKWE

SEQ ID NO: 293919 - DNA, 210 bp, Artificial Sequence
  derived and/or modified sequence
atgatggtgctcacacctttctggttaggacgcgattgtcctagtaggggccagccgacattacgggagggcaaggggctctccgtcccgtttacctgcaagctgaacaacccacagagatacctcctctacttgacacacacccccaggcgtcagtactcaccagcctggtatcttcccggtaagctgggaattacccttacggtgtag

SEQ ID NO: 293920 - DNA, 792 bp, Artificial Sequence
  derived and/or modified sequence
atggcccatgaggccatggaatatgatgtgcaggtgcagctcaatcacgccgagcagcagccagcaccagctggcatggctagctctcaagggggtccagcactcttgcagcctgtgccagcagacgtagtttcgagtcaaggcgtaccaagcatcctccagccggctcccgccgaggtgattagctcacaggctacaccccctctccttcaaccggcaccccaactgagcgtggatctgactgaggtggaggttctcggggaggacaccgttgagaacattaatccccgcacctcagagcagcataggcagggatcagatggaaatcacacaattccagcctctagtttacactctatgcccctagaacccggaggctgcatcgacttccagaccgagaactcgtctagacactgtcttgtaacctatcgccccgacaagaaccacacaactattcggagcgtgttgatggagatgagctaccggttggacgacaccgggaatccgatttgcagctgtcagcctgttcatacttttttcggcggacccacatgtaaactccttactaaaaacgctatctttcagtctccggaaaacgacggcaatatccttgtctgcactggtgacgaggcagctaattcggccttgctgtgggacgcagcctccgggtctctgctccaggatctgcagacagaccaacctgtgctggatatctgccctttcgaagtgaaccgcaattcttacttagccactctcaccgagaaaatggtccacatatacaagtgggaatag

SEQ ID NO: 293921 - DNA, 792 bp, Artificial Sequence
  derived and/or modified sequence
atggcccacgaggccatggagtatgatgtgcaggtgcagctgaaccacgccgagcagcagcctgccccagctggcatggccagcagccagggcggccctgccctgctgcagcctgtgcctgcagatgtggtgagcagccagggcgtgcccagcatcctgcagcctgccccagctgaggtgatcagcagccaggccaccccacccctgctgcagcctgccccccagctgtctgtggacctgacagaggtggaggtgctgggggaggacacagtggagaacatcaaccccaggaccagcgagcagcaccggcagggcagtgatggcaaccacaccatcccagccagcagcctgcacagcatgcccctggagcccggcggctgcatcgacttccagacagagaacagcagccgccactgcctggtgacctacagaccagacaagaaccacaccaccatccgctctgtgctgatggagatgagctaccgcctggatgacaccggcaaccccatctgcagctgccagcctgtgcacaccttcttcggcggccccacctgcaagctgctgaccaagaatgccatcttccagagcccagaaaatgatggcaacatcctggtgtgcacaggagatgaagctgccaacagcgccctgctgtgggatgctgccagcggcagcctgctgcaggacctgcagacagaccagcctgtgctggacatctgcccctttgaggtgaacagaaattcctacctggccaccctgacagagaagatggtgcacatctacaagtgggagtag

SEQ ID NO: 293922 - DNA, 792 bp, Artificial Sequence
  derived and/or modified sequence
atggcccacgaggccatggagtacgacgtgcaggtgcagctgaaccacgcagagcaacagcccgcacccgcggggatggcgagttctcaggggggacccgctctgctgcagcccgtgcctgccgatgtcgtcagctcacagggagtcccaagcattctgcagcctgcccccgctgaggtaatctcttcacaggcgacccctccccttctgcagcccgccccccagctctccgtcgatctcaccgaggtggaagtgctgggcgaggacacagtcgagaatattaatcctcggaccagtgagcaacaccgccaaggaagtgatggtaatcacacaataccagcgtccagcctgcactcaatgcccctcgaaccaggggggtgcatagattttcagactgagaattcctcacgccattgcctcgtaacctaccgccccgataagaaccacaccacaatccgttccgttttaatggagatgtcataccgcctggacgacaccggaaaccccatctgctcctgtcagcctgtgcatactttcttcggcggcccaacatgcaaacttctgaccaaaaatgccatcttccagtcacctgagaacgacggaaatattttggtttgtacaggcgacgaagccgcgaactcagccctcctctgggacgcggctagcgggtctcttctgcaggatttgcaaaccgatcagcctgtgctggacatctgccccttcgaggtgaatcgtaacagctatctcgctacacttaccgaaaagatggtacacatctacaaatgggaatag

SEQ ID NO: 293923 - DNA, 792 bp, Artificial Sequence
  derived and/or modified sequence
atggcacacgaagcgatggagtatgacgtgcaggtgcagcttaatcatgctgagcagcagcccgcacccgctggtatggcttcctcgcagggaggcccagcactccttcagccagtgcctgctgacgtggtgtcaagccagggagtgccatctatcctgcaacccgctccggcagaggtaatcagcagccaggccactccgccactgctacagccagctccgcagctgagtgtcgatttgactgaagttgaggtgctgggagaggataccgtggagaacattaatcccaggacctcagagcagcataggcagggatccgacggaaatcacactatcccagcctcctccttgcattccatgcctcttgagccgggaggctgcatcgattttcagacagagaatagctcaaggcattgcctcgtgacatatcggccagacaaaaaccataccactatacggagcgtactcatggagatgtcctatagattagatgatactgggaacccaatttgcagctgccagcccgtacatactttcttcgggggacccacctgtaagctgttaacgaagaacgcaatttttcagagccctgagaatgatggtaacattctcgtatgtaccggcgatgaggccgctaattctgccctgctgtgggacgctgcttctgggtcactccttcaggacttgcagacagatcagcctgtcctggacatatgcccattcgaagtgaatcgtaattcttatctagccaccctgaccgaaaagatggtccacatatataagtgggaatag

SEQ ID NO: 293924 - DNA, 3321 bp, Artificial Sequence
  derived and/or modified sequence
atggctcatgaagcaatggaatatgatgttcaggtgcagttaaatcatgccgaacaacagccagctcctgctggcatggccagcagccaagggggaccagccctcctccagcctgttcctgctgatgtggtcagcagccagggggtaccatccatcctccagccagctcctgctgaggtgatcagcagccaagcgacaccacccctgctccagcctgctccgcaactgtctgttgacctgacagaagtggaggtcttgggagaagacactgtggagaacatcaatccaagaacttcagaacaacataggcagggatctgatggtaatcacaccatcccagcatcttcgttgcattcaatgcccttggagccagggggctgcatagactttcagacagagaacagctcccggcactgtcttgtgacctacaggcctgataaaaatcacaccaccatacgaagtgtgctgatggaaatgtcctaccgactggatgacactggaaatccaatctgctcctgccagcctgtacatacattttttggaggacctacttgcaaactattgaccaaaaatgccattttccaaagcccagagaatgatggcaacatcctggtgtgtactggggatgaagcagcaaattctgccctgctgtgggatgctgccagtggctcgttgctccaggacctacagaccgatcagcctgtgttggacatctgcccatttgaggtgaaccgtaacagctacttggctaccttaacagagaagatggtccacatctataagtgggagtgactgtggtctcgaaaccttgaaggcatgctgctggttagatgttgtttgctagcgcctagcagccccaagcaagatccctgtttattgtctgcagtctagaacattgggaatcatggtttgtttgcattagtatgattctaggaccctaggtcactgagacactacagattgtgtatctgttatgtccactaaaagagtaattgatgggtactttatctacattatccatttcttgggtttaaagccttcattaaccattattgtatgttggaaattcttattttctttattttctgtgtgactttctggaccttagagagtgtcctctcatcatctaggatgtgagtgggcatcaagcattttctggggaatatgacatcccatctgagttgtcctgtcacttaagtatccttgaagggactaaccatcgtcttggtactgatttgatgcaacgtagatgtaaaagagtattattcagttgaacacaagagggcactgtagaaccttgtgtccggtttatttctgaccttgaaggctgacaatcttttagtaacttgtctcatctccacacaagtgtgtgatagcacacctgggtgtgctttgtggcaataacacttgtgttccaggtgtgaagtgctgggacattggcaggcccagtgatggaagcagctagtgaacgattccctttgctaatgcctagtgcattaagttcattgctttgcgaaaggtaaggaaagaggccagttgtttgagcggtggggaagattttgttttttctagccagcttaggatctcaggattggttttatccaagctagtgctttgaagaacactatctcttgccaggaaaagatgagtgataggtcaaagcttttacttgagtctcccctagtgtcagagatcaggagaaaagacataagagaatttacaaaagctattcagactgctattgaaaacatgagaagaacttgtctcccattttgagagttcctatctaaataaagccaattcctcagactgaggggctgttcttaagtgttctttatacattccagttatccagttaaagccttccccatgtgaagctgatgtttgattccagtttcctttgatttgcctccctaaccttttctagggctcagtttgtatttctttgccttgcctcagactactttgccaacccacttccacaacagaatatgcttcaagatgtgggcaggtcagtgtcctgttcatgggagaaaatggcttaacagtctgattttctcaaatgattattgaagagttgttatcgtttttattataaaacacttctgacctgtcaattcaagagctgtttctaggatctttctctccggcaaggggttgttgcactagatttccccagagttccaagttctagttgtgccttttaatgaccctttaatattttaggacataattttttccttttttaaatttttttgtagaaatagatgtttcactacgttgtccaggctggtcttggactcctggcctcaagcaatcctcccacctcagcctcctaaagtgccaaaattataggcgtgagccactgcacccggcccctatttgaagacgtcttttgtaaaagctagcttctagaacctgagaaaagctcttttctcagaggagatactccttttgatatgttaatgattaagagtggttgcccaggcctagtttcagtggcagaataggattggaattaaaaagcagaactcatctggcttcagcagattgccaccaagaggatacaggtggtcaggtcctggctggctttgtctttgggcctgggcaggcttaggatttgactttctttgaagtacctgatgctgattgattccactaatagtaggaagcaagagacttaactatgagggacgttatgtgaatcttaagtcttaccagtccttgcattagtacattaaatttggatgttttggaagcaaattcatacgatcgtgagtgatttctccaaagaaaaaaagccttgtccagcctgaccaacatggtgaaaccccatctctactaaaaatacaaaaattaactgggtgcagtggtgcgcatgcctgtagtcccagctacttgggaggctgaggcaggagaattgcttgaaccctgggaggcagaggttgcagtgagtcgagatcgcgccactgcactccagcctcggtgacagagcaagactccatctcaaaaaaaacaaacaaacaaaaaaaaaccctgatgccattcccagtccccgttgtaggacatcacatttataaatccaggctttagtcttctgggctccaccagtctctgccccaccatattcctttgtcactacctctaagtttttttccccacttgaggatttggagttaaacgaactcaaaatgtcttgtcattgtatgtattcttgcccctgctttgaaaacagggccatgggaactctgtttatgccctgttttaatgtttctgttttatgttttactgttaatatgaaaataaagaatttgctatgta

SEQ ID NO: 293925 - DNA, 792 bp, Artificial Sequence
  derived and/or modified sequence
atggcccacgaggccatggagtacgacgtgcaggtgcagctgaaccacgccgagcagcagcccgcccccgccggcatggccagcagccagggcggccccgccctgctgcagcccgtgcccgccgacgtggtgagcagccagggcgtgcccagcatcctgcagcccgcccccgccgaggtgatcagcagccaggccaccccccccctgctgcagcccgccccccagctgagcgtggacctgaccgaggtggaggtgctgggcgaggacaccgtggagaacatcaaccccagaaccagcgagcagcacagacagggcagcgacggcaaccacaccatccccgccagcagcctgcacagcatgcccctggagcccggcggctgcatcgacttccagaccgagaacagcagcagacactgcctggtgacctacagacccgacaagaaccacaccaccatcagaagcgtgctgatggagatgagctacagactggacgacaccggcaaccccatctgcagctgccagcccgtgcacaccttcttcggcggccccacctgcaagctgctgaccaagaacgccatcttccagagccccgagaacgacggcaacatcctggtgtgcaccggcgacgaggccgccaacagcgccctgctgtgggacgccgccagcggcagcctgctgcaggacctgcagaccgaccagcccgtgctggacatctgccccttcgaggtgaacagaaacagctacctggccaccctgaccgagaagatggtgcacatctacaagtgggagtag

SEQ ID NO: 293926 - protein, 339 aa, Artificial Sequence
  derived and/or modified sequence
MDETVAEFIKRTILKIPMNELTTILKAWDFLSENQLQTVNFRQRKESVVQHLIHLCEEKRASISDAALLDIIYMQFHQHQKVWEVFQMSKGPGEDVDLFDMKQFKNSFKKILQRALKNVTVSFRETEENAVWIRIAWGTQYTKPNQYKPTYVVYYSQTPYAFTSSSMLRRNTPLLGQALTIASKHHQIVKMDLRSRYLDSLKAIVFKQYNQTFETHNSTTPLQERSLGLDINMDSRIIHENIVEKERVQRITQETFGDYPQPQLEFAQYKLETKFKSGLNGSILAEREEPLRCLIKFSSPHLLEALKSLAPAGIADAPLSPLLTCIPNKRMNYFKIRDK

SEQ ID NO: 293927 - DNA, 1020 bp, Artificial Sequence
  derived and/or modified sequence
atggacgaaacagttgcggaattcataaagagaacaatactgaagatccccatgaatgaactgaccaccattcttaaagcatgggactttctgtccgaaaaccagctgcagacagtgaatttcaggcagaggaaggaaagcgtggtgcaacacttgattcacttgtgtgaagaaaaaagggcgagcatttcagacgctgccctcctagacattatctacatgcagttccaccagcaccaaaaagtgtgggaggtcttccagatgagtaagggccccggggaggatgttgaccttttcgatatgaagcagttcaagaacagctttaagaaaatcctacagagggcactgaaaaatgtgaccgtgtcattcagagagactgaggaaaatgctgtctggatccgtattgcttggggaactcagtatacaaagcccaaccaatacaaacccacttacgttgtgtattatagccagaccccatatgcttttacatcttcgtccatgctgcgaagaaatacccctctgttgggtcaagcccttacaatcgcgagtaagcatcatcagatagttaagatggacctccgaagcagatacttagattctttaaaagcaatcgttttcaagcaatacaatcagacatttgagactcacaattcgacaacaccactgcaggaacggagcttggggctagacattaatatggacagccggattatacacgagaacatcgtcgagaaagagcgcgtccaacgtataacccaggaaacattcggggactacccacagccccagctggaattcgctcagtataagctggagactaagttcaagagcggcctcaacggcagcatcttggcggagagggaggaacccctccgctgcctgataaagttttcaagtccacacctgctagaggccctaaagtctctggccccggctggaatcgctgacgctcctctgtctcccctgctgacatgcatccctaataagagaatgaattacttcaagataagggataaatag

SEQ ID NO: 293928 - DNA, 1020 bp, Artificial Sequence
  derived and/or modified sequence
atggatgagaccgtggccgagttcatcaagaggaccatcctgaagatccccatgaatgagctgaccaccatcctgaaggcctgggacttcctgtctgagaaccagctgcagacagtgaacttccggcagaggaaggagagcgtggtgcagcacctgatccacctgtgtgaggagaagagggccagcatcagtgatgctgccctgctggacatcatctacatgcagttccaccagcaccagaaggtgtgggaggtgttccagatgagcaagggccctggagaagatgtggacctgtttgacatgaagcagttcaagaacagcttcaagaagatcctgcagagggccctgaagaatgtgacagtgtccttccgggagacagaggagaatgctgtgtggatcagaattgcctggggcacccagtacaccaagcccaaccagtacaagcccacctacgtggtgtactacagccagaccccctatgccttcaccagcagctccatgctgcggaggaacacccccctgctgggccaggccctgaccatcgccagcaagcaccaccagatcgtgaagatggacctgcggagccgctacctggacagcctgaaggccatcgtgttcaagcagtacaaccagacctttgagacccacaacagcaccacccccctgcaggagaggagcctgggcctggacatcaacatggacagccgcatcatccacgagaacatcgtggagaaggagcgggtgcagaggatcacccaggagaccttcggggactacccccagccccagctggagtttgcccagtacaagctggagaccaagttcaagagcggcctgaatggcagcatcctggccgagcgggaggagcccctgcgctgcctgatcaagttcagcagcccccacctgctggaggccctgaagagcctggccccagctggcattgctgatgcccccctgagccccctgctgacctgcatccccaacaagaggatgaactacttcaagatccgggacaagtag

SEQ ID NO: 293929 - DNA, 1020 bp, Artificial Sequence
  derived and/or modified sequence
atggacgagaccgtggccgagttcatcaagcggaccatcctgaagattcccatgaacgagctcacaaccatcctcaaggcttgggattttctctctgaaaatcaactgcagaccgtgaattttagacagcgaaaggagagcgtcgtgcagcatttaatccacctttgcgaggagaaacgggcgagcattagtgacgcagccttgctggatatcatatacatgcagttccaccagcaccagaaagtgtgggaggtgtttcagatgagtaagggtccaggcgaggatgtggacctgtttgatatgaagcaattcaaaaattcttttaagaagattctccagcgtgctcttaaaaatgtgaccgttagtttcagagagactgaggagaacgcagtctggatacgtatcgcctgggggactcaatacaccaaaccaaaccaatacaagcccacctatgtcgtgtattactcgcagaccccatacgccttcactagcagtagcatgttacgaaggaacactcccctcctcgggcaggcccttactatcgctagcaaacaccaccaaattgtgaaaatggacctgcgcagcaggtacctcgatagtctcaaggctattgtctttaagcagtacaaccagacatttgagactcataatagcacaaccccattgcaggagaggtccctggggctggacattaatatggatagccggattatccacgagaacattgtggaaaaagagagagtgcagcggatcacgcaggaaaccttcggggattacccacagccacagctagaatttgcccagtacaagctggagacgaaatttaaatctggcctgaacgggtccatcctggctgagagagaggagccattgcggtgtctgattaaattctcctctccccacttgttggaggcactgaaatcccttgcgccagctgggatcgcagatgcgccccttagccctctgctcacctgcattccgaataaacgcatgaactactttaagatccgcgacaagtag

SEQ ID NO: 293930 - DNA, 1020 bp, Artificial Sequence
  derived and/or modified sequence
atggatgaaaccgtggccgagttcataaagcgcaccatcctgaagatacctatgaacgagctcaccaccatcctaaaggcatgggacttcctttccgaaaaccaactgcagaccgtaaacttccgccagaggaaagagtcagtcgtgcagcacctcatacatctgtgcgaagagaagcgcgcaagcatctcagacgctgcactgctcgacattatatacatgcagtttcatcaacatcagaaggtgtgggaagtcttccaaatgtctaaggggcctggagaggacgtggacctcttcgatatgaagcagttcaagaattctttcaagaagatcctgcagcgcgcactcaagaatgtgactgtatccttccgtgaaacagaagaaaatgctgtgtggattcgcattgcttgggggactcagtacactaaacctaatcaatacaaacctacttatgttgtgtattactcccagactccctatgcatttaccagcagcagtatgctgagacgcaacacacccctgctgggccaggccttgaccatagcttcaaagcaccatcagattgttaaaatggacctccgttctaggtacctggatagtctgaaagccattgttttcaaacaatataatcagacatttgagactcataactcaacaaccccacttcaagagagatcgctggggctggatattaacatggactcgcgaatcattcacgagaatatcgtggaaaaggagagagtgcagagaattactcaggagaccttcggcgactatccccagccccaactggagttcgcccaatataagttggagacaaagttcaagtccggacttaacggcagtatactcgcggaacgcgaggagccgctgagatgcctaatcaagttcagttctccccatctgctggaagcgctgaaaagtttggctccagcaggaattgccgacgccccactgtcccccctactgacctgtattccaaataagcggatgaattactttaagattcgggacaaatag

SEQ ID NO: 293931 - DNA, 2481 bp, Artificial Sequence
  derived and/or modified sequence
gagcgacgcccacggcctgtctcggccaccagcgtgttccagcgagcgcccagccacctcgctcgcagcctccccagcgcagcagcccggctgtgggcctgcggcagccgggtcttcctggtccccacctcctggggccgacgggcggcaggaaggggctcggcgggacgcgccatcagggacctgaggaggaacaacggaacgcgttcggaacggcctggactcccgagactcacccgactcgtggccacaccgggagaactgaagcggcagtagccggcggagacgcccgacccgaaggccggctgctagggagcagacagctgaaccgcttgccagacgccgaaacccagtgacgccctccaccgctccaccgtgctcccggctcctcgcccccgccgcccgcgggccccaaggcgcatgcgccgcctgtcctggaggggcccatttccgtccgtcgtggggggaggcacagtgagtccactggggcacggcagcgtctaagccacaagccgagcacataagccaggtcctaacggagcctatgtgtaagtccactactggtgcaaggttgcacacttctaagaagagcggcgtggggggctcggcgaccttcgcttcagtcgctcccccgtgcagtcccctgtgcccaagacacagcctgatgcttgtgctccggtgggcggagcttggaggcggcgggaactgcaattggtggctttgaaggcgcggcgagcgggaacagctcttgaggagtgagactgcaggagatgtgggccgtgccaaagagatggatgagactgttgctgagttcatcaagaggaccatcttgaaaatccccatgaatgaactgacaacaatcctgaaggcctgggattttttgtctgaaaatcaactgcagactgtaaatttccgacagagaaaggaatctgtagttcagcacttgatccatctgtgtgaggaaaagcgtgcaagtatcagtgatgctgccctgttagacatcatttatatgcaatttcatcagcaccagaaagtttgggaagtttttcagatgagtaaaggaccaggtgaagatgttgacctttttgatatgaaacaatttaaaaattcgttcaagaaaattcttcagagagcattaaaaaatgtgacagtcagcttcagagaaactgaggagaatgcagtctggattcgaattgcctggggaacacagtacacaaagccaaaccagtacaaacctacctacgtggtgtactactcccagactccgtacgccttcacgtcctcctccatgctgaggcgcaatacaccgcttctgggtcaggcgctgacaattgctagcaaacaccatcagattgtgaaaatggacctgagaagtcggtatctggactctcttaaggctattgtttttaaacagtataatcagacctttgaaactcacaactctacgacacctctacaggaaagaagccttggactagatataaatatggattcaaggatcattcatgaaaacatagtagaaaaagagagagtccaacgaataactcaagaaacatttggagattatcctcaaccacaactagaatttgcacaatataagcttgaaacgaaattcaaaagtggtttaaatgggagcatcttggctgagagggaagaacccctccgatgcctaataaagttctctagcccacatcttctggaagcattgaaatccttagcaccagcgggtattgcagatgctccactttctccactgctcacttgcatacccaacaagagaatgaattattttaaaattagagataaataagacgtgcgtggtttcttaagcacagctcctccttcttgatattgcacatgcacttcagttcatggctagctgtatagcttccgtctgtaaacttgtattttcaagaatccttggtattgaatttttagaaatgctcacataattgttgggactgattcattcctccacgatatgcctcctctctctgatatcctgctaactgtagccgttgtggcatttgagatgacaggacatatatatatatggccccacacttgaccttgagtgcctgaatgctctgaaatcaagcatatggcacagcgctcaagacttttgggtttgtgtccttttttctatggctgtctcttctcaattctggagaggtctggttccagtggctggtttccagggattgattcttaagctctggatcacagagagaagcaacaaggaactatactcaactcaaaactttttaggagaatcatgaaattggtctattcaaaggatggagttgagtccattctgttattgttgcaagaggttgcatatttggtgagtcagttatataaaatagtgttcttattgtaaatatgatacttctcataatctattttatcatgtgtataacattcaaactgacaaatatattgacttatgaataaaggtgtcaaaaaactggcacatcagtt

SEQ ID NO: 293932 - DNA, 1020 bp, Artificial Sequence
  derived and/or modified sequence
atggacgagaccgtggccgagttcatcaagagaaccatcctgaagatccccatgaacgagctgaccaccatcctgaaggcctgggacttcctgagcgagaaccagctgcagaccgtgaacttcagacagagaaaggagagcgtggtgcagcacctgatccacctgtgcgaggagaagagagccagcatcagcgacgccgccctgctggacatcatctacatgcagttccaccagcaccagaaggtgtgggaggtgttccagatgagcaagggccccggcgaggacgtggacctgttcgacatgaagcagttcaagaacagcttcaagaagatcctgcagagagccctgaagaacgtgaccgtgagcttcagagagaccgaggagaacgccgtgtggatcagaatcgcctggggcacccagtacaccaagcccaaccagtacaagcccacctacgtggtgtactacagccagaccccctacgccttcaccagcagcagcatgctgagaagaaacacccccctgctgggccaggccctgaccatcgccagcaagcaccaccagatcgtgaagatggacctgagaagcagatacctggacagcctgaaggccatcgtgttcaagcagtacaaccagaccttcgagacccacaacagcaccacccccctgcaggagagaagcctgggcctggacatcaacatggacagcagaatcatccacgagaacatcgtggagaaggagagagtgcagagaatcacccaggagaccttcggcgactacccccagccccagctggagttcgcccagtacaagctggagaccaagttcaagagcggcctgaacggcagcatcctggccgagagagaggagcccctgagatgcctgatcaagttcagcagcccccacctgctggaggccctgaagagcctggcccccgccggcatcgccgacgcccccctgagccccctgctgacctgcatccccaacaagagaatgaactacttcaagatcagagacaagtag

SEQ ID NO: 293933 - protein, 611 aa, Artificial Sequence
  derived and/or modified sequence
MRQGYGVRQSVPYGMAAVIRSPLRTSINSLRSEHTNGTALHPDASPAVAGSPAVSRGGFVLVAHSDSEILKSKKKGLFRRSLLSGLKLRKSESKSSLASQRSKQSSFRSEAGMSTVSSTASDIHSTISLGEAEAELAVIEDDIDATTTETYVGEWKNDKRSGFGVSQRSDGLKYEGEWASNRRHGYGCMTFPDGTKEEGKYKQNILVGGKRKNLIPLRASKIREKVDRAVEAAERAATIAKQKAEIAASRTSHSRAKAEAALTAAQKAQEEARIARITAKEFSPSFQHRENGLEYQRPKRQTSCDDIEVLSTGTPLQQESPELYRKGTTPSDLTPDDSPLQSFPTSPAATPPPAPAARNKVAHFSRQVSVDEERGGDIQMLLEGRAGDCARSSWGEEQAGGSRGVRSGALRGGLLVDDFRTRGSGRKQPGNPKPRERRTESPPVFTWTSHHRASNHSPGGSRLLELQEEKLSNYRMEMKPLLRMETHPQKRRYSKGGACRGLGDDHRPEDRGFGVQRLRSKAQNKENFRPASSAEPAVQKLASLRLGGAEPRLLRWDLTFSPPQKSLPVALESDEENGDELKSSTGSAPILVVMVILLNIGVAILFINFFI

SEQ ID NO: 293934 - DNA, 1836 bp, Artificial Sequence
  derived and/or modified sequence
atgaggcaagggtatggggtgcggcagagtgtcccatacgggatggcggccgtcataaggtcacctctcaggacctccatcaactctcttcgatccgagcacactaatggcactgccttgcacccagacgcatccccagccgttgccggttctcctgcagtaagcaggggaggatttgtgctcgtcgctcacagcgactctgaaatactcaagagcaagaagaaaggtcttttccggaggtctttactgtctggacttaagctgcggaagtctgaatctaagagcagcctggcatcccaacgtagcaaacagtcttctttccggtccgaggcgggaatgtcgactgtgtccagtaccgcctctgatatacattcaactatttcccttggggaagcagaggccgaacttgcggtcatagaggatgacatagacgccacgacaacagagacgtatgtcggggaatggaagaacgacaaacggtcaggtttcggtgtcagtcagagaagtgatgggctgaaatatgaaggcgaatgggcttctaaccgcagacacggctatggctgcatgacttttccagacggaacaaaggaggaaggcaaatataagcaaaatattctcgtaggggggaaaaggaagaatctaattccactacgggccagtaaaattcgagagaaggtcgaccgggctgtcgaggcagctgagcgggcagctacaattgctaagcagaaggccgagattgccgcgtctcgaacatcacatagcagagctaaagccgaagccgcacttaccgctgcccagaaggctcaagaagaggctagaattgcgcgaattacagccaaggagttttcaccaagttttcagcaccgggagaatggtctggaataccaacggccaaagagacagacctcatgcgatgacattgaggttctctccactggcactccactgcagcaggaaagccccgagctgtaccgcaagggcaccaccccctccgaccttaccccagatgactccccactacaaagcttccctacatctcccgccgccacccctcccccagcacctgcggctcggaataaggtcgcccacttctcgagacaagtatctgtggacgaagagcgcggaggggatatccagatgctgctggaggggcgcgcgggcgattgtgccaggagttcatggggagaggaacaggccggcgggtcacgcggagtgagaagtggagcgttacgcggaggactgctcgtggatgactttcgcactagagggtccgggaggaagcagcctgggaatcctaaacctcgggaaagacgcacagagagtccaccggtgtttacatggacttctcatcacagggccagtaaccattcacccgggggctctcgcctgctggaactgcaagaagagaaactgagcaattataggatggaaatgaagcctctccttcggatggaaacccatccacaaaaacgtcggtactcaaaaggcggtgcatgtcgaggtttgggcgacgaccatcgcccagaagaccgtggcttcggagtacagaggctgagatcaaaggctcagaataaagaaaactttagaccagcttcttcagctgagccagccgtgcaaaaactcgccagtcttcgcctgggcggtgcagagccaaggctactgagatgggatctgactttttctccccctcagaagtcactgcctgttgccctcgaatctgacgaggagaatggagatgagctgaagtcttcaaccggctcagcacctattttagtcgttatggtaatattgttgaacattggcgtcgctatcctctttatcaactttttcatttag

SEQ ID NO: 293935 - DNA, 1836 bp, Artificial Sequence
  derived and/or modified sequence
atgaggcagggctatggagtgcggcagagcgtgccctacggcatggctgctgtgatccgcagccccctgcggaccagcatcaacagcctgcggtctgagcacaccaacggcacagccctgcacccagatgccagccctgctgtggccggcagccctgctgtgtccagaggaggctttgtgctggtggcccacagcgacagcgagatcctgaagagcaagaagaagggcctcttcagaagaagcctgctgagcggcctgaagctgaggaagtctgagagcaagagcagcctggccagccagaggagcaagcagagcagcttccgctctgaggccggcatgagcacagtgagcagcacagccagtgacatccacagcaccatcagcctgggggaggccgaggccgagctggccgtgattgaagatgacattgatgccaccaccacagagacctacgtgggggagtggaagaatgacaagaggagcggctttggagtgtcccagaggagtgatggcctgaagtatgaaggagagtgggccagcaacagaagacatggctacggctgcatgaccttcccagatggcaccaaggaggagggcaagtacaagcagaacatcctggtgggcggcaagaggaagaacctgatccccctgcgggccagcaagatccgggagaaggtggacagagctgtggaggccgctgagcgggccgccaccatcgccaagcagaaggccgagattgctgccagcaggaccagccacagccgggccaaggccgaggccgccctgacagctgcccagaaggcccaggaggaggcccgcatcgcccgcatcacagccaaggagttcagccccagcttccagcaccgggagaatggcctggagtaccagaggcccaagaggcagaccagctgtgatgacatcgaggtgctgagcacaggcacccccctgcagcaggagagccctgagctgtacaggaagggcaccacccccagcgacctgaccccagatgacagccccctgcagagcttccccaccagccctgctgccaccccacctccagccccagctgccaggaacaaggtggcccacttcagccggcaggtgtctgtggatgaggagcggggcggggacatccagatgctgctggagggccgggccggggactgtgcccggagctcctggggcgaggagcaggccggcggcagccggggcgtgcgcagcggggccctgcggggcggcctgctggtggatgacttccgcacccggggcagcggcaggaagcagcccggcaaccccaagccccgggagaggagaacagagagcccccctgtgttcacctggaccagccaccaccgggccagcaaccacagccctgggggcagccggctgctggagctgcaggaggagaagctgagcaactacaggatggagatgaagcccctgctgaggatggagacccacccccagaagaggcgctacagcaaaggaggagcctgccggggcctgggagatgaccacaggccagaagatcggggctttggagtgcagaggctgcggagcaaggcccagaacaaggagaacttccggcctgccagcagcgctgagcctgctgtgcagaagctggccagcctgcggctgggcggcgctgagccccggctgctgcgctgggacctgaccttcagccccccccagaagagcctgcctgtggccctggagagtgatgaggagaatggagatgagctgaagagcagcactggaagtgcccccatcctggtggtgatggtgatcctgctgaacatcggcgtggccatcctcttcatcaacttcttcatctag

SEQ ID NO: 293936 - DNA, 1836 bp, Artificial Sequence
  derived and/or modified sequence
atgcggcagggctacggcgtgcggcagagcgtgccctacggcatggcagctgtcatacggagccccctgcggacgagcattaatagccttcgttcagaacacacaaatggtactgcgctgcatccagatgcgagccctgcggtggcaggctcccccgccgtgtcaagagggggatttgttctggtggcacattcggatagtgagatccttaaaagtaagaaaaaaggtctctttcggaggtcactgctgtctggcctgaagctcaggaagtccgagagtaaaagctcacttgcctctcaacggagcaaacagtcgtcctttcgaagcgaggctggtatgtccaccgtatcaagtacggcatcagacattcatagcacaattagtctgggcgaggctgaggcagagttggccgttattgaggatgacatcgatgccacaacaaccgaaacttacgtgggagaatggaaaaatgacaagcgttccgggttcggcgtgagccaacgctctgatggactaaagtatgagggcgaatgggctagtaataggcggcacggctacggctgcatgacttttccagacgggacaaaagaagaaggaaagtacaagcagaacatcctggttggtgggaagagaaagaacctgatccccctacgggcctcaaagattcgggagaaggtagatcgcgccgtcgaagccgcagaacgtgccgccacaatagcaaaacagaaagccgagatcgccgcgtcacgcaccagccatagtagggcgaaggcggaagccgctttaactgcagctcagaaggcccaggaagaggcgaggatcgcccgcataaccgcaaaggagttttcccctagcttccagcaccgtgaaaacggcctcgagtaccagcgccctaaaagacagacttcatgtgatgatatcgaggttctgtccacgggaacacctctacaacaggaaagtccggagctataccgcaagggcaccacacctagcgatttgactcccgatgactcccccctacagtcttttcccacctctcccgccgcaacccctccgcctgcaccggctgcccgcaacaaggtggcccacttctccagacaggtcagcgtggatgaggaacgcggaggggatattcaaatgctcttggagggcagggctggggactgtgctagatctagctggggggaggagcaagctggcggttcccgaggcgttcgatctggagcattgcggggaggtctgttggtagatgatttcaggactaggggttctggacgcaagcaacccggaaatcccaaacctagggagcggagaactgagagcccccctgtgtttacctggactagccatcacagagcctctaatcactcaccagggggatcaagactgctagagttacaggaggaaaagctgtcgaattatagaatggagatgaaacctcttctaagaatggaaacacatccccagaaacggcggtactccaaggggggtgcctgtaggggccttggggacgaccaccgccctgaagatcggggtttcggagtgcagaggcttagatccaaggctcagaataaggagaattttcggccggcctcatcagccgagccagctgtacagaaactcgcatcattgaggctgggtggtgccgaaccccggcttctgcgatgggacctaacattctccccgcctcaaaagtcacttccagtggcactggagtccgatgaggagaacggcgatgagctgaagtcctctacaggctctgctccaattctggttgtaatggtcattttgttgaacatcggggttgccattctgtttatcaacttcttcatctag

SEQ ID NO: 293937 - DNA, 1836 bp, Artificial Sequence
  derived and/or modified sequence
atgagacagggctatggggtcagacagagcgtgccatacggcatggcagccgtgatacggagccctctgagaacctccattaactccttgcggagcgaacacacgaacgggaccgcactgcaccccgatgcttcccctgcagtggctggatccccagcggtgagccgtgggggattcgtactggttgcccactctgacagcgaaatcctcaagtctaagaaaaagggactgttccgcagatccctgctctctggcctgaagttgcgaaagtccgagtccaaaagctcactggcatcacagcgcagcaagcagtcctctttcaggtccgaggcgggaatgtcaactgtgagctccaccgcttctgacatccactccaccatcagcttaggcgaagcagaggccgagctcgcggtgattgaggatgatattgatgccacgacaacagagacatatgttggggaatggaagaacgacaaaagaagtggcttcggggtgtcccagagaagcgatggactcaagtacgagggagagtgggcttctaataggcggcatggctatgggtgtatgacatttcctgacgggactaaagaggagggaaaatacaagcaaaacatcctggtgggaggcaagcggaagaacctgatccctttacgagctagcaagattcgggagaaagtggatcgggcagtcgaagcagctgagcgcgctgctaccatagctaagcagaaggcagaaattgccgctagtcgcactagccattcaagggcgaaggctgaggcagcgcttaccgccgctcagaaggcacaggaagaggcaaggattgctcgcatcacggctaaggaattttcaccatcatttcagcacagggagaatggtctagagtaccagagaccaaagagacagacctcgtgcgatgacattgaggttttatcaacaggaacacctcttcagcaggagtctcccgaactttaccgtaagggcactacgccttcagacctcacacctgacgattcgcccttgcagtccttccccacgtctcccgctgccactcccccacccgctcccgcagccaggaacaaagttgctcactttagtagacaggtctctgtggatgaggagaggggcggagatatccagatgctactggaaggacgggctggtgactgcgccaggtcaagctggggggaggagcaagccggaggcagcagaggggtaagatcaggagcactgcgcggtggattgcttgttgacgacttccgtacgcggggttcgggcaggaagcagcccggaaaccccaaacctagggaacgcaggaccgaatctcctcccgtttttacatggactagccaccatcgagcgagcaaccactcaccaggtggtagcagactgctcgagctgcaagaagagaagctcagtaattatagaatggagatgaagccccttctacgcatggagacgcacccacaaaaacgcaggtatagtaagggcggtgcttgtcggggtctcggggatgaccatcggccagaggatcgcggtttcggagtgcagcgccttcggtctaaagcacagaacaaggagaattttaggccagccagcagcgccgaacccgcagttcagaaattggcctcgctgcggctaggtggggcagaacccaggctcctccgctgggaccttactttctccccccctcaaaaaagtttgcctgtagcgcttgaatccgatgaggagaacggcgatgaacttaagagttccaccgggtccgcccctattctggtggtaatggtgatactacttaatatcggtgttgctatcctcttcataaacttttttatttag

SEQ ID NO: 293938 - DNA, 1836 bp, Artificial Sequence
  derived and/or modified sequence
atgagacagggctacggcgtgagacagagcgtgccctacggcatggccgccgtgatcagaagccccctgagaaccagcatcaacagcctgagaagcgagcacaccaacggcaccgccctgcaccccgacgccagccccgccgtggccggcagccccgccgtgagcagaggcggcttcgtgctggtggcccacagcgacagcgagatcctgaagagcaagaagaagggcctgttcagaagaagcctgctgagcggcctgaagctgagaaagagcgagagcaagagcagcctggccagccagagaagcaagcagagcagcttcagaagcgaggccggcatgagcaccgtgagcagcaccgccagcgacatccacagcaccatcagcctgggcgaggccgaggccgagctggccgtgatcgaggacgacatcgacgccaccaccaccgagacctacgtgggcgagtggaagaacgacaagagaagcggcttcggcgtgagccagagaagcgacggcctgaagtacgagggcgagtgggccagcaacagaagacacggctacggctgcatgaccttccccgacggcaccaaggaggagggcaagtacaagcagaacatcctggtgggcggcaagagaaagaacctgatccccctgagagccagcaagatcagagagaaggtggacagagccgtggaggccgccgagagagccgccaccatcgccaagcagaaggccgagatcgccgccagcagaaccagccacagcagagccaaggccgaggccgccctgaccgccgcccagaaggcccaggaggaggccagaatcgccagaatcaccgccaaggagttcagccccagcttccagcacagagagaacggcctggagtaccagagacccaagagacagaccagctgcgacgacatcgaggtgctgagcaccggcacccccctgcagcaggagagccccgagctgtacagaaagggcaccacccccagcgacctgacccccgacgacagccccctgcagagcttccccaccagccccgccgccacccccccccccgcccccgccgccagaaacaaggtggcccacttcagcagacaggtgagcgtggacgaggagagaggcggcgacatccagatgctgctggagggcagagccggcgactgcgccagaagcagctggggcgaggagcaggccggcggcagcagaggcgtgagaagcggcgccctgagaggcggcctgctggtggacgacttcagaaccagaggcagcggcagaaagcagcccggcaaccccaagcccagagagagaagaaccgagagcccccccgtgttcacctggaccagccaccacagagccagcaaccacagccccggcggcagcagactgctggagctgcaggaggagaagctgagcaactacagaatggagatgaagcccctgctgagaatggagacccacccccagaagagaagatacagcaagggcggcgcctgcagaggcctgggcgacgaccacagacccgaggacagaggcttcggcgtgcagagactgagaagcaaggcccagaacaaggagaacttcagacccgccagcagcgccgagcccgccgtgcagaagctggccagcctgagactgggcggcgccgagcccagactgctgagatgggacctgaccttcagccccccccagaagagcctgcccgtggccctggagagcgacgaggagaacggcgacgagctgaagagcagcaccggcagcgcccccatcctggtggtgatggtgatcctgctgaacatcggcgtggccatcctgttcatcaacttcttcatctag

SEQ ID NO: 293939 - protein, 297 aa, Artificial Sequence
  derived and/or modified sequence
MQEITKHFVVCHVDAPGQQVGASQFPQGYQFPSMEQLAAMLPSVVQHFGFKYVIGIGVGAGAYVLAKFALIFPDLVEGLVLVNIDPNGKGWIDWAATKLSGLTSTLPDTVLSHLFSQEELVNNTELVQSYRQQIGNVVNQANLQLFWNMYNSRRDLDINRPGTVPNAKTLRCPVMLVVGDNAPAEDGVVECNSKLDPTTTTFLKMADSGGLPQVTQPGKLTEAFKYFLQGMGYIAYLKDRRLSGGAVPSASMTRLARSRTASLTSASSVDGSRPQACTHSESSEGLGQVNHTMEVSC

SEQ ID NO: 293940 - DNA, 5116 bp, Artificial Sequence
  derived and/or modified sequence
gctgctcctgccgcttcgctccgcgctctcctgccgctccgctccgggtctcccgcgctcctctccccggctcggccgagcgcgctgccccgacgccgccacccagagccgggccgcgccgggcgccgagatgaaggtgctgggacaccggctggagctgctcacaggcctcctgctccacgacgtgaccatggccgggctgcaggagctgcgattccctgaggagaagccgctgctccggggccaggacgccaccgagctggagagctccgatgccttcctcttggctgcagacacagactggaaggcctcgggcgagctcgccacccagatccttgctgcccaggagaacagggcacggagcctgagatagacctagtgttctgctccccagagacccgagagccaagccccaaactggttgcctctgggaacgagggccgggtgggtctacaggaggtgggcatgtcaatgtcagcaagctgcctcctagccccgcttcctctccctggtggtctggagcccctggcagcagggtgagggtggggagggcagagctggtgtgtgcctgaccatacccctggccctgctatctgcccagggcccctggcccccggcccccaaactccattttcagcatgtggggaaaccccctgtatctgcgtgggcaaggtgggattttcatccctggtgggtggagaaggagcagccccttgaagcagggtgataacccaagttgccccagaaagcagcagctccccaggcctccacaaggttaagcgatggaaccttcctaatgggaaggctgggcgtgggggtctggtccccaagatgttgggcttggggccctctcgggccctccatactccccaaggtgtgggtcaagggctctagctgtctgggcagtgcccatgcaccctgccctgccccgcattggtaagctgtgcatgtctgtgacgaccctgtgtgtacctgacatgggtgagtctgtacgtgtggtctcggcttttgtattcggaggatcccgtgtgagctgcagctgttggcgtgtgcctatgtgctgggggcggatgcaggggctggggaccatcaaggatgatgtgtggctggggtgggaggagcagtgacagggctggggcaaggaggacttcagaagccaattggagccaggcttgtctcccagcagccaatatgggagctggggctcctggtaagcgagtggctgctcagaaaccctgcggggaggaggggctagctaggctgggccaggatccctgtataaatggcccaggagctgtgccccatcacagagccgaccatctcccactcgagctgcccccgccctctggacccgagtgactcaggcctttgtttgtccttcctggtagaggcgggttccctccctcggcaagatgccggagtgctgggatggggtgagtgagggcgctgcgggcatcaaggtgggccgggaggatggtgcatccttatgacccaccgcagggaggaagtgcccccctcaacccacatctggtggcagcccggccttcaaatagcctcaccctggggtcactgagacacggccagagtgctccaggttccctggtgatcctgtttgcaggagtggctgggggcagctgctagtcagagcccatagcaggggctggggggagcgtgtggttggggggtgggtgacatatctgcaggaaatggaacgtggaaggcactgtctgacttggctgcattgcccgtgtggacccgggcgctagtgcctgcatgtccctctgaccgtgtgccctctggtgtgcgcttggatggtgtctgccttggtgatgcctggggccatcaggccagggggcgggggtgtccttggtgagcccccgaggctgtgtgcccagtgtgcgtgccgggtctgtgcgtgcaggggctgccgtcccagtgggcggccgtctagcttgtttggatggctgcgccagtgtgatgggaaggacaggcggcctcttccttaggagccacctcacagttcccagggctctgctgcgccagccgggcagaggcaaggaggtctgggccacacaggaatgacagcctttcaggcaggggtccctgctggggaggaacgaggaggggttgcctgcctgccttattttgtaggtgggggaaggcaacgctggagccgtgaagctggcagggctaggggaccccaggtggagcccagggcacctcctctcgccggggcatcaggaacatgacatcgagacaccctacggccttctgcatgtagtgatccggggctcccccaaggggaaccgcccagccatcctcacctaccatgatgtgggcctcaaccacaaactatgcttcaacaccttcttcaacttcgaggacatgcaggagatcaccaagcactttgtggtgtgtcacgtggatgcccctggacaacaggtgggggcgtcgcagtttcctcaggggtaccagttcccctccatggagcagctggctgccatgctccccagcgtggtgcagcatttcgggttcaagtatgtgattggcatcggagtgggcgccggagcctatgtgctggccaagtttgcactcatcttccccgacctggtggaggggctggtgctggtgaacatcgaccccaatggcaaaggctggatagactgggctgccaccaagctctccggcctaactagcactttacccgacacggtgctctcccacctcttcagccaggaggagctggtgaacaacacagagttggtgcagagctaccggcagcagattgggaacgtggtgaaccaggccaacctgcagctcttctggaacatgtacaacagccgcagagacctggacattaaccggcctggaacggtgcccaatgccaagacgctccgctgccccgtgatgctggtggttggggataatgcacccgctgaggacggggtggtggagtgcaactccaaactggacccgaccactacgaccttcctgaagatggcagactctggagggctgccccaggtcacacagccagggaagctgactgaagccttcaaatacttcctgcaaggcatgggctacattgcgtacttgaaggaccgaaggctgagtggaggagcagtgccctcagccagcatgacccgcctggcacgctcccgcactgcatccctcaccagtgccagctcggtggatggcagccgcccacaggcctgcacccactcagagagcagcgaggggctgggccaggtcaaccacaccatggaggtgtcctgttgaagcccttgatcccgctgacgacgcccacgtcgaggccccaccgccatccttgcgccggctcatgttccctttagtttatttttgtgagggcaaaggggaggaaatggggttctgtttgaaaaaaatgaggggatcttagatgctgcagcagaacagtctccaggtgttttaaggggctcagtcctcctcatcccatctcactctccgtggtaacttagccaacttgacccctctcatcccactcccggcggcccaggcacagaagggcagggccatagggagggagattcgctacggatccaggccattcctgggtgagcccttgggcaggcatgtttggagatgagagaggcttcgagagggtgggtgctgggccacaggggtgcggggccagctcaggcactggcgtgggagccctgggagaccccttcccccaccctccaccaagcacacctgtttctgtctcatagcacatgtgacaatcatctggacaacagccacaagggggcgctcggaccaggcagccactttcctggtgctctctgggcccagctggtgctgtagggccacgcaggcaggggcgtcaaggggtttctctgcccaaggaagacagaacatggagaaccgtcagggcaggaaccccacagactgtcccttccagcccacactctgccacctcctggccctgtcccaattctgagccaaggcctccccgaggcagaagttgcctggtcctctgtccccacagtgacctgactgggggtgagggagaaggaggagagagcccatgtgtggtgtgtgtgcccctgagaacttcgtggtgactgcctttgggagcccgcaggtggccagaggcaggggtagctgagttcctggagaccccttttttgcccccaggttccccagagggcaacgccatcagtagcagtgtggtgtttcaggcagagctctggccaggctgtgccagtgtgtcccggacgcatcactaaggaagagagagtttatttagtcaactggcccaaggcagcgaggcttctacagtcccacaccccatagccgcctgggctggggcttactgggggctgaaggttctggacatgaacaagggtcaggtagaagagaaaggcttcccctacaccccagcctcctgctgtcccctgaagcccaggactgcgttgtatgctttccatccactcaccttaccccatagcatcttgcggcccagaaaccagagccatttgtctcagaccctaaatcaataatcacaaaccccaaaacgggagagagcagtgaaaacatgcagggctgtggacgggggaagggttgtggcgggtgttctgaggctgagaggacacctatatgcgtatttcctctacacacatcaccccccttctataatcttaagccatgactagcctggtggcgtgttagtttctgcccagttctaccccctcatgtgcttcttctgaatactgaatgtgactgtttgaaagctggtagaattcatccctcttactgtagataacactgcaaatcttggaattttgttttttgctgtttccagatgtatctataaatatctatacattatatgtgtgtgtgtgtgtgtgtgtgtgtgtgtacatcgggtcctcccatgtgtggtgttcttctggaggttgtctctttggtcaaggtgaacttttaatgtttattattttcttctccgcacaaagtaaagagcctaattttgtgtattctggtggctgctgtcatgagatgataaaatgtaaaacaaaactctagtcaacgtagaaagagttaactgtgctgaaaaactaataaagaacctaagaag

SEQ ID NO: 293941 - protein, 628 aa, Artificial Sequence
  derived and/or modified sequence
MLLARMNPQVQPENNGADTGPEQPLRARKTAELLVVKERNGVQCLLAPRDGDAQPRETWGKKIDFLLSVVGFAVDLANVWRFPYLCYKNGGGAFLIPYTLFLIIAGMPLFYMELALGQYNREGAATVWKICPFFKGVGYAVILIALYVGFYYNVIIAWSLYYLFSSFTLNLPWTDCGHTWNSPNCTDPKLLNGSVLGNHTKYSKYKFTPAAEFYERGVLHLHESSGIHDIGLPQWQLLLCLMVVVIVLYFSLWKGVKTSGKVVWITATLPYFVLFVLLVHGVTLPGASNGINAYLHIDFYRLKEATVWIDAATQIFFSLGAGFGVLIAFASYNKFDNNCYRDALLTSSINCITSFVSGFAIFSILGYMAHEHKVNIEDVATEGAGLVFILYPEAISTLSGSTFWAVVFFVMLLALGLDSSMGGMEAVITGLADDFQVLKRHRKLFTFGVTFSTFLLALFCITKGGIYVLTLLDTFAAGTSILFAVLMEAIGVSWFYGVDRFSNDIQQMMGFRPGLYWRLCWKFVSPAFLLFVVVVSIINFKPLTYDDYIFPPWANWVGWGIALSSMVLVPIYVIYKFLSTQGSLWERLAYGITPENEHHLVAQRDIRQFQMKTRQGRRRATNSCQISC

SEQ ID NO: 293942 - DNA, 1887 bp, Artificial Sequence
  derived and/or modified sequence
atgctcctggccaggatgaaccctcaggtccagcctgaaaacaacggtgctgatactggaccagaacaacccctccgtgcaaggaagacggccgagctgttggtggtaaaagaaaggaacggagtgcagtgccttctggccccccgggacggcgacgcccagcctcgggagacctggggcaagaaaatcgacttcctactgtcagtggtcgggttcgctgttgacctggctaacgtatggcgctttccctacttatgttataaaaacggaggaggggcattcctgataccgtacactcttttcttaattatagccggcatgcccttgttctacatggagctggcactcgggcagtacaatagagagggggccgctactgtctggaaaatttgcccattcttcaaaggggtgggctacgctgtgatcctcatagccctgtacgtcgggttttattataatgtgatcattgcctggtccttgtattacctattctctagctttacgttgaatttgccatggacagactgcgggcacacatggaactcacctaattgcacagacccaaaactgctgaacggcagcgttctgggcaatcacacaaagtactcaaagtataaattcactcccgctgccgaattctatgaaagaggcgtactccacttacacgagtcaagcgggattcatgacatagggctgcctcagtggcagctgctgttatgtctcatggttgtcgttatagttctctatttcagcctttggaagggtgtgaagacatcaggaaaggtggtttggattactgctacgctgccttacttcgtgttattcgtactgctggtacacggcgtgaccctgcccggagctagtaacggcatcaacgcctatctgcacatcgacttctatcgcctgaaggaggctaccgtatggatcgacgctgctacccagatttttttcagcctgggggctgggtttggcgtcctgatagcgttcgcgtcatacaataagtttgacaataactgttatcgtgatgcacttcttacctcaagcatcaattgcatcacgagctttgtgagtggattcgctatcttcagcattctcggatacatggcacatgagcacaaggtcaatattgaggacgtggcaaccgagggggccggcttagtgttcatcctttaccccgaggcaatctcaaccttgtctggttctactttctgggctgtagtctttttcgttatgctcctggccctgggcctggatagttccatgggggggatggaggcagtcattactgggctggccgatgacttccaggtattgaaacggcaccgcaaactcttcacattcggagttactttctcaaccttccttcttgcccttttctgcatcactaagggcggcatttacgtgttaaccttgcttgatacttttgccgctggcacgtcaattctttttgccgtcttaatggaggccatcggggtctcctggttctacggcgtggaccggttcagcaatgatatacagcagatgatgggattccggcctggcttgtactggcgcttatgctggaaattcgtttccccagcattcctgctcttcgtggtagttgtgtcaattatcaacttcaagcctctgacttatgacgactacattttccccccctgggcaaactgggtggggtggggaatcgcccttagtagcatggtattggtcccgatttacgtcatctacaagttcttatccacccagggatccctctgggagagactcgcctacggtatcaccccagaaaacgagcatcacttagtagctcagcgcgacattcgtcagttccaaatgaagactcggcaggggcgaaggagggcaactaactcctgccaaattagctgttag

SEQ ID NO: 293943 - DNA, 1887 bp, Artificial Sequence
  derived and/or modified sequence
atgctgctggccaggatgaacccccaggtgcagccagaaaataatggagctgacaccggccctgagcagcccctgcgggccaggaagacagctgagctgctggtggtgaaggagagaaatggagtgcagtgcctgctggcccccagagatggagatgcccagccccgggagacctggggcaagaagattgacttcctgctgtctgtggtgggctttgctgtggacctggccaacgtgtggaggttcccctacctgtgctacaagaatggaggaggagccttcctgatcccctacaccctcttcctgatcatcgccggcatgcccctcttctacatggagctggccctgggccagtacaaccgggagggcgccgccaccgtgtggaagatctgccccttcttcaagggcgtgggctacgccgtcatcctgattgccctgtatgtgggcttctactacaacgtcatcatcgcctggagcctgtactacctgttcagcagcttcaccctgaacctgccctggacagactgtggccacacctggaacagccccaactgcacagaccccaagctgctgaatggatctgtgctgggcaaccacaccaagtacagcaagtacaagttcaccccagctgctgagttctatgaaagaggagtgctgcacctgcacgagagcagcggcatccatgacatcggcctgccccagtggcagctgctgctgtgcctgatggtggtggtgattgtgctgtacttcagcctgtggaagggcgtgaagaccagcggcaaggtggtgtggatcacagccaccctgccctactttgtgctgtttgtgctgctggtgcacggcgtgaccctgcccggggccagcaatggcatcaatgcctacctgcacatcgacttctaccgcctgaaggaggccaccgtgtggattgatgctgccacccagatcttcttcagcctgggcgccggctttggagtgctgattgcctttgccagctacaacaagtttgacaacaactgctacagagatgccctgctgaccagcagcatcaactgcatcaccagctttgtgtctggctttgccatcttcagcatcctgggctacatggcccacgagcacaaggtgaacattgaagatgtggccacagaaggagctggcctggtgttcatcctgtacccagaggccatcagcaccctgagcggcagcaccttctgggccgtggtgttctttgtgatgctgctggccctgggcctggacagctccatgggcggcatggaggccgtcatcaccggcctggctgatgacttccaggtgctgaagaggcacaggaagctgttcacctttggagtgaccttcagcaccttcctgctggccctcttctgcatcaccaagggcggcatctacgtgctgaccctgctggacacctttgctgctggcaccagcatcctgtttgctgtgctgatggaggccatcggcgtgtcctggttctacggcgtggaccgcttcagcaatgacatccagcagatgatgggcttccggcccggcctgtactggaggctgtgctggaagtttgtgtccccagccttcctgctgtttgtggtggtggtgtccatcatcaacttcaagcccctgacctatgatgactacatcttccccccctgggccaactgggtgggctggggcatcgccctgagctccatggtgctggtgcccatctacgtgatctacaagttcctgagcacccagggcagcctgtgggagcggctggcctacggcatcaccccagaaaatgagcaccacctggtggcccagagggacatccggcagttccagatgaagacccggcagggcagaagaagagccaccaacagctgccagatcagctgctag

SEQ ID NO: 293944 - DNA, 1887 bp, Artificial Sequence
  derived and/or modified sequence
atgctgctggcccggatgaacccccaggtgcagcccgagaacaacggtgcggatactggacccgagcagccactcagagcacgaaagaccgcagaattgcttgtcgtgaaagaacggaatggcgtgcagtgcctattggcccctagggacggggatgcgcagcctcgcgaaacctgggggaagaagatagacttcctcttatccgtagtcggcttcgctgttgacttagctaacgtctggagatttccatacctttgttacaaaaacggcggaggcgcctttctgataccttacacactgttcctgataattgccggaatgcccctgttttatatggagctcgccctggggcagtacaatcgcgagggggcggcgacagtctggaagatctgtcctttcttcaagggggttgggtacgccgtcatcctcattgctttgtacgtcggtttctattacaacgtgataattgcatggtcactctactatctgttcagtagctttacattgaacctgccttggacagactgtgggcacacgtggaactctcctaactgtactgatccaaagctacttaacgggtccgtgctgggcaatcacactaaatactctaaatacaagtttacccctgccgccgaattctatgaacgcggcgtactccacctgcacgagagctccgggattcacgacattggactgccccagtggcagctcctgctgtgcctcatggtggtcgtcatcgtgctttacttcagtttgtggaagggggttaagacgagcggcaaggtcgtgtggatcaccgccacgctcccttacttcgttctctttgtgcttctggtacatggagtgacattgcccggggcgtctaatggcatcaatgcttatctacatattgacttttaccggttaaaggaggccactgtctggatcgacgctgctacgcagattttcttttccctgggcgctggattcggcgtgctgattgccttcgccagttataataagtttgataacaactgctatcgcgatgccctgctgacctcaagtattaactgtatcacgtctttcgtgagcggctttgcaatcttttccattttggggtacatggctcacgagcataaggttaatatagaggatgtcgccacggagggggccgggttagtgtttatactgtaccccgaggcgatatccactttgagtggcagcacattctgggccgtggtgttctttgtcatgttgcttgcacttgggcttgactcttccatgggcggtatggaagccgttattaccgggctcgcggatgacttccaagtcttaaaacgtcatcgtaagctgtttacattcggggttactttttcaacattcctgctggcattgttctgtatcaccaaggggggcatttacgtcttgactctccttgacacttttgccgccggcacaagcattctcttcgctgttttgatggaagctataggcgtctcttggttttatggggtggatcgcttcagtaatgacatacagcagatgatgggctttaggccaggcctctattggagactatgttggaaattcgtgtcaccagccttcctccttttcgtagtagttgtgtctatcatcaactttaaaccccttacatacgatgactatatcttccccccatgggcaaactgggttggatgggggatagctctgagctccatggtattggtcccaatttatgtaatctataagttcctgtcaacacaaggctcactgtgggaacggctggcctatggcatcacaccagaaaatgagcaccacctggttgcccagcgcgacataaggcagttccagatgaaaacccgccagggaagacgacgggcaacaaacagttgccagatcagttgctag

SEQ ID NO: 293945 - DNA, 1887 bp, Artificial Sequence
  derived and/or modified sequence
atgctgctggccagaatgaaccctcaagtccagccagagaacaacggggctgatacaggccctgagcagccactacgcgcaagaaagactgcagagctactggtggtgaaggagagaaatggagtgcaatgtctcctggctcctcgggatggcgacgcacagcccagagaaacatggggcaagaaaattgattttttactgagcgtagttgggttcgccgttgatttagctaacgtgtggcgattcccatacctgtgctataagaacggcggaggcgcattcctgatcccctacactctctttttaatcatagccggaatgcctctcttctacatggagctggccttgggtcagtacaatagagagggggcagccacagtatggaaaatttgtcccttttttaagggggtaggttacgccgtaatactgattgctctctacgtggggttctattataatgtgattatagcctggtctctctactacctgtttagctcctttaccttgaacctgccctggactgactgtggacacacgtggaactcccctaactgtacagatcccaaactcctaaacggctcagttttggggaaccatacaaagtattcaaagtataaattcaccccagcagctgagttctacgaacgaggtgttttacacctccatgagagtagtggaattcacgatatcggtcttcctcagtggcagctgctgctatgcctaatggtggttgtgatcgtcctctacttcagcctttggaaaggcgtcaaaacatcaggtaaggtcgtttggataacagccactctaccttatttcgtattatttgtgctgctcgttcacggcgtcacactgccgggtgcatccaatggtatcaatgcatatctgcatattgatttttatagactgaaggaggcaactgtctggattgatgccgctacgcaaattttcttttctctaggggctggctttggcgtcctgatcgcgttcgctagctataataaatttgataacaattgctacagagatgcgttgcttacctcaagcatcaactgcataacatcctttgtgagtggttttgcaatattcagcatcttaggatatatggcacatgaacataaggtcaacattgaagacgtagccacagaaggcgcaggacttgtgttcatcctgtatccggaggctattagcaccctatcagggtctaccttctgggctgtcgtgtttttcgtcatgctgctcgccctaggccttgacagcagcatgggcggaatggaggcagtgattacaggcctggcagatgattttcaagtgttgaagcggcatcggaaactgttcaccttcggcgttacgttcagcacatttttactcgcccttttttgcattaccaaagggggaatatatgtcctgactctcctcgatactttcgcagccggtacttccatcctgtttgcggtgcttatggaggccatcggggtgtcctggttctacggtgtggacagattctccaatgatatccagcagatgatgggcttccggccaggcctttactggaggttgtgctggaaatttgtcagccccgctttcctcctgttcgtcgtagtggtgtcaattatcaattttaagcctctgacatatgacgactatatttttcccccatgggctaattgggttgggtgggggatagctctatcctccatggtcctggtgcccatttatgttatttataagttcctgtctactcagggaagcttgtgggagagactggcatatggaatcactcctgaaaatgagcaccacctggtagcacaaagggatatacgccagtttcagatgaagactcgccagggtaggcgccgagctacgaattcatgccagatttcgtgctag

SEQ ID NO: 293946 - DNA, 1887 bp, Artificial Sequence
  derived and/or modified sequence
atgctgctggccagaatgaacccccaggtgcagcccgagaacaacggcgccgacaccggccccgagcagcccctgagagccagaaagaccgccgagctgctggtggtgaaggagagaaacggcgtgcagtgcctgctggcccccagagacggcgacgcccagcccagagagacctggggcaagaagatcgacttcctgctgagcgtggtgggcttcgccgtggacctggccaacgtgtggagattcccctacctgtgctacaagaacggcggcggcgccttcctgatcccctacaccctgttcctgatcatcgccggcatgcccctgttctacatggagctggccctgggccagtacaacagagagggcgccgccaccgtgtggaagatctgccccttcttcaagggcgtgggctacgccgtgatcctgatcgccctgtacgtgggcttctactacaacgtgatcatcgcctggagcctgtactacctgttcagcagcttcaccctgaacctgccctggaccgactgcggccacacctggaacagccccaactgcaccgaccccaagctgctgaacggcagcgtgctgggcaaccacaccaagtacagcaagtacaagttcacccccgccgccgagttctacgagagaggcgtgctgcacctgcacgagagcagcggcatccacgacatcggcctgccccagtggcagctgctgctgtgcctgatggtggtggtgatcgtgctgtacttcagcctgtggaagggcgtgaagaccagcggcaaggtggtgtggatcaccgccaccctgccctacttcgtgctgttcgtgctgctggtgcacggcgtgaccctgcccggcgccagcaacggcatcaacgcctacctgcacatcgacttctacagactgaaggaggccaccgtgtggatcgacgccgccacccagatcttcttcagcctgggcgccggcttcggcgtgctgatcgccttcgccagctacaacaagttcgacaacaactgctacagagacgccctgctgaccagcagcatcaactgcatcaccagcttcgtgagcggcttcgccatcttcagcatcctgggctacatggcccacgagcacaaggtgaacatcgaggacgtggccaccgagggcgccggcctggtgttcatcctgtaccccgaggccatcagcaccctgagcggcagcaccttctgggccgtggtgttcttcgtgatgctgctggccctgggcctggacagcagcatgggcggcatggaggccgtgatcaccggcctggccgacgacttccaggtgctgaagagacacagaaagctgttcaccttcggcgtgaccttcagcaccttcctgctggccctgttctgcatcaccaagggcggcatctacgtgctgaccctgctggacaccttcgccgccggcaccagcatcctgttcgccgtgctgatggaggccatcggcgtgagctggttctacggcgtggacagattcagcaacgacatccagcagatgatgggcttcagacccggcctgtactggagactgtgctggaagttcgtgagccccgccttcctgctgttcgtggtggtggtgagcatcatcaacttcaagcccctgacctacgacgactacatcttccccccctgggccaactgggtgggctggggcatcgccctgagcagcatggtgctggtgcccatctacgtgatctacaagttcctgagcacccagggcagcctgtgggagagactggcctacggcatcacccccgagaacgagcaccacctggtggcccagagagacatcagacagttccagatgaagaccagacagggcagaagaagagccaccaacagctgccagatcagctgctag

SEQ ID NO: 293947 - DNA, 2858 bp, Artificial Sequence
  derived and/or modified sequence
agcctcggcgtgcccccaggaccggtaaagttcctctcgccagccgcatccatgcttctggcgcggatgaacccgcaggtgcagcccgagaacaacggggcggacacgggtccagagcagccccttcgggcgcgcaaaactgcggagctgctggtggtgaaggagcgcaacggcgtccagtgcctgctggcgccccgcgacggcgacgcgcagccccgggagacctggggcaagaagatcgacttcctgctgtccgtagtcggcttcgcagtggacctggccaacgtgtggcgcttcccctacctctgctacaagaacggcggcggtgccttcttgatcccgtacacactgttccttatcatcgcggggatgcccctgttctacatggagctggctctgggacagtacaaccgggagggggctgccaccgtttggaaaatctgcccattcttcaaaggcgttggctatgctgtcatcctgatcgccctgtacgttggcttctactacaacgtcatcatcgcctggtcactctactacctcttctcctccttcaccctcaacctgccctggaccgactgtggccacacctggaacagccccaactgtaccgaccccaagctcctcaatggctccgtgcttggcaaccacaccaagtactccaagtacaagttcacgccggcagccgagttttatgagcgtggtgtcctgcaccttcacgagagcagcgggattcatgacatcggcctgccccagtggcagctcttgctctgtctgatggtcgtcgtcatcgtcttgtattttagcctctggaaaggggtgaagacatcaggaaaggtggtgtggatcacagccacgctgccttacttcgtgctgttcgtgctcctggtccatggcgtcacgctgcccggagcctccaatggcatcaatgcctacctgcacatcgacttctaccgcttgaaagaggccacggtatggattgatgccgcaactcagatatttttttccttgggggctggatttggagtattgattgcatttgccagttacaacaaatttgacaacaactgttacagggatgccctgctgaccagcagcatcaactgtatcaccagcttcgtctctgggttcgccatcttctccatccttggttacatggcccatgaacacaaggtcaacattgaggatgtggccacagaaggagctggcctagtgttcatcctgtatccagaggccatttctaccctgtctggatctacattctgggctgttgtgtttttcgtcatgctcctggcgctgggccttgacagctcaatgggaggcatggaggctgtcatcacgggcctggcagatgacttccaggtcctgaagcgacaccggaaactcttcacatttggcgtcaccttcagcactttccttctcgccctgttctgcataaccaagggtggaatttacgtcttgaccctcctggacacctttgctgcgggcacctccatcctttttgctgtcctcatggaagccatcggagtttcctggttttatggagtggacaggttcagcaacgacatccagcagatgatggggttcaggccgggtctatactggagactgtgctggaagttcgtcagtcctgccttcctcctgttcgtggttgtggtcagcatcatcaacttcaagccactcacctacgacgactacatcttcccgccctgggccaactgggtggggtggggcatcgccctgtcctccatggtcctggtgcccatctacgtcatctataagttcctcagcacgcagggctctctttgggagagactggcctatggcatcacgccagagaacgagcaccacctggtggctcagagggacatcagacagttccagatgaaaacgagacaagggagaaggagagctaccaactcttgccagatatcctgctgaacagaaatccctgaagctgccttaattctcaaaaggagttaccgctcagctgggagccagttcctgctatatgatctgttttctagcctcgctaatgtgagactgaagcattcttaccaaagaaatcatttcctagtaaagaagcccattgaactcactttatttgtttatttccttcgaaagccaccgaagagagaaaaacagagaaggtgtgtagtgtggcggaaaaagcacagcatatagttttacagacttgggtctgcagctgactagctgggtggcctggggatagtggcttcatcttttggggcttcaagattctttgtctttaaaatcaggggttatatcagatcatcaaagttcccattccattaaagaaaaccctgcatgtatccataatgatgctctcctgttaaatttacaatgaaggaaacacatcacttaactgtaagaatttcccaaaatgaactgatgaccagtgatctctctatcagagaaatgtcagatttctagcctccagaactttgatttttctggacattcaatagttcctctttctcagatatttttcaactgatgccagaaacacttggtatttgtttttaatccaacccttttgttttgaggctttggagggtaacacattttcataccctgtgagtcccaggatccacagctctgctgtggtcttagaagccactgaaacattggtgaatgtgaagtcacttttggggtgcctgccctcatccctctgtctctctgcttccgtgtaaataaagactgtttcaattgtgtcctctctgtgtcatggactgttccaatgtcatgcagatttctgtgtctgatatggattttaaaagttgttctctttgtggaatataagtgtacagaataataaataatgtttcctgggctgtgta

SEQ ID NO: 293948 - protein, 205 aa, Artificial Sequence
  derived and/or modified sequence
LGPQACTVVPRSKCFDLEMVSSRWEPLLLLTEVTSANEVWVTSNSTALVFVSDNVREELEEVQDLLCRTLPLPVQLSFPEEALDVARVAHVFVSPFCFSAGSEERRRRERDDQMYRERLRTLLVIAVVMSLLNALSTSGGSISWNDFVHEMLAKGEVQRVQVVPESDVVEVYLHPGAVVFGRPRLALMYRMQVANIDKFEEKLRA

SEQ ID NO: 293949 - DNA, 672 bp, Artificial Sequence
  derived and/or modified sequence
atgagactgagatgcaccagaagaggcagagacaccctgccctgcaccctgagcaccagcagcaccccctggagcgccagcagccaggtgcccagagcccagctgggcaaggccgtgggcagctgcagaggcgtgggcagctgctgcgccagacactgcaagacccacctggccagcctgagacagccctgcggcgagagaaccggcgccgcctgcgtgctgctgatctacttcagagtgaccatctacttctacgtggagatcgagaagctgctgatcatcgtggccaagcaggagggcctgagcggcaaccacaagcccgtggagagaaagtacatgacctacctgagcgcccaggaccacgagctgatccaggtggtgcagaacggccacctgcagatgtgcggcaagagcgagaccggcaacgaggccagccccggcctgcccaagagagccagaagctgccccagaaagaacagaaagtggctgagattcatgagcagagccaccccctggtgggccggctgctggagcaccagaagagacgagggcctgcacaaccccagcaccaacgccgccctgggcttcgcccaggccccccagagacccgcccccctgcacgagcagctgttcgagagaatgtgcatggccctgggcggcagagccagctag

SEQ ID NO: 293950 - DNA, 672 bp, Artificial Sequence
  derived and/or modified sequence
atgaggctgcgctgcacccggcggggccgggacaccctgccctgcaccctgagcaccagcagcaccccctggagcgccagcagccaggtgccccgggcccagctgggcaaggctgtgggcagctgccggggcgtgggcagctgctgtgcccggcactgcaagacccacctggccagcctgcggcagccctgtggggagaggactggagctgcctgtgtgctgctgatctacttccgggtgaccatctacttctacgtggagattgagaagctgctgatcatcgtggccaagcaggagggcctgagcggcaaccacaagcctgtggagaggaagtacatgacctacctgagcgcccaggaccacgagctgatccaggtggtgcagaatggccacctgcagatgtgtgggaagtcagaaacaggaaatgaggccagccctggcctgcccaagagggcccggagctgccccaggaagaacaggaagtggctgcgcttcatgagccgggccaccccctggtgggccggctgctggagcaccaggagagatgagggcctgcacaaccccagcaccaatgctgccctgggctttgcccaggccccccagaggcctgcccccctgcacgagcagctgtttgagaggatgtgcatggccctgggcggccgggccagctag

SEQ ID NO: 293951 - DNA, 672 bp, Artificial Sequence
  derived and/or modified sequence
atgaggcttaggtgtactcgaagggggagggatactttgccctgcacactcagcactagcagcaccccctggagtgcctccagccaagttcccagggcacagttgggaaaagctgtcggcagctgccgcggagtgggctcctgctgtgcgagacactgtaaaacccacctggcctctctgcggcagccttgtggggagcgcacaggcgcagcttgtgttctgctgatctacttccgcgtgactatctacttctatgtagaaatcgaaaagcttctgattatcgtggccaagcaagaaggtctgtccgggaatcataaacccgttgagcgcaaatacatgacttacctgagcgcacaggatcacgagctgattcaggttgtccagaacggacaccttcagatgtgtggaaaatccgagacgggcaatgaagcctctcccggactgcctaaaagagccaggtcatgtcctcgcaagaataggaagtggctgaggtttatgtctcgtgccacgccctggtgggcaggatgttggtccacacggagggacgagggtctccacaatccttcgaccaacgctgcgttagggttcgcacaggccccacagcgccctgctcccctgcatgagcagctttttgaacgtatgtgcatggcattaggaggtcgtgctagctag

SEQ ID NO: 293952 - protein, 74 aa, Artificial Sequence
  derived and/or modified sequence
MDPVGLQLGNKNLWSCLVRLLTKDPEWLNAKMKFFLPNTDLDSRNETLDPEQRVILQLNKLHVQGSDTWQSFIH

SEQ ID NO: 293953 - protein, 272 aa, Artificial Sequence
  derived and/or modified sequence
MDKEKDGIPISSLREITLLLRLRHPNIVELKEVVVGNHLESIFLVMGYCEQDLASLLENMPTPFSEAQVKCIVLQVLRGLQYLHRNFIIHRDLKVSNLLMTDKGCVKTADFGLARAYGVPVKPMTPKVVTLWYRAPELLLGTTTQTTSIDMWAVGCILAELLAHRPLLPGTSEIHQIDLIVQLLGTPSENIWPGFSKLPLVGQYSLRKQPYNNLKHKFPWLSEAGLRLLHFLFMYDPKKRATAGDCLESSYFKEKPLRLPISGVCEGCREPG

SEQ ID NO: 293954 - DNA, 1424 bp, Artificial Sequence
  derived and/or modified sequence
gtctgcgcctgcgcgcaagagaggcggggccagcgctcggcatggcggagccagatctggagtgcgagcagatccgtctgaagtgtattcctgggacgatgccggagtgtgaaggagtttgagaagctgaaccgcattggagagggtacctacggcattgtgtatcgggcccgggacacccagacagatgagattgtcgcactgaagaaggtgcggatggacaaggagaaggatggcatccccatcagcagcttgcgggagatcacgctgctgctccgcctgcgtcatccgaacatcgtggagctgaaggaggtggttgtggggaaccacctggagagcatcttcctggtgatgggttactgtgagcaggacctggccagcctcctggagaatatgccaacacccttctcggaggctcaggtcaagtgcatcgtgctgcaggtgctccggggcctccagtatctgcacaggaacttcattatccacagggacctgaaggtttccaacttgctcatgaccgacaagggttgtgtgaagacagcggatttcggcctggcccgggcctatggtgtcccagtaaagccaatgacccccaaggtggtcactctctggtaccgagcccctgaactgctgttgggaaccaccacgcagaccaccagcatcgacatgtgggctgtgggctgcatactggccgagctgctggcgcacaggcctcttctccccggcacttccgagatccaccagatcgacttgatcgtgcagctgctgggcacgcccagtgagaacatctggccgggcttttccaagctgccactggtcggccagtacagcctccggaagcagccctacaacaacctgaagcacaagttcccatggctgtcggaggccgggctgcgcctgctgcacttcctgttcatgtacgaccctaagaaaagggcgacggccggggactgcctggagagctcctatttcaaggagaagcccctacgtcttccgatcagtggtgtctgtgaagggtgccgcgagccaggctgaccaggcgcccgggatccagctcatccccttggctgggaacatcctccactgacttcctcccactgtctgccctgaacccactgctgcccccagaaaaaggccgggtgacaccggggggctcccagcccgtgcaccctggaagggcaggtctggcggctccatccgtggctgcaggggtctcatgtggtcctcctcgctatgttggaaatgtgcaaccactgcttcttgggaggagtggtgggtgcagtccccccgctgtctttgagttgtggtggacgctggcctgggatgagagggcccagaagaccttcgtatcccctctcagtcgcccggggctgtcccgtgcatgggttggctgtggggaccccaggtgggcctggcaggactcc

SEQ ID NO: 293955 - protein, 348 aa, Artificial Sequence
  derived and/or modified sequence
MDFPSSLRPALFLTGPLGLSDVPDLSFMCSWRDALTLPEAQPQNSENGALHVTKDLLWEPATPGPLPMLPPLIDPWDPGLTARDLLFRGGCRYRKRPRVVLDVTEQISRFLLDHGDVAFAPLGKLMLENFKLEGAGSRTKKKTVVSVKKLLQDLGGHQPWGCPWAYLSNRQRRFSILGGPILGTSVASHLAELLHEELVLRWEQLLLDEACTGGALAWVPGRTPQFGQLVYPAGGAQDRLHFQEVVLTPGDNPQFLGKPGRIQLQGPVRQVVTCTVQGETLLAVRSDYHCAVWKFGKQWQPTLLQAMQVEKGATGISLSPHLPGELAICSRSGAVCLWSPEDGYRRFL

SEQ ID NO: 293956 - protein, 776 aa, Artificial Sequence
  derived and/or modified sequence
MLPPLIDPWDPGLTARDLLFRGGCRYRKRPRVVLDVTEQISRFLLDHGDVAFAPLGKLMLENFKLEGAGSRTKKKTVVSVKKLLQDLGGHQPWGCPWAYLSNRQRRFSILGGPILGTSVASHLAELLHEELVLRWEQLLLDEACTGGALAWVPGRTPQFGQLVYPAGGAQDRLHFQEVVLTPGDNPQFLGKPGRIQLQGPVRQVVTCTVQGETLLAVRSDYHCAVWKFGKQWQPTLLQAMQVEKGATGISLSPHLPGELAICSRSGAVCLWSPEDGLRQIYRDPETLVFRDSSSWRWADFTAHPRVLTVGDRTGVKMLDTQGPPGCGLLLFRLGAEASCQKGERVLLTQYLGHSSPKCLPPTLHLVCTQFSLYLVDERLPLVPMLKWNHGLPSPLLLARLLPPPRPSCVQPLLLGGQGGQLQLLHLAGEGASVPRLAGPPQSLPSRIDSLPAFPLLEPKIQWRLQERLKAPTIGLAAVVPPLPSAPTPGLVLFQLSAAGDVFYQQLRPQVDSSLRRDAGPPGDTQPDCHAPTASWTSQDTAGCSQWLKALLKVPLAPPVWTAPTFTHRQMLGSTELRREEEEGQRLGVLRKAMARGQLLLQRDLGSLPAAEPPPAPESGLEDKLSERLGEAWAGRGAAWWERQQGRTSEPGRQTRRPKRRTQLSSSFSLSGHVDPSEDTSSPHSPEWPPADALPLPPTTPPSQELTPDACAQGVPSEQRQMLRDYMAKLPPQRDTPGCATTPPHSQASSVRATRSQQHTPVLSSSQPLRKKPRMGF

SEQ ID NO: 293957 - DNA, 1047 bp, Artificial Sequence
  derived and/or modified sequence
atggacttccccagcagcctgagacccgccctgttcctgaccggccccctgggcctgagcgacgtgcccgacctgagcttcatgtgcagctggagagacgccctgaccctgcccgaggcccagccccagaacagcgagaacggcgccctgcacgtgaccaaggacctgctgtgggagcccgccacccccggccccctgcccatgctgccccccctgatcgacccctgggaccccggcctgaccgccagagacctgctgttcagaggcggctgcagatacagaaagagacccagagtggtgctggacgtgaccgagcagatcagcagattcctgctggaccacggcgacgtggccttcgcccccctgggcaagctgatgctggagaacttcaagctggagggcgccggcagcagaaccaagaagaagaccgtggtgagcgtgaagaagctgctgcaggacctgggcggccaccagccctggggctgcccctgggcctacctgagcaacagacagagaagattcagcatcctgggcggccccatcctgggcaccagcgtggccagccacctggccgagctgctgcacgaggagctggtgctgagatgggagcagctgctgctggacgaggcctgcaccggcggcgccctggcctgggtgcccggcagaaccccccagttcggccagctggtgtaccccgccggcggcgcccaggacagactgcacttccaggaggtggtgctgacccccggcgacaacccccagttcctgggcaagcccggcagaatccagctgcagggccccgtgagacaggtggtgacctgcaccgtgcagggcgagaccctgctggccgtgagaagcgactaccactgcgccgtgtggaagttcggcaagcagtggcagcccaccctgctgcaggccatgcaggtggagaagggcgccaccggcatcagcctgagcccccacctgcccggcgagctggccatctgcagcagaagcggcgccgtgtgcctgtggagccccgaggacggctacagaagattcctgtag

SEQ ID NO: 293958 - DNA, 2331 bp, Artificial Sequence
  derived and/or modified sequence
atgctgccccccctgatcgacccctgggaccccggcctgaccgccagagacctgctgttcagaggcggctgcagatacagaaagagacccagagtggtgctggacgtgaccgagcagatcagcagattcctgctggaccacggcgacgtggccttcgcccccctgggcaagctgatgctggagaacttcaagctggagggcgccggcagcagaaccaagaagaagaccgtggtgagcgtgaagaagctgctgcaggacctgggcggccaccagccctggggctgcccctgggcctacctgagcaacagacagagaagattcagcatcctgggcggccccatcctgggcaccagcgtggccagccacctggccgagctgctgcacgaggagctggtgctgagatgggagcagctgctgctggacgaggcctgcaccggcggcgccctggcctgggtgcccggcagaaccccccagttcggccagctggtgtaccccgccggcggcgcccaggacagactgcacttccaggaggtggtgctgacccccggcgacaacccccagttcctgggcaagcccggcagaatccagctgcagggccccgtgagacaggtggtgacctgcaccgtgcagggcgagaccctgctggccgtgagaagcgactaccactgcgccgtgtggaagttcggcaagcagtggcagcccaccctgctgcaggccatgcaggtggagaagggcgccaccggcatcagcctgagcccccacctgcccggcgagctggccatctgcagcagaagcggcgccgtgtgcctgtggagccccgaggacggcctgagacagatctacagagaccccgagaccctggtgttcagagacagcagcagctggagatgggccgacttcaccgcccaccccagagtgctgaccgtgggcgacagaaccggcgtgaagatgctggacacccagggcccccccggctgcggcctgctgctgttcagactgggcgccgaggccagctgccagaagggcgagagagtgctgctgacccagtacctgggccacagcagccccaagtgcctgccccccaccctgcacctggtgtgcacccagttcagcctgtacctggtggacgagagactgcccctggtgcccatgctgaagtggaaccacggcctgcccagccccctgctgctggccagactgctgcccccccccagacccagctgcgtgcagcccctgctgctgggcggccagggcggccagctgcagctgctgcacctggccggcgagggcgccagcgtgcccagactggccggccccccccagagcctgcccagcagaatcgacagcctgcccgccttccccctgctggagcccaagatccagtggagactgcaggagagactgaaggcccccaccatcggcctggccgccgtggtgccccccctgcccagcgcccccacccccggcctggtgctgttccagctgagcgccgccggcgacgtgttctaccagcagctgagaccccaggtggacagcagcctgagaagagacgccggcccccccggcgacacccagcccgactgccacgcccccaccgccagctggaccagccaggacaccgccggctgcagccagtggctgaaggccctgctgaaggtgcccctggccccccccgtgtggaccgcccccaccttcacccacagacagatgctgggcagcaccgagctgagaagagaggaggaggagggccagagactgggcgtgctgagaaaggccatggccagaggccagctgctgctgcagagagacctgggcagcctgcccgccgccgagcccccccccgcccccgagagcggcctggaggacaagctgagcgagagactgggcgaggcctgggccggcagaggcgccgcctggtgggagagacagcagggcagaaccagcgagcccggcagacagaccagaagacccaagagaagaacccagctgagcagcagcttcagcctgagcggccacgtggaccccagcgaggacaccagcagcccccacagccccgagtggccccccgccgacgccctgcccctgccccccaccaccccccccagccaggagctgacccccgacgcctgcgcccagggcgtgcccagcgagcagagacagatgctgagagactacatggccaagctgcccccccagagagacacccccggctgcgccaccacccccccccacagccaggccagcagcgtgagagccaccagaagccagcagcacacccccgtgctgagcagcagccagcccctgagaaagaagcccagaatgggcttctag

SEQ ID NO: 293959 - DNA, 1047 bp, Artificial Sequence
  derived and/or modified sequence
atggactttccaagctctctcagacccgccctgtttttaactgggccacttggtctgtcagacgtgcctgacttaagcttcatgtgttcttggagagacgccttgacgctcccagaagcacagccacaaaattccgaaaatggtgctttgcacgtcaccaaagatctcctctgggaacccgctactccgggaccacttccaatgttaccacccctcatcgatccttgggaccccggcctcaccgcacgtgatttgctctttagaggagggtgcaggtataggaaacgccctagggtagtgctcgacgtgaccgagcagatctctcgcttcctgctcgaccacggtgatgtagcatttgcaccactggggaagctcatgcttgaaaactttaagctcgaaggtgctggatcacggactaagaagaagacagtagttagcgtgaagaagttgcttcaagacctggggggccaccagccatggggatgtccctgggcgtatctatccaatagacagcgaaggttctcgatcctgggtggtcctattctggggacttccgtagcatctcatctggcggagctcttgcatgaggagttagtgcttcggtgggagcaactgctattagatgaagcttgcaccggtggggctctggcttgggttcccggacgtactccgcagtttggccagttggtgtacccggccggtggggctcaggatcggctccatttccaggaagtggttctcactccaggagataatccacagtttctgggcaagccaggacgcatccagctgcagggccctgtgaggcaggtggtgacatgcaccgtacagggtgaaacactcctcgccgtgcgttcagattatcattgtgcagtgtggaaatttggtaaacagtggcagccaacactgctccaagccatgcaggtggaaaagggagctaccggaatatccttgagtccgcacctgccaggggaattagccatatgtagccgtagcggggctgtatgtctatggtctcctgaggacggctaccggaggttcctgtag

SEQ ID NO: 293960 - DNA, 2331 bp, Artificial Sequence
  derived and/or modified sequence
atgttaccccccctcattgatccgtgggaccccggtcttaccgccagggacctcctattccggggaggatgccgatatagaaagcggcctagggtagtgctggatgtaaccgaacagatttctcgcttcttgctggatcacggtgacgtggcttttgcaccactgggcaaacttatgcttgagaatttcaagctggagggggctgggtcgcgaaccaagaagaagacagtagtgtctgttaaaaaattactccaggatctcggaggacaccaaccctggggctgtccgtgggcttatctgagcaatcggcagaggcggttctccatcctcgggggaccaatcctgggaacaagtgtggcatctcacctagcagagctcttgcatgaggagctggtgcttagatgggaacagcttctattagatgaggcgtgtacagggggtgcccttgcatgggtgccaggccgaacccctcagttcggacagttagtctatccagccgggggggctcaggatagactccatttccaagaagtcgtcctcacgccaggagacaatccacagtttctgggcaagccgggaaggattcagctgcagggacctgtaaggcaggtcgtgacctgtactgtccagggggagacgctgctcgcagtgcggtccgattaccattgtgccgtctggaaatttgggaagcagtggcagcctacattattgcaggcgatgcaggtggaaaaaggcgccaccggaatatccctatccccccacctgccgggtgaactggctatctgctcccgatccggtgcagtgtgcctatggagtccggaagatggactgcgccagatctatagagaccccgaaacgctggtgttccgggactcaagttcatggcggtgggcggacttcacagcccacccgagggtgctcactgttggcgatcggaccggtgtgaagatgctcgacacccagggaccgccggggtgcggcctccttctgttccggttaggggccgaagcttcctgccaaaagggggagagagtcctgctgacgcagtatctgggccactctagccctaagtgtctgccccccacattgcatcttgtgtgtacccagttctctctgtatctagtagatgaacgcctgcctctggtgcccatgcttaaatggaaccatgggctgccatccccccttttgctggccaggttgttgcccccacctcgcccatcatgcgtgcaaccactgttgctgggagggcagggcggtcaactgcagctgttgcatctcgctggcgagggggctagtgtacctagactggccggtccaccacagtcactgccctcccggatcgacagtttgccagcttttcctctgctcgagccaaagatccaatggaggcttcaggagcgcctgaaggcccccacaatcggcctggctgcagtggttccccctcttccttcagcccccacgcctggcctggttctattccagctgtccgccgcaggagacgttttttaccaacagctgcgccctcaagtcgattccagtctcaggcgcgacgcaggtcccccaggagacacccaacccgattgccatgctccaaccgccagttggacgagtcaggacaccgctggatgttcccagtggctgaaagcactcctgaaggttccacttgctcccccagtgtggactgcccccacattcacacatcggcagatgctgggttcaaccgagctgcgccgggaagaggaggagggccaaaggctgggagttctgagaaaagcaatggctaggggacagctcctcctgcaacgcgacctgggttcactacccgcagcggaaccccctccagccccagagagcggactggaagacaaactcagtgagaggctcggtgaagcctgggccggtagaggggcggcatggtgggagcgccagcagggacgcaccagcgagccgggtaggcaaacgaggcggccaaagcgcagaacgcagctgagcagcagtttttccctgtctggccatgttgacccttcggaggacacaagctcaccccacagccccgaatggccacctgcggacgccctccccctaccgcccacgaccccgcctagccaggagcttactccagatgcctgtgcccagggggtgcccagcgagcagagacagatgctccgcgactatatggcgaagctgcctccccaaagggacacgcccggatgcgcgaccactcctccacacagccaagcctctagcgtgagagccacacggtcacaacaacatactcccgttctgtcgtcatctcagcctctgcggaaaaaaccgaggatgggcttctag

SEQ ID NO: 293961 - DNA, 1047 bp, Artificial Sequence
  derived and/or modified sequence
atggacttccccagcagcctgcggcctgccctcttcctgaccggccccctgggcctgagtgatgtgcctgacctgtccttcatgtgctcctggagagatgccctgaccctgcctgaggcccagccccagaacagtgaaaatggagccctgcacgtgaccaaggacctgctgtgggagcccgccaccccaggccccctgcccatgctgccccccctgattgacccctgggaccccggcctgacagcccgggacctgctcttccggggcggctgccgctacaggaagaggccccgggtggtgctggatgtgacagagcagatcagccgcttcctgctggaccatggagatgtggcctttgcccccctgggcaagctgatgctggagaacttcaagctggagggcgccggcagcaggaccaagaagaagacagtggtgtctgtgaagaagctgctgcaggacctgggcggccaccagccctggggctgcccctgggcctacctgagcaaccggcagaggcgcttcagcatcctgggcggccccatcctgggcacctctgtggccagccacctggccgagctgctgcacgaggagctggtgctgcgctgggagcagctgctgctggatgaggcctgcaccggcggggccctggcctgggtgcccggccgcaccccccagtttggccagctggtgtacccagctggaggagcccaggaccggctgcacttccaggaggtggtgctgacccctggggacaacccccagttcctgggcaagccaggccgcatccagctgcagggccctgtgcggcaggtggtgacctgcaccgtgcagggcgagaccctgctggccgtgcggagtgactaccactgtgctgtgtggaagtttgggaagcagtggcagcccaccctgctgcaggccatgcaggtggagaagggggccaccggcatcagcctgagcccccacctgcctggagagctggccatctgcagccgcagcggggctgtgtgcctgtggagcccagaagatggctaccgccgcttcctgtag

SEQ ID NO: 293962 - DNA, 2331 bp, Artificial Sequence
  derived and/or modified sequence
atgctgccccccctgattgacccctgggaccccggcctgacagcccgggacctgctcttccggggcggctgccgctacaggaagaggccccgggtggtgctggatgtgacagagcagatcagccgcttcctgctggaccatggagatgtggcctttgcccccctgggcaagctgatgctggagaacttcaagctggagggcgccggcagcaggaccaagaagaagacagtggtgtctgtgaagaagctgctgcaggacctgggcggccaccagccctggggctgcccctgggcctacctgagcaaccggcagaggcgcttcagcatcctgggcggccccatcctgggcacctctgtggccagccacctggccgagctgctgcacgaggagctggtgctgcgctgggagcagctgctgctggatgaggcctgcacaggaggagccctggcctgggtgcccggccgcaccccccagtttggccagctggtgtacccagctgggggcgcccaggaccggctgcacttccaggaggtggtgctgacccctggggacaacccccagttcctgggcaagccaggccgcatccagctgcagggccctgtgcggcaggtggtgacctgcaccgtgcagggcgagaccctgctggccgtgcggagtgactaccactgtgctgtgtggaagtttgggaagcagtggcagcccaccctgctgcaggccatgcaggtggagaagggggccaccggcatcagcctgagcccccacctgcccggggagctggccatctgcagccgctctggagctgtgtgcctgtggagcccagaagatggcctgcggcagatctacagagatcctgagaccctggtgttccgggacagcagctcctggcgctgggccgacttcaccgcccacccccgggtgctgactgtgggggacagaactggagtgaagatgctggacacccagggccccccaggctgcggcctgctgctcttccggctgggcgctgaggccagctgccagaagggggagcgggtgctgctgacccagtacctgggccacagcagccccaagtgcctgccccccaccctgcacctggtgtgcacccagttcagcctgtacctggtggatgagcggctgcccctggtgcccatgctgaagtggaaccacggcctgcccagccccctgctgctggcccggctgctgcccccaccccggcccagctgtgtgcagcccctgctgctgggcggccagggcggccagctgcagctgctgcacctggccggggagggcgcctctgtgccccggctggccggccccccccagagcctgcccagcagaattgacagcctgcctgccttccccctgctggagcccaagatccagtggaggctgcaggagcggctgaaggcccccaccatcggcctggccgctgtggtgccccccctgcccagcgcccccaccccaggcctggtgctcttccagctgtctgctgctggagatgtgttctaccagcagctgcggccccaggtggacagcagcctgcggagagatgctggccccccaggggacacccagcctgactgccacgcccccacagcctcctggaccagccaggacacagctggctgcagccagtggctgaaggccctgctgaaggtgcccctggcccctcctgtgtggacagcccccaccttcacccaccggcagatgctgggcagcacagagctgcggcgggaggaggaggagggccagaggctgggcgtgctgaggaaggccatggcccggggccagctgctgctgcagagggacctgggcagcctgcctgctgctgagcccccaccagcccctgagagcggcctggaggacaagctgtctgagcggctgggggaggcctgggccggcagaggagctgcctggtgggagcggcagcagggccgcaccagcgagcccggccggcagacccggcggcccaagaggaggacccagctgagcagcagcttcagcctgagcggccacgtggaccccagcgaggacaccagcagcccccacagccctgagtggcccccagcagatgccctgcccctgccccccaccaccccacccagccaggagctgaccccagatgcctgtgcccagggcgtgcccagcgagcagaggcagatgctgcgggactacatggccaagctgcccccccagagggacaccccaggctgtgccaccaccccaccccacagccaggccagctctgtgcgggccaccaggagccagcagcacacccctgtgctgagcagcagccagcccctgaggaagaagcccaggatgggcttctag

SEQ ID NO: 293963 - DNA, 1047 bp, Artificial Sequence
  derived and/or modified sequence
atggacttccccagcagcctgcggcccgccctgttcctgaccggcccactgggtctgtctgatgtgcctgacctctctttcatgtgcagctggcgcgacgccctaacactccccgaagcccagccccagaatagcgagaatggcgccctgcacgttactaaggatctcctctgggagcctgcaacccctggcccactgcccatgttgcctcccctgattgacccctgggacccaggcctcacggcaagagatctgttattcagaggggggtgcagataccgcaagcggcccagagtcgtcctcgatgttacagagcagatctcccgattcctgctcgatcatggcgatgtcgcttttgcgccgctagggaaattaatgctcgaaaattttaagttggagggagctggatcgcgcaccaagaagaaaaccgtcgtgtctgtgaagaagcttttacaggatcttggtggccaccagccttggggctgcccttgggcctatctgtccaacagacagcgaaggttctccatcctgggcgggccaatccttggtaccagtgtagcctcccatctcgctgagttactgcatgaggagttggtattgagatgggagcagctgttgctggacgaggcttgtaccggcggcgccttggcttgggtgcccggcaggacaccgcagttcggacaactagtgtaccccgccggtggcgctcaagacaggttgcatttccaggaagtcgtcctcacaccaggagataatcctcaatttctcggaaaaccaggcaggattcaattacagggacccgttcgtcaggtcgtgacgtgtacagtccaaggtgagactcttctggctgttcgcagtgactatcactgcgccgtgtggaagtttggaaaacagtggcaacctactctacttcaggcaatgcaggttgaaaaaggcgcaactggtatctcactaagtccccacctgcccggcgaattggccatctgctcaaggtcgggcgcggtgtgtctgtggagccccgaggatggctatcgccgcttcctctag

SEQ ID NO: 293964 - DNA, 2331 bp, Artificial Sequence
  derived and/or modified sequence
atgctgccccccctgatcgacccctgggaccccggcctgaccgcccgcgatctgctcttcagaggcgggtgcagatatagaaaacgccccagggtggtgctcgatgtgacagagcagatctctcggttcctgcttgaccacggtgatgttgctttcgcccctcttggtaaactcatgctagaaaatttcaagctcgagggcgccggatcaagaactaaaaaaaagacggtcgtcagtgtaaagaaacttctccaggacctgggtggccaccagccctggggttgtccttgggcttacttgagtaatagacagagaaggttctcaatattgggcggacctatacttgggacatctgtggcctctcacctggccgaattactccatgaagaacttgtgctcaggtgggagcagctgttgctggatgaagcatgtactggaggcgcactcgcatgggtgcccggcagaactccacagtttgggcagcttgtgtaccctgcgggcggagcacaagaccgactacattttcaggaggtcgtgctgacgcctggcgacaatcctcagttcctcgggaaacccggacgaatccagctccaagggccagtacggcaggtggtgacctgtaccgtgcaaggtgaaacactgctcgctgtcagatctgactaccattgtgctgtttggaagttcggaaagcagtggcaaccaacactgctgcaggcaatgcaggttgagaaaggcgctaccggcatatcactgtcaccccaccttcccggcgagcttgccatctgctctaggtcaggggcagtttgcctctggtctccggaggatggactgcgtcagatatacagggacccagagacactggtttttcgagactcttccagctggcgatgggctgatttcacagctcatccccgcgtgcttaccgtaggcgatcgcacaggggttaagatgctggatacacagggccctccaggatgcggtctcctgttatttcggctgggcgccgaagcatcatgtcaaaagggagagcgtgttctcctcacacagtatcttggtcacagctcccccaagtgtttacccccaacattgcacttagtgtgcactcagtttagtttgtacctggttgatgaacgactcccactggtgcccatgttgaagtggaaccacggactgccctcccccctcctgctggcccgtctgctcccgccccctagacctagttgtgttcagccgctactcctgggcggacagggtggccagcttcaactcctgcacctcgccggggaaggcgccagcgtccccaggctggcgggacctccacagtccttaccttcaagaatcgactctctcccggcgtttcctctgttggaaccgaagatccagtggcggttacaagaacgcctgaaggcccctaccatcggtctcgctgcagtagtgcctccactccctagcgctcctacccccggcttggttctttttcagttgtccgcggcaggagatgtattttaccagcagctgagaccccaagtcgattcttctctccgcagggatgcagggccccctggagatacccagccggactgccacgccccaactgctagttggacttcacaagatactgctggctgcagccagtggttgaaagcactactgaaagtgcctctcgccccgccggtgtggacggcacccactttcacacacagacagatgctggggagcaccgaactgcggcgcgaagaagaggagggccagcggttgggcgtcttacgcaaggccatggcgcgcggccagcttctgctccagagagacctgggctcgctccccgccgccgagcctccaccagcccccgagtcaggtttggaagacaagctctctgagcgcctcggtgaggcctgggcgggacgcggagccgcttggtgggagcgacagcagggccgtacctccgaaccaggacgccaaacccggcgacccaagcgccggactcagctgtctagttccttttccttgtccggacatgtcgatccaagtgaggatacatcctctcctcattcgcccgagtggccgccggctgatgccttaccattacctcccacaaccccgcctagccaagagctgacccccgacgcctgtgcacagggcgtgccttcagagcagagacaaatgttgagagactacatggcaaaattgcccccccagcgcgatacaccaggttgcgccacaacgccaccacacagccaggcatcctccgttcgtgccacaagatcacagcagcacacacctgtcctgagcagctcgcaacccctgcggaaaaagccgagaatggggttctag

SEQ ID NO: 293965 - DNA, 1047 bp, Artificial Sequence
  derived and/or modified sequence
atggatttcccctcgagcttgcggcctgccctgttcctcacgggacccctcggccttagcgacgtgcctgacttatccttcatgtgtagctggcgagacgcactgaccctcccagaagctcagcctcagaattctgagaacggtgccctgcacgtcaccaaggatctgctctgggaacctgctaccccgggacccttgcccatgctcccccctcttattgatccctgggaccctgggctgacagcgagagatctgctatttagaggaggctgcaggtatcgcaagaggccacgcgtagttcttgatgtgaccgagcaaatcagccgctttctgctggatcacggggatgtcgccttcgcccctctcgggaaactcatgcttgaaaatttcaaactagagggcgctggatcacggactaaaaagaaaacagtcgtgtccgttaagaagctgctgcaagaccttggaggtcaccagccctgggggtgtccatgggcttacctgagtaatcgccaacggagattttctattttgggtggccctatactcggtacatcggtggcctcccatctagcagaacttctgcacgaggagcttgttctccggtgggagcagttactcctggacgaagcctgcaccggcggagctctggcttgggtgcctgggagaaccccacagtttggccaacttgtgtatcctgcgggaggtgctcaggataggctgcacttccaggaagtggtgctaacccccggagacaatccacagttcctgggcaaacccggaagaatccaattgcagggaccagtgaggcaggtggtgacttgtacagttcagggcgaaactttgctggctgtcagatctgactaccattgcgccgtttggaagtttggaaaacagtggcagccaaccctgctccaagcgatgcaggtggagaaaggggcaaccgggatcagtctctctccccatctgcccggtgaattggctatctgtagtagatccggggcagtgtgcctgtggagtcctgaggatgggtaccgccgttttctgtag

SEQ ID NO: 293966 - DNA, 2331 bp, Artificial Sequence
  derived and/or modified sequence
atgctgccacctctgatcgatccctgggatcccggtctgactgccagggatctgctcttccggggtggatgtcgttaccggaaacgtcctagggttgtcctggacgtgacagagcagatttcacgttttctactcgatcatggcgacgtggctttcgccccactgggtaaactgatgctcgagaatttcaagttagagggggcaggctctcggaccaaaaagaaaacggttgtttcggtaaaaaagcttcttcaggacctgggcggacaccagccctggggctgtccatgggcctacctctccaacagacagcggagattttcaatactggggggaccaatcctgggcacaagcgtggcctctcatttggccgagctgctgcacgaggagttggtgctcagatgggaacagctacttctcgacgaagcctgcaccggaggtgcccttgcctgggtgccagggaggacgccgcagttcggacagctggtttacccagctggtggggcacaggatcgcttgcattttcaagaagtcgttctcacacctggggataacccccagttcctgggaaaacccggtcggatacagttacaaggacctgttcgacaagtggtgacctgtactgttcagggcgagacgctactcgccgtaagaagtgactaccattgcgccgtgtggaagtttggcaagcaatggcaacctaccctgctgcaggctatgcaggttgaaaaaggggctactggcatttcgctgtctccccatctgcctggagagctggcaatctgcagtaggtctggggcagtgtgcctctggtccccggaagacggattgcgccagatctatcgggacccagaaaccttggtatttagggacagcagctcttggaggtgggcggacttcacagctcaccctagagtgctgactgtcggcgatcggactggcgtgaagatgcttgatacccagggacctcctggctgcggcctcctgctctttcgcctcggagctgaagcgtcgtgccagaaaggtgagagagtcctgttgacccagtacttgggacacagttcccccaaatgtctgcccccaacactgcatctggtctgcacacaattttcgctatatttggtggacgagaggctccccctagtgccaatgttgaaatggaatcatggcctaccctcacctcttttgctcgccagactgttaccaccaccccgaccctcgtgtgtccaacccctgttgctcggagggcagggcggacagctccagcttctgcacctggctggtgagggagcaagtgtgccacgcctagcaggccctcctcagagtctgccttctcgcatcgactctctgccagcattccctctgctggaacctaagatccagtggcgcttgcaagagcgtcttaaggccccaactatcgggcttgctgcagtggtgcccccactgccctcagcccctacaccgggtcttgtccttttccagcttagtgccgctggagacgtgttctatcaacagcttcgcccacaggtagactctagcctaagacgggatgccggtccccctggagacacacagccggactgtcacgccccaacagccagctggaccagtcaggatacagctggctgtagtcagtggctgaaggcattattgaaggtccccttagcccctcccgtgtggaccgcccctacctttacgcaccggcagatgctcggttcaaccgaactgagacgcgaggaagaggagggtcagcgcctgggcgttcttaggaaagccatggctcgaggtcaactcttgctgcagagagatcttggcagccttcctgcagccgagccaccgccagcacccgaatctggactggaagacaagttatccgaaagactaggtgaagcgtgggccggaaggggcgcagcctggtgggaaaggcagcaggggaggacttccgaaccagggagacagacacgaaggccaaagcgcagaacacagctctcaagtagcttttcactgtctggtcacgtggatccaagtgaggacacctctagcccgcatagtccagaatggccacccgcagacgcccttcccttacctccgactacgcccccatctcaggagttgacaccagatgcgtgtgcccaaggcgtaccttctgaacagaggcagatgcttagggactatatggctaagctgccaccacagagggacacccctgggtgcgcgaccactccccctcactcgcaggcttcaagtgtacgcgctacgcggtcccaacagcacactccagtgttgtctagcagccagccgttgaggaaaaaacctagaatgggattttag

SEQ ID NO: 293967 - DNA, 3679 bp, Artificial Sequence
  derived and/or modified sequence
gtccaaaccggaagaccgtgggtagctgcggcggggctgacccgtcccgagtgccaaagctggggttctacttgagatttccctcgtggtgccagggtccggcgagcatcacgccgaggcccattttccagacgaccacgacgaggccggggtcacctggcgagacgcactgactctgccagaggcccagccccagaactcagagaatggggcactgcatgtgaccaaggacctgctgtgggagccggcaacccctgggcctctccccatgctgcctcccctcatcgatccctgggaccctggcctgactgcccgggacctgcttttccgcggagggtgccggtatcggaagcggccccgagtcgtgctggatgtgactgagcagatcagccggttcctcttggatcatggagacgtagcctttgcgcccctggggaagctgatgctggagaatttcaagctggagggagcggggagccgcactaagaagaagacagtggtcagtgtgaagaagctgctccaggacctcggtggacaccagccctgggggtgtccctgggcttacctcagcaaccgacagcgccgcttctctatcctcgggggccccatcctgggcacgtcggtggcgagccacttggcagagctgctgcacgaggagctggtgctgcggtgggagcagctgcttctggatgaggcctgcactgggggcgcgctggcctgggttcctggaaggacaccccagttcgggcagctggtctaccctgctggaggcgcccaggacaggctgcatttccaagaggtcgttctgaccccaggtgacaatccccaattccttgggaaacctggacgcatccagctccagggacctgtccggcaagtggtgacatgcaccgtccagggagaaactctgctggccgtccgctctgactaccactgtgccgtgtggaagtttggtaaacagtggcagccaacccttctgcaggcaatgcaggtggagaaaggggccacggggatcagcctcagccctcacctgcccggggagctggccatctgcagccgctcgggagccgtctgcctgtggagccctgaggatgggctgcggcaaatctacagggaccctgagaccctcgtgttccgggactcctcttcgtggcgttgggcagacttcactgcgcaccctcgggtgctgaccgtgggtgaccgcaccggagtgaagatgctggacactcagggcccgccgggctgtggtctgttgctttttcgtttgggggcagaggcttcgtgccagaaaggggaacgtgtcctgcttacccagtacctggggcactccagccccaaatgcctcccccctactcttcatctcgtctgtacccagttctctctctacctagtggacgagcgccttcccctggtgccgatgctgaagtggaaccatggcctcccctccccgctcctgctggcccgactgctgcctccgccccggcccagctgcgtgcagcccctgctcctcggaggccagggtgggcagctgcagctgctgcacctggcagaaggggcgtcggtgccccgcctggcaggccccccccagtctcttccttccaggatcgactccctccctgcatttcctctgctggagcctaagatccagtggcggctgcaggagcgcctgaaagcaccgaccataggtctggctgccgtcgtcccgcccttgccctcagcgcccacaccaggcctggtgctcttccagctctcggcggcgggagatgtcttctaccagcagctccgcccccaggtggactccagcctccgcagagatgctgggcctcctggcgacacccaacctgactgccatgcccccacagcttcctggacctcccaggacactgccggctgcagccagtggctgaaggccctgctaaaagtgcccctggctcctcctgtgtggacagcacccaccttcacccaccgccagatgctgggcagcacagagctgcggagggaggaagaggaagggcagcggctgggtgtgctccgcaaggccatggcccgagggcagctcctgctgcagagagacctgggctccctccctgcggcagagccaccccctgcacccgagtcaggcctagaggacaagctcagtgagcgcctgggggaagcctgggcaggccgaggggctgcctggtgggagaggcagcagggcaggacctcggagcccgggagacagaccaggcggcccaagcgccggacccagctgtccagcagcttttcgctcagtggccatgtggatccctcagaggacaccagctcccctcatagccctgagtggccacctgctgatgctctgcccctgccccccacgaccccgccctcccaggagttgactccggatgcatgcgcccagggcgtcccatcagagcagcggcagatgctccgtgactacatggccaagctaccaccccagagggacaccccaggctgtgccaccacacctccccactcccaggcctccagcgtccgggccactcgctcccagcagcacacacccgtcctctctagctctcagcccctccggaagaagcctcgaatgggcttctgaggacacaaggtgggctgccctcaagccccagagagcccctcatccttcctctgggaccagatgtgccttccacagttgaaacttgagaagcagagctcgccaccttctggaggccactgtgatgatgagccaagcaatttggagccaagttgaagggacagggcaacaaaatacagtagtagtttcttttgtattttgtatattcgcctgaagatcatcccgcaaggcaggctggaggtgccggtgggcctgtgttgctgggattttagtctgtgctgggaggcagggctccgctgcgcctcagctgtgggggcctcaggcaggtccctcagttctcacgccttcctgtccagtggaatgggggccaggagtgctggctcctcgtgtttggtgagggtggagtgaggcccctgcagagctgctgatgaggtgggcacagcggccgttggcagctgctgttgtgggttgctttgtcaatctctgccccggtctgatgtttcctacagggagatgccttggatccaggttcagggactaaatacacttggcagctgaagatgaattggaatggtcacgttttttaggctggacagcgtcccgccacagctactacctgacactgagctcatgcagagagatgatggctgatgttccttctcccttgggacatgggtctggcacctgtgggctgtcgatagtgccctctgagcagagggtcacggtcatgtcagtttgggggaattctctgttgtgcctcacagactcccccctttctttcctccctccccttctcattttgatgtctaaagcatcaagtccctcttcctcggagtttctctagctgcagtggaagattctgttttcctgtggggaaaatgctcacttgagattttgcagggacccgggtctgtctggtttctgatgacatagtaagagaaaggtcttttttcaggttggctggtgaaaggaattgcatgtgactcacacaaacaggagctagcccaatcatacactgactcgcgtgggtgttaaaatgtttatcatgcctaagggagacatttatgattaaaccatttatgctac

SEQ ID NO: 293968 - DNA, 1318 bp, Artificial Sequence
  derived and/or modified sequence
ctacttgagatttccctcgtggtgccagggtccggcgagcatcacgccgaggcccattttccagacgaccacgacgaggccggggtcactgcattttctgggaggcactgtgcttgacagtaggaagacgatgctcagatgcagtccctggctgtggagtaacttgagcgtcttgggggtgtagtctgtaaatgatggacttccccagctccctccgccctgcattgtttctgaccggcccccttggtctgagcgacgtccctgacctctctttcatgtgcagctggcgagacgcactgactctgccagaggcccagccccagaactcagagaatggggcactgcatgtgaccaaggacctgctgtgggagccggcaacccctgggcctctccccatgctgcctcccctcatcgatccctgggaccctggcctgactgcccgggacctgcttttccgcggagggtgccggtatcggaagcggccccgagtcgtgctggatgtgactgagcagatcagccggttcctcttggatcatggagacgtagcctttgcgcccctggggaagctgatgctggagaatttcaagctggagggagcggggagccgcactaagaagaagacagtggtcagtgtgaagaagctgctccaggacctcggtggacaccagccctgggggtgtccctgggcttacctcagcaaccgacagcgccgcttctctatcctcgggggccccatcctgggcacgtcggtggcgagccacttggcagagctgctgcacgaggagctggtgctgcggtgggagcagctgcttctggatgaggcctgcactgggggcgcgctggcctgggttcctggaaggacaccccagttcgggcagctggtctaccctgctggaggcgcccaggacaggctgcatttccaagaggtcgttctgaccccaggtgacaatccccaattccttgggaaacctggacgcatccagctccagggacctgtccggcaagtggtgacatgcaccgtccagggagaaactctgctggccgtccgctctgactaccactgtgccgtgtggaagtttggtaaacagtggcagccaacccttctgcaggcaatgcaggtggagaaaggggccacggggatcagcctcagccctcacctgcccggggagctggccatctgcagccgctcgggagccgtctgcctgtggagccctgaggatgggtatcgccgcttcctgtgaaaccccccaccctaacgaactgaactccgccctgttgagcatgtcgcgacccttgagccccttccccatcagcctgt

SEQ ID NO: 293969 - DNA, 3682 bp, Artificial Sequence
  derived and/or modified sequence
gtccaaaccggaagaccgtgggtagctgcggcggggctgacccgtcccgagtgccaaagctggggttctacttgagatttccctcgtggtgccagggtccggcgagcatcacgccgaggcccattttccagacgaccacgacgaggccggggtcacctggcgagacgcactgactctgccagaggcccagccccagaactcagagaatggggcactgcatgtgaccaaggacctgctgtgggagccggcaacccctgggcctctccccatgctgcctcccctcatcgatccctgggaccctggcctgactgcccgggacctgcttttccgcggagggtgccggtatcggaagcggccccgagtcgtgctggatgtgactgagcagatcagccggttcctcttggatcatggagacgtagcctttgcgcccctggggaagctgatgctggagaatttcaagctggagggagcggggagccgcactaagaagaagacagtggtcagtgtgaagaagctgctccaggacctcggtggacaccagccctgggggtgtccctgggcttacctcagcaaccgacagcgccgcttctctatcctcgggggccccatcctgggcacgtcggtggcgagccacttggcagagctgctgcacgaggagctggtgctgcggtgggagcagctgcttctggatgaggcctgcactgggggcgcgctggcctgggttcctggaaggacaccccagttcgggcagctggtctaccctgctggaggcgcccaggacaggctgcatttccaagaggtcgttctgaccccaggtgacaatccccaattccttgggaaacctggacgcatccagctccagggacctgtccggcaagtggtgacatgcaccgtccagggagaaactctgctggccgtccgctctgactaccactgtgccgtgtggaagtttggtaaacagtggcagccaacccttctgcaggcaatgcaggtggagaaaggggccacggggatcagcctcagccctcacctgcccggggagctggccatctgcagccgctcgggagccgtctgcctgtggagccctgaggatgggctgcggcaaatctacagggaccctgagaccctcgtgttccgggactcctcttcgtggcgttgggcagacttcactgcgcaccctcgggtgctgaccgtgggtgaccgcaccggagtgaagatgctggacactcagggcccgccgggctgtggtctgttgctttttcgtttgggggcagaggcttcgtgccagaaaggggaacgtgtcctgcttacccagtacctggggcactccagccccaaatgcctcccccctactcttcatctcgtctgtacccagttctctctctacctagtggacgagcgccttcccctggtgccgatgctgaagtggaaccatggcctcccctccccgctcctgctggcccgactgctgcctccgccccggcccagctgcgtgcagcccctgctcctcggaggccagggtgggcagctgcagctgctgcacctggcaggagaaggggcgtcggtgccccgcctggcaggccccccccagtctcttccttccaggatcgactccctccctgcatttcctctgctggagcctaagatccagtggcggctgcaggagcgcctgaaagcaccgaccataggtctggctgccgtcgtcccgcccttgccctcagcgcccacaccaggcctggtgctcttccagctctcggcggcgggagatgtcttctaccagcagctccgcccccaggtggactccagcctccgcagagatgctgggcctcctggcgacacccaacctgactgccatgcccccacagcttcctggacctcccaggacactgccggctgcagccagtggctgaaggccctgctaaaagtgcccctggctcctcctgtgtggacagcacccaccttcacccaccgccagatgctgggcagcacagagctgcggagggaggaagaggaagggcagcggctgggtgtgctccgcaaggccatggcccgagggcagctcctgctgcagagagacctgggctccctccctgcggcagagccaccccctgcacccgagtcaggcctagaggacaagctcagtgagcgcctgggggaagcctgggcaggccgaggggctgcctggtgggagaggcagcagggcaggacctcggagcccgggagacagaccaggcggcccaagcgccggacccagctgtccagcagcttttcgctcagtggccatgtggatccctcagaggacaccagctcccctcatagccctgagtggccacctgctgatgctctgcccctgccccccacgaccccgccctcccaggagttgactccggatgcatgcgcccagggcgtcccatcagagcagcggcagatgctccgtgactacatggccaagctaccaccccagagggacaccccaggctgtgccaccacacctccccactcccaggcctccagcgtccgggccactcgctcccagcagcacacacccgtcctctctagctctcagcccctccggaagaagcctcgaatgggcttctgaggacacaaggtgggctgccctcaagccccagagagcccctcatccttcctctgggaccagatgtgccttccacagttgaaacttgagaagcagagctcgccaccttctggaggccactgtgatgatgagccaagcaatttggagccaagttgaagggacagggcaacaaaatacagtagtagtttcttttgtattttgtatattcgcctgaagatcatcccgcaaggcaggctggaggtgccggtgggcctgtgttgctgggattttagtctgtgctgggaggcagggctccgctgcgcctcagctgtgggggcctcaggcaggtccctcagttctcacgccttcctgtccagtggaatgggggccaggagtgctggctcctcgtgtttggtgagggtggagtgaggcccctgcagagctgctgatgaggtgggcacagcggccgttggcagctgctgttgtgggttgctttgtcaatctctgccccggtctgatgtttcctacagggagatgccttggatccaggttcagggactaaatacacttggcagctgaagatgaattggaatggtcacgttttttaggctggacagcgtcccgccacagctactacctgacactgagctcatgcagagagatgatggctgatgttccttctcccttgggacatgggtctggcacctgtgggctgtcgatagtgccctctgagcagagggtcacggtcatgtcagtttgggggaattctctgttgtgcctcacagactcccccctttctttcctccctccccttctcattttgatgtctaaagcatcaagtccctcttcctcggagtttctctagctgcagtggaagattctgttttcctgtggggaaaatgctcacttgagattttgcagggacccgggtctgtctggtttctgatgacatagtaagagaaaggtcttttttcaggttggctggtgaaaggaattgcatgtgactcacacaaacaggagctagcccaatcatacactgactcgcgtgggtgttaaaatgtttatcatgcctaagggagacatttatgattaaaccatttatgctac

SEQ ID NO: 293970 - DNA, 2747 bp, Artificial Sequence
  derived and/or modified sequence
gtgggtagctgcggcggggctgacccgtcccgagtgccaaagctggggttctacttgagatttccctcgtggtgccagggtccggcgagcatcacgccgaggcccattttccagacgaccacgacgaggccggggtcacatccctgggaccctggcctgactgcccgggacctgcttttccgcggagggtgccggtatcggaagcggccccgagtcgtgctggatgtgactgagcagccggttcctcttggatcatggagacgtagcctttgcgcccctggggaagctgatgctggagaatttcaagctggagggagcggggagccgcactaagaagaagacagtggtcagtgtgaagaagctgctccaggacctcggtggacaccagccctgggggtgtccctgggcttacctcagcaaccgacagcgccgcttctctatcctcgggggccccatcctgggcacgtcggtggcgagccacttggcagagctgctgcacgaggagctggtgctgcggtgggagcagctgcttctggatgaggcctgcactgggggcgcgctggcctgggttcctggaaggacaccccagttcgggcagctggtctaccctgctggaggcgcccaggacaggctgcatttccaagaggtcgttctgaccccaggtgacaatccccaattccttgggaaacctggacgcatccagctccagggacctgtccggcaagtggtgacatgcaccgtccagggagaaactctgctggccgtccgctctgactaccactgtgccgtgtggaagtttggtaaacagtggcagccaacccttctgcaggcaatgcaggtggagaaaggggccacggggatcagcctcagccctcacctgcccggggagctggccatctgcagccgctcgggagccgtctgcctgtggagccctgaggatgggtatcgccgcttcctgtgaaaccccccaccctaacgaactgaactccgccctgttgagcatgtcgcgacccttgagccccttccccatcagcctgtccccctgcccacggcttgcctgtctccccaaggctgcggcaaatctacagggaccctgagaccctcgtgttccgggactcctcttcgtggcgttgggcagacttcactgcgcaccctcgggtgctgaccgtgggtgaccgcaccggagtgaagatgctggacactcagatggtcactagaggctgctgcttaccagcggctctgctgggcccagacaaccacccagcaaaccaaactcaaccctggatgaatctgtggcccaaacacgcagtggatcccacagtcggtgctaacagttctctctctacctagtggacgagcgccttcccctggtgccgatgctgaagtggaaccatggcctcccctccccgctcctgctggcccgactgctgcctccgccccggcccagctgcgtgcagcccctgctcctcggaggccagggtgggcagctgcagctgctgcacctggcagaaggggcgtcggtgccccgcctggcaggccccccccagtctcttccttccaggatcgactccctccctgcatttcctctgctggagcctaagatccagtggcggctgcaggagcgcctgaaagcaccgaccataggtctggctgccgtcgtcccgcccttgccctcagcgcccacaccaggcctggtgctcttccagctctcggcggcgggagatgtcttctaccagcagctccgcccccaggtggactccagcctccgcagagatgctgggcctcctggcgacacccaacctgactgccatgcccccacagcttcctggacctcccaggacactgccggctgcagccagtggctgaaggccctgctaaaagtgcccctggctcctcctgtgtggacagcacccaccttcacccaccgccagatgctgggcagcacagagctgcggagggaggaagaggaagggcagcggctgggtgtgctccgcaaggccatggcccgagggcagctcctgctgcagagagacctgggctccctccctgcggcagagccaccccctgcacccgagtcaggcctagaggacaagctcagtgagcgcctgggggaagcctgggcaggccgaggggctgcctggtgggagaggcagcagggcaggacctcggagcccgggagacagaccaggcggcccaagcgccggacccagctgtccagcagcttttcgctcagtggccatgtggatccctcagaggacaccagctcccctcatagccctgagtggccacctgctgatgctctgcccctgccccccacgaccccgccctcccaggagttgactccggatgcatgcgcccagggcgtcccatcagagcagcggcagatgctccgtgactacatggccaagctaccaccccagagggacaccccaggctgtgccaccacacctccccactcccaggcctccagcgtccgggccactcgctcccagcagcacacacccgtcctctctagctctcagcccctccggaagaagcctcgaatgggcttctgaggacacaaggtgggctgccctcaagccccagagagcccctcatccttcctctgggaccagatgtgccttccacagttgaaacttgagaagcagagctcgccaccttctggaggccactgtgatgatgagccaagcaatttggagccaagttgaagggacagggcaacaaaatacagtagtagtttcttttgt

SEQ ID NO: 293971 - protein, 228 aa, Artificial Sequence
  derived and/or modified sequence
MYHLMKFIPLYSKVQRPCTSTPMIDSFVRLMNEFTNMPVPPKPRQALGDKIVRDIRPGAAFEPTYIYRLLTVNKSSLSEKGRQEDAEEYLGFILNGLHEEMLNLKKLLSPSNEKLTISNGPKNHSVNEEEQEEQGEGSEDEWEQVGPRNKTSVTRQADFVQTPITGFWWTHQVCGLPAEFKRICHFAAIFHVAVGYPVRQDTHSPGCTGELGGKRICPRLYHKNQTRG

SEQ ID NO: 293972 - protein, 62 aa, Artificial Sequence
  derived and/or modified sequence
MALHSPQYIFGDFSPDEFNQFFVTPRSSVEDKNIRELSLVSMKSLNPVTLCREPPATVFQAH

SEQ ID NO: 293973 - DNA, 189 bp, Artificial Sequence
  derived and/or modified sequence
atggcactgcactccccccagtacatctttggcgacttttctccggatgaatttaaccaattctttgtgactccgcggtcttctgtcgaagataaaaacattcgagaattgagcctggtgagtatgaaaagcctgaatcccgtaaccctgtgccgcgagcccccggcaactgtgtttcaggcccattag

SEQ ID NO: 293974 - DNA, 189 bp, Artificial Sequence
  derived and/or modified sequence
atggccctgcacagcccccagtacatctttggagacttctccccagatgagttcaaccagttctttgtgacccccaggagctctgtggaggacaagaacatccgggagctgagcctggtgtccatgaagagcctgaaccctgtgaccctgtgccgggagcccccagccaccgtcttccaggcccactag

SEQ ID NO: 293975 - DNA, 189 bp, Artificial Sequence
  derived and/or modified sequence
atggccctgcacagcccccagtacatcttcggcgacttcagccccgacgagttcaaccagttcttcgtgacccccagatccagcgtggaagacaaaaatattcgtgaactttctcttgtttcgatgaaaagcctgaatccagtgaccctttgccgagagccgcctgctacagtgttccaggcacactag

SEQ ID NO: 293976 - DNA, 189 bp, Artificial Sequence
  derived and/or modified sequence
atggctctgcactcaccccagtacattttcggcgatttcagcccagatgaatttaaccagttcttcgtgacaccaaggagcagcgtagaggataagaacatcagagaactttctctggtaagcatgaaatcccttaatcctgttaccctctgtagagaaccccctgccactgttttccaggctcactag

SEQ ID NO: 293977 - DNA, 3311 bp, Artificial Sequence
  derived and/or modified sequence
gcgggcgagaagatggcggcggcgggggaagcagcgtgagcagccggaggatcgcggagtcccaatgaaacgggcagccatggccctccacagcccgcagtatatttttggagattttagccctgatgaattcaatcaattctttgtgactcctcgatcttcagttgagcttcctccatacagtggaacagttctgtgtggcacacaggctgtggataaactacctgatggacaagaatatcagagaattgagtttggtgtcgatgaagtcattgaacccagtgacactttgccgagaacccccagctacagtatttcaagcacactgaaccctcaggcccctgaatttattctcggttgtacagcttccaaaataacccctgatggtatcactaaagaagcaagctatggctccatcgactgccagtacccaggctctgccctcgctttggatggaagttctaatgtggaggcggaagttttggaaaatgatggtgtctcaggtggtcttggacaaagggagcgtaaaaagaagaaaaagcggccacctggatattacagctatttgaaagatggtggcgatgatagtatctccacagaagccctggtcaatggccatgccaattcagcagtcccgaacagtgtcagtgcagaggatgcagaatttatgggtgacatgcccccgtcagttacgcccaggacttgtaacagcccccagaactccacagactctgtcagtgacattgtgcctgacagtcctttccccggagcactcggcagtgacaccaggactgcagggcagccagaggggggccccggggctgattttggtcagtcctgcttccctgcagaggctggcagagacaccctgtcaaggacagctggggctcagccctgcgttggtaccgatactactgaaaaccttggagttgctaatggacaaatacttgaatcctcgggtgagggcacagctaccaacggggtggagttgcacaccacggaaagcatagacttggacccaaccaaacccgagagtgcatcacctcctgctgacggcacgggctctgcatcaggcacccttcctgtcagccagcccaagtcctgggccagcctctttcatgattctaagccctcttcctcctcgccggtggcctatgtggaaactaagtattcccctcccgccatatctcccctggtttctgaaaagcaggttgaagtcaaagaagggcttgttccggtttcagaggatcctgtagccataaagattgcagagttgctggagaatgtaaccctaatccataaaccagtgtcgttgcaaccccgtgggctgatcaataaagggaactggtgctacattaatgctacactgcaggcattggttgcttgcccgccgatgtaccacctgatgaagttcattcctctgtattccaaagtgcaaaggccttgtacgtcaacacccatgatagacagctttgttcggctaatgaatgagttcactaatatgccagtacctccaaaaccccgacaagctcttggagataaaatcgtgagggatattcgccctggagctgcctttgagcccacatatatttacagactcctgacagttaacaagtcaagcctgtctgaaaagggtcgacaagaagatgctgaggaatacttaggcttcattctaaatggacttcatgaggaaatgttgaacctaaagaagcttctctcaccaagtaatgaaaaacttacgatttccaacggccccaaaaaccactcggtcaatgaagaagagcaggaagaacaaggtgaaggaagcgaggatgaatgggaacaagtgggcccccggaacaagacttccgtcacccgccaggcggattttgttcagactccaatcaccggcttttggtggacacatcaggtctgtggtttaccagcagagttcaaaagaatctgccactttgcagccatttttcacgttgcagttggatatccagtcagacaagatacgcacagtccaggatgcactggagagcttggtggcaagagaatctgtccaaggttataccacaaaaaccaaacaagaggttgagataagtcgaagagtgactctggaaaaactccctcctgtcctcgtgctgcacctgaaacgattcgtttatgagaagactggtgggtgccagaagcttatcaaaaatattgaatatcctgtggacttggaaattagtaaagaactgctttctccaggggttaaaaataagaattttaaatgccaccgaacctatcggctctttgcagtggtctaccatcacggcaacagtgcgacgggcggccattacactacagacgtcttccagatcggtctgaatggctggctgcgcatcgatgaccagacagtcaaggtgatcaaccagtaccaggtggtgaaaccaactgctgaacgcacagcctacctcctgtattaccgccgagtggacctgctgtaaaccctgtgtgcgctgtgtgtgcgcccagtgcccgcttcgtaggacaccacctcacactcacttcccgcctctctttagtggctctttagagagaaactctttctccctttgcaaaaatgggctagaatgaaaaggagatgccttggggttcgtgcacaacacagcttctgttgactctaacttccaaatcaaaatcatttggttgaaacagactgttgcttgattttagaaaatacacaaaaacccatatttctgaaataatgctgattcctgagataagaaagtggatttgatccccagtctcattgcttagtagaataaatcctgcaccagcaacaacacttgtaaatttgtgaaaatgaattttatctttccttaaaaaagaaattttttaatccatcacacttttcttccctaccctttagtttttgataaatgataaaaatgagccagttatcaaagaagaactagttcttacttcaaaagaaaaataaacataaaaaataagttgctggttcctaacaggaaaaattttaataattgtactgagagaaactgcttacgtacacattgcagatcaaatatttggagttaaaatgttagtctacatagatgggtgattgtaactttattgccattaaaagatttcaaattgcattcatgcttctgtgtacacataatgaaaaatgggcaaataatgaagatctctccttcagtctgctctgtttaattctgctgtctgctcttctctaatgctgcgtccctaattgtacacagtttagtgatatctaggagtataaagttgtcgcccatcaataaaaatcacaaagttggttt

SEQ ID NO: 293978 - DNA, 3067 bp, Artificial Sequence
  derived and/or modified sequence
gatgcgagtgtgtatgtgcgggcgagaagatggcggcggcgggggaagcagcgtgagcagccggaggatcgcggagtcccaatgaaacgggcagccatggccctccacagcccgcagtatatttttggagattttagccctgatgaattcaatcaattctttgtgactcctcgatcttcagttgaggacaagaatatcagagaattgagtttggtgtcgatgaagtcattgaacccagtgacactttgccgagaacccccagctacagtatttcaagcacactgaaccctcaggcccctgaatttattctcggttgtacagcttccaaaataacccctgatggtatcactaaagaagcaagctatggctccatcgactgccagtacccaggctctgccctcgctttggatggaagttctaatgtggaggcggaagttttggaaaatgatggtgtctcaggtggtcttggacaaagggagcgtaaaaagaagaaaaagcggccacctggatattacagctatttgaaagatggtggcgatgatagtatctccacagaagccctggtcaatggccatgccaattcagcagtcccgaacagtgtcagtgcagaggatgcagaatttatgggtgacatgcccccgtcagttacgcccaggacttgtaacagcccccagaactccacagactctgtcagtgacattgtgcctgacagtcctttccccggagcactcggcagtgacaccaggactgcagggcagccagaggggggccccggggctgattttggtcagtcctgcttccctgcagaggctggcagagacaccctgtcaaggacagctggggctcagccctgcgttggtaccgatactactgaaaaccttggagttgctaatggacaaatacttgaatcctcgggtgagggcacagctaccaacggggtggagttgcacaccacggaaagcatagacttggacccaaccaaacccgagagtgcatcacctcctgctgacggcacgggctctgcatcaggcacccttcctgtcagccagcccaagtcctgggccagcctctttcatgattctaagccctcttcctcctcgccggtggcctatgtggaaactaagtattcccctcccgccatatctcccctggtttctgaaaagcaggttgaagtcaaagaagggcttgttccggtttcagaggatcctgtagccataaagattgcagtgttcggctaatgaatgagttcactaatatgccagtacctccaaaaccccgacaagctcttggagataaaatcgtgagggatattcgccctggagctgcctttgagcccacatatatttacagactcctgacagttaacaagtcaagcctgtctgaaaagggtcgacaagaagatgctgaggaatacttaggcttcattctaaatggacttcatgaggaaatgttgaacctaaagaagcttctctcaccaagtaatgaaaaacttacgatttccaacggccccaaaaaccactcggtcaatgaagaagagcaggaagaacaaggtgaaggaagcgaggatgaatgggaacaagtgggcccccggaacaagacttccgtcacccgccaggcggattttgttcagactccaatcaccggcatttttggtggacacatcaggtctgtggtttaccagcagagttcaaaagaatctgccactttgcagccatttttcacgttgcagttggatatccagtcagacaagatacgcacagtccaggatgcactggagagcttggtggcaagagaatctgtccaaggttataccacaaaaaccaaacaagaggttgagataagtcgaagagtgactctggaaaaactccctcctgtcctcgtgctgcacctgaaacgattcgtttatgagaagactggtgggtgccagaagcttatcaaaaatattgaatatcctgtggacttggaaattagtaaagaactgctttctccaggggttaaaaataagaattttaaatgccaccgaacctatcggctctttgcagtggtctaccatcacggcaacagtgcgacgggcggccattacactacagacgtcttccagatcggtctgaatggctggctgcgcatcgatgaccagacagtcaaggtgatcaaccagtaccaggtggtgaaaccaactgctgaacgcacagcctacctcctgtattaccgccgagtggacctgctgtaaaccctgtgtgcgctgtgtgtgcgcccagtgcccgcttcgtaggacaccacctcacactcacttcccgcctctctttagtggctctttagagagaaactctttctccctttgcaaaaatgggctagaatgaaaaggagatgccttggggttcgtgcacaacacagcttctgttgactctaacttccaaatcaaaatcatttggttgaaacagactgttgcttgattttagaaaatacacaaaaacccatatttctgaaataatgctgattcctgagataagaaagtggatttgatccccagtctcattgcttagtagaataaatcctgcaccagcaacaacacttgtaaatttgtgaaaatgaattttatctttccttaaaaaagaaattttttaatccatcacacttttcttccctaccctttagtttttgataaatgataaaaatgagccagttatcaaagaagaactagttcttacttcaaaagaaaaataaacataaaaaataagttgctggttcctaacaggaaaaattttaataattgtactgagagaaactgcttacgtacacattgcagatcaaatatttggagttaaaatgttagtctacatagatgggtgattgtaactttattgccattaaaagatttcaaattgcattcatgcttctgtgtacacataatgaaaaatgggcaaataatgaagatctctccttcagtctgctctgtttaattctgctgtctgctcttctctaatgctgcgtccctaattgtacacagtttagtgatatctaggagtataaagttgtcgcccatcaataaaaatcacaaagttggttt

SEQ ID NO: 293979 - protein, 693 aa, Artificial Sequence
  derived and/or modified sequence
MTPQSLLQTTLFLLSLLFLVQGAHGRGHREDFRFCSQRNQTHRSSLHYKPTPDLRISIENSEEALTVHAPFPAAHPASRSFPDPRGLYHFCLYWNRHAGRLHLLYGKRDFLLSDKASSLLCFQHQEESLAQGPPLLATSVTSWWSPQNISLPSAASFTFSFHSPPHTAAHNASVDMCELKRDLQLLSQFLKHPQKASRRPSAAPASQQLQSLESKLTSVRFMGDMVSFEEDRINATVWKLQPTAGLQDLHIHSRQEEEQSEIMEYSVLLPRTLFQRTKGRSGEAEKRLLLVDFSSQALFQDKNSSQVLGEKVLGIVVQNTKVANLTEPVVLTFQHQLQPKNVTLQCVFWVEDPTLSSPGHWSSAGCETVRRETQTSCFCNHLTYFAVLMVSSVEVDAVHKHYLSLLSYVGCVVSALACLVTIAAYLCSRVPLPCRRKPRDYTIKVHMNLLLAVFLLDTSFLLSEPVALTGSEAGCRASAIFLHFSLLTCLSWMGLEGYNLYRLVVEVFGTYVPGYLLKLSAMGWGFPIFLVTLVALVDVDNYGPIILAVHRTPEGVIYPSMCWIRDSLVSYITNLGLFSLVFLFNMAMLATMVVQILRLRPHTQKWSHVLTLLGLSLVLGLPWALIFFSFASGTFQLVVLYLFSIITSFQGFLIFIWYWSMRLQARGGPSPLKSNSDSARLPISSGSTSSSRI

SEQ ID NO: 293980 - DNA, 3689 bp, Artificial Sequence
  derived and/or modified sequence
gcagggtctcactctgtcacccaggctggagtgcagtggcgcagttatagctcactgcagcctcgacctcctgggctcaagtgatccttccacctcagcctccctagtagctgggaccacaggtggtgacttccaagagtgactccgtcggaggaaaatgactccccagtcgctgctgcagacgacactgttcctgctgagtctgctcttcctggtccaaggtgcccacggcaggggccacagggaagactttcgcttctgcagccagcggaaccagacacacaggagcagcctccactacaaacccacaccagacctgcgcatctccatcgagaactccgaagaggccctcacagtccatgcccctttccctgcagcccaccctgcttcccgatccttccctgaccccaggggcctctaccacttctgcctctactggaaccgacatgctgggagattacatcttctctatggcaagcgtgacttcttgctgagtgacaaagcctctagcctcctctgcttccagcaccaggaggagagcctggctcagggccccccgctgttagccacttctgtcacctcctggtggagccctcagaacatcagcctgcccagtgccgccagcttcaccttctccttccacagtcctccccacacggccgctcacaatgcctcggtggacatgtgcgagctcaaaagggacctccagctgctcagccagttcctgaagcatccccagaaggcctcaaggaggccctcggctgcccccgccagccagcagttgcagagcctggagtcgaaactgacctctgtgagattcatgggggacatggtgtccttcgaggaggaccggatcaacgccacggtgtggaagctccagcccacagccggcctccaggacctgcacatccactcccggcaggaggaggagcagagcgagatcatggagtactcggtgctgctgcctcgaacactcttccagaggacgaaaggccggagcggggaggctgagaagagactcctcctggtggacttcagcagccaagccctgttccaggacaagaattccagccaagtcctgggtgagaaggtcttggggattgtggtacagaacaccaaagtagccaacctcacggagcccgtggtgctcactttccagcaccagctacagccgaagaatgtgactctgcaatgtgtgttctgggttgaagaccccacattgagcagcccggggcattggagcagtgctgggtgtgagaccgtcaggagagaaacccaaacatcctgcttctgcaaccacttgacctactttgcagtgctgatggtctcctcggtggaggtggacgccgtgcacaagcactacctgagcctcctctcctacgtgggctgtgtcgtctctgccctggcctgccttgtcaccattgccgcctacctctgctccagggtgcccctgccgtgcaggaggaaacctcgggactacaccatcaaggtgcacatgaacctgctgctggccgtcttcctgctggacacgagcttcctgctcagcgagccggtggccctgacaggctctgaggctggctgccgagccagtgccatcttcctgcacttctccctgctcacctgcctttcctggatgggcctcgaggggtacaacctctaccgactcgtggtggaggtctttggcacctatgtccctggctacctactcaagctgagcgccatgggctggggcttccccatctttctggtgacgctggtggccctggtggatgtggacaactatggccccatcatcttggctgtgcataggactccagagggcgtcatctacccttccatgtgctggatccgggactccctggtcagctacatcaccaacctgggcctcttcagcctggtgtttctgttcaacatggccatgctagccaccatggtggtgcagatcctgcggctgcgcccccacacccaaaagtggtcacatgtgctgacactgctgggcctcagcctggtccttggcctgccctgggccttgatcttcttctcctttgcttctggcaccttccagcttgtcgtcctctaccttttcagcatcatcacctccttccaaggcttcctcatcttcatctggtactggtccatgcggctgcaggcccggggtggcccctcccctctgaagagcaactcagacagcgccaggctccccatcagctcgggcagcacctcgtccagccgcatctaggcctccagcccacctgcccatgtgatgaagcagagattcggcctcgtcgcacactgcctgtggcccccgagcccggcccagccccaggccagtcagccgcagactttggaaagcccaacgaccatggagagatgggccgttgccatggtggacggactcccgggctgggcttttgaattggccttggggactactcggctctcactcagctcccacgggactcagaagtgcgccgccatgctgcctagggtactgtccccacatctgtcccaacccagctggaggcctggtctctccttacaacccctgggcccagccctcattgctgggggccaggccttggatcttgagggtctggcacatccttaatcctgtgcccctgcctgggacagaaatgtggctccagttgctctgtctctcgtggtcaccctgagggcactctgcatcctctgtcattttaacctcaggtggcacccagggcgaatggggcccagggcagaccttcagggccagagccctggcggaggagaggccctttgccaggagcacagcagcagctcgcctacctctgagcccaggccccctccctccctcagccccccagtcctccctccatcttccctggggttctcctcctctcccagggcctccttgctccttcgttcacagctgggggtccccgattccaatgctgttttttggggagtggtttccaggagctgcctggtgtctgctgtaaatgtttgtctactgcacaagcctcggcctgcccctgagccaggctcggtaccgatgcgtgggctgggctaggtccctctgtccatctgggcctttgtatgagctgcattgcccttgctcaccctgaccaagcacacgcctcagaggggccctcagcctctcctgaagccctcttgtggcaagaactgtggaccatgccagtcccgtctggtttccatcccaccactccaaggactgagactgacctcctctggtgacactggcctagggcctgacactctcctaagaggttctctccaagcccccaaatagctccaggcgccctcggccgcccatcatggttaattctgtccaacaaacacacacgggtagattgctggcctgttgtaggtggtagggacacagatgaccgacctggtcactcctcctgccaacattcagtctggtatgtgaggcgtgcgtgaagcaagaactcctggagctacagggacagggagccatcattcctgcctgggaatcctggaagacttcctgcaggagtcagcgttcaatcttgaccttgaagatgggaaggatgttctttttacgtaccaattcttttgtcttttgatattaaaaagaagtacatgttcattgtagagaatttggaaactgtagaagagaatcaagaagaaaaataaaaatcagctgttgtaatcacctagcaaactgg

SEQ ID NO: 293981 - DNA, 3972 bp, Artificial Sequence
  derived and/or modified sequence
gagaaatccatgactcacatatatcgtccgtcatccccagtcaagctcagggaggagggaggagcccagctggggcaggagaggggtgtctccccaccaaacaaacccggtccctccctctccgcactagctgtctgccctgccctgccgtaggagatgggctgggagcctcccacgctctccagctcactcggcaggcagcggggaccagggctggcaggttaagcctctgggggtggatcctgaaaggtggtccagccgcctggccctgcgtgggaccctccacctggcagcaggtacccaaacaagggctggacagcaggtgggaaggggaatagtgtgagtgtggccagcccaaccaccacacagtccacactcccagctaacactcctggtctcttccaggtggtgacttccaagagtgactccgtcggaggaaaatgactccccagtcgctgctgcagacgacactgttcctgctgagtctgctcttcctggtccaaggtgcccacggcaggggccacagggaagactttcgcttctgcagccagcggaaccagacacacaggagcagcctccactacaaacccacaccagacctgcgcatctccatcgagaactccgaagaggccctcacagtccatgcccctttccctgcagcccaccctgcttcccgatccttccctgaccccaggggcctctaccacttctgcctctactggaaccgacatgctgggagattacatcttctctatggcaagcgtgacttcttgctgagtgacaaagcctctagcctcctctgcttccagcaccaggaggagagcctggctcagggccccccgctgttagccacttctgtcacctcctggtggagccctcagaacatcagcctgcccagtgccgccagcttcaccttctccttccacagtcctccccacacggccgctcacaatgcctcggtggacatgtgcgagctcaaaagggacctccagctgctcagccagttcctgaagcatccccagaaggcctcaaggaggccctcggctgcccccgccagccagcagttgcagagcctggagtcgaaactgacctctgtgagattcatgggggacatggtgtccttcgaggaggaccggatcaacgccacggtgtggaagctccagcccacagccggcctccaggacctgcacatccactcccggcaggaggaggagcagagcgagatcatggagtactcggtgctgctgcctcgaacactcttccagaggacgaaaggccggagcggggaggctgagaagagactcctcctggtggacttcagcagccaagccctgttccaggacaagaattccagccaagtcctgggtgagaaggtcttggggattgtggtacagaacaccaaagtagccaacctcacggagcccgtggtgctcactttccagcaccagctacagccgaagaatgtgactctgcaatgtgtgttctgggttgaagaccccacattgagcagcccggggcattggagcagtgctgggtgtgagaccgtcaggagagaaacccaaacatcctgcttctgcaaccacttgacctactttgcagtgctgatggtctcctcggtggaggtggacgccgtgcacaagcactacctgagcctcctctcctacgtgggctgtgtcgtctctgccctggcctgccttgtcaccattgccgcctacctctgctccagggtgcccctgccgtgcaggaggaaacctcgggactacaccatcaaggtgcacatgaacctgctgctggccgtcttcctgctggacacgagcttcctgctcagcgagccggtggccctgacaggctctgaggctggctgccgagccagtgccatcttcctgcacttctccctgctcacctgcctttcctggatgggcctcgaggggtacaacctctaccgactcgtggtggaggtctttggcacctatgtccctggctacctactcaagctgagcgccatgggctggggcttccccatctttctggtgacgctggtggccctggtggatgtggacaactatggccccatcatcttggctgtgcataggactccagagggcgtcatctacccttccatgtgctggatccgggactccctggtcagctacatcaccaacctgggcctcttcagcctggtgtttctgttcaacatggccatgctagccaccatggtggtgcagatcctgcggctgcgcccccacacccaaaagtggtcacatgtgctgacactgctgggcctcagcctggtccttggcctgccctgggccttgatcttcttctcctttgcttctggcaccttccagcttgtcgtcctctaccttttcagcatcatcacctccttccaaggcttcctcatcttcatctggtactggtccatgcggctgcaggcccggggtggcccctcccctctgaagagcaactcagacagcgccaggctccccatcagctcgggcagcacctcgtccagccgcatctaggcctccagcccacctgcccatgtgatgaagcagagattcggcctcgtcgcacactgcctgtggcccccgagcccggcccagccccaggccagtcagccgcagactttggaaagcccaacgaccatggagagatgggccgttgccatggtggacggactcccgggctgggcttttgaattggccttggggactactcggctctcactcagctcccacgggactcagaagtgcgccgccatgctgcctagggtactgtccccacatctgtcccaacccagctggaggcctggtctctccttacaacccctgggcccagccctcattgctgggggccaggccttggatcttgagggtctggcacatccttaatcctgtgcccctgcctgggacagaaatgtggctccagttgctctgtctctcgtggtcaccctgagggcactctgcatcctctgtcattttaacctcaggtggcacccagggcgaatggggcccagggcagaccttcagggccagagccctggcggaggagaggccctttgccaggagcacagcagcagctcgcctacctctgagcccaggccccctccctccctcagccccccagtcctccctccatcttccctggggttctcctcctctcccagggcctccttgctccttcgttcacagctgggggtccccgattccaatgctgttttttggggagtggtttccaggagctgcctggtgtctgctgtaaatgtttgtctactgcacaagcctcggcctgcccctgagccaggctcggtaccgatgcgtgggctgggctaggtccctctgtccatctgggcctttgtatgagctgcattgcccttgctcaccctgaccaagcacacgcctcagaggggccctcagcctctcctgaagccctcttgtggcaagaactgtggaccatgccagtcccgtctggtttccatcccaccactccaaggactgagactgacctcctctggtgacactggcctagggcctgacactctcctaagaggttctctccaagcccccaaatagctccaggcgccctcggccgcccatcatggttaattctgtccaacaaacacacacgggtagattgctggcctgttgtaggtggtagggacacagatgaccgacctggtcactcctcctgccaacattcagtctggtatgtgaggcgtgcgtgaagcaagaactcctggagctacagggacagggagccatcattcctgcctgggaatcctggaagacttcctgcaggagtcagcgttcaatcttgaccttgaagatgggaaggatgttctttttacgtaccaattcttttgtcttttgatattaaaaagaagtacatgttcattgtagagaatttggaaactgtagaagagaatcaagaagaaaaataaaaatcagctgttgtaatcacctagcaaactgg

SEQ ID NO: 293982 - DNA, 3863 bp, Artificial Sequence
  derived and/or modified sequence
gagaaatccatgactcacatatatcgtccgtcatccccagtcaagctcagggaggagggaggagcccagctggggcaggagaggggtgtctccccaccaaacaaacccggtccctccctctccgcactagctgtctgccctgccctgccgtaggagatgggctgggagcctcccacgctctccagctcactcggcaggcagcggggaccagggctggcaggttaagcctctgggggtggatcctgaaaggtggtccagccgcctggccctgcgtgggaccctccacctggcagcaggtggtgacttccaagagtgactccgtcggaggaaaatgactccccagtcgctgctgcagacgacactgttcctgctgagtctgctcttcctggtccaaggtgcccacggcaggggccacagggaagactttcgcttctgcagccagcggaaccagacacacaggagcagcctccactacaaacccacaccagacctgcgcatctccatcgagaactccgaagaggccctcacagtccatgcccctttccctgcagcccaccctgcttcccgatccttccctgaccccaggggcctctaccacttctgcctctactggaaccgacatgctgggagattacatcttctctatggcaagcgtgacttcttgctgagtgacaaagcctctagcctcctctgcttccagcaccaggaggagagcctggctcagggccccccgctgttagccacttctgtcacctcctggtggagccctcagaacatcagcctgcccagtgccgccagcttcaccttctccttccacagtcctccccacacggccgctcacaatgcctcggtggacatgtgcgagctcaaaagggacctccagctgctcagccagttcctgaagcatccccagaaggcctcaaggaggccctcggctgcccccgccagccagcagttgcagagcctggagtcgaaactgacctctgtgagattcatgggggacatggtgtccttcgaggaggaccggatcaacgccacggtgtggaagctccagcccacagccggcctccaggacctgcacatccactcccggcaggaggaggagcagagcgagatcatggagtactcggtgctgctgcctcgaacactcttccagaggacgaaaggccggagcggggaggctgagaagagactcctcctggtggacttcagcagccaagccctgttccaggacaagaattccagccaagtcctgggtgagaaggtcttggggattgtggtacagaacaccaaagtagccaacctcacggagcccgtggtgctcactttccagcaccagctacagccgaagaatgtgactctgcaatgtgtgttctgggttgaagaccccacattgagcagcccggggcattggagcagtgctgggtgtgagaccgtcaggagagaaacccaaacatcctgcttctgcaaccacttgacctactttgcagtgctgatggtctcctcggtggaggtggacgccgtgcacaagcactacctgagcctcctctcctacgtgggctgtgtcgtctctgccctggcctgccttgtcaccattgccgcctacctctgctccagggtgcccctgccgtgcaggaggaaacctcgggactacaccatcaaggtgcacatgaacctgctgctggccgtcttcctgctggacacgagcttcctgctcagcgagccggtggccctgacaggctctgaggctggctgccgagccagtgccatcttcctgcacttctccctgctcacctgcctttcctggatgggcctcgaggggtacaacctctaccgactcgtggtggaggtctttggcacctatgtccctggctacctactcaagctgagcgccatgggctggggcttccccatctttctggtgacgctggtggccctggtggatgtggacaactatggccccatcatcttggctgtgcataggactccagagggcgtcatctacccttccatgtgctggatccgggactccctggtcagctacatcaccaacctgggcctcttcagcctggtgtttctgttcaacatggccatgctagccaccatggtggtgcagatcctgcggctgcgcccccacacccaaaagtggtcacatgtgctgacactgctgggcctcagcctggtccttggcctgccctgggccttgatcttcttctcctttgcttctggcaccttccagcttgtcgtcctctaccttttcagcatcatcacctccttccaaggcttcctcatcttcatctggtactggtccatgcggctgcaggcccggggtggcccctcccctctgaagagcaactcagacagcgccaggctccccatcagctcgggcagcacctcgtccagccgcatctaggcctccagcccacctgcccatgtgatgaagcagagattcggcctcgtcgcacactgcctgtggcccccgagcccggcccagccccaggccagtcagccgcagactttggaaagcccaacgaccatggagagatgggccgttgccatggtggacggactcccgggctgggcttttgaattggccttggggactactcggctctcactcagctcccacgggactcagaagtgcgccgccatgctgcctagggtactgtccccacatctgtcccaacccagctggaggcctggtctctccttacaacccctgggcccagccctcattgctgggggccaggccttggatcttgagggtctggcacatccttaatcctgtgcccctgcctgggacagaaatgtggctccagttgctctgtctctcgtggtcaccctgagggcactctgcatcctctgtcattttaacctcaggtggcacccagggcgaatggggcccagggcagaccttcagggccagagccctggcggaggagaggccctttgccaggagcacagcagcagctcgcctacctctgagcccaggccccctccctccctcagccccccagtcctccctccatcttccctggggttctcctcctctcccagggcctccttgctccttcgttcacagctgggggtccccgattccaatgctgttttttggggagtggtttccaggagctgcctggtgtctgctgtaaatgtttgtctactgcacaagcctcggcctgcccctgagccaggctcggtaccgatgcgtgggctgggctaggtccctctgtccatctgggcctttgtatgagctgcattgcccttgctcaccctgaccaagcacacgcctcagaggggccctcagcctctcctgaagccctcttgtggcaagaactgtggaccatgccagtcccgtctggtttccatcccaccactccaaggactgagactgacctcctctggtgacactggcctagggcctgacactctcctaagaggttctctccaagcccccaaatagctccaggcgccctcggccgcccatcatggttaattctgtccaacaaacacacacgggtagattgctggcctgttgtaggtggtagggacacagatgaccgacctggtcactcctcctgccaacattcagtctggtatgtgaggcgtgcgtgaagcaagaactcctggagctacagggacagggagccatcattcctgcctgggaatcctggaagacttcctgcaggagtcagcgttcaatcttgaccttgaagatgggaaggatgttctttttacgtaccaattcttttgtcttttgatattaaaaagaagtacatgttcattgtagagaatttggaaactgtagaagagaatcaagaagaaaaataaaaatcagctgttgtaatcacctagcaaactgg

SEQ ID NO: 293983 - DNA, 2082 bp, Artificial Sequence
  derived and/or modified sequence
atgaccccccagtctctgcttcagacaacgctgttcctactctccttactgttccttgtccagggtgcccacggccggggccatcgggaagacttcaggttttgctcccagcgcaaccagactcacagatcctccctgcactacaaacccactccagatctgcgcatatccattgagaactccgaggaggccctgaccgtccacgctccattcccagctgctcacccagctagtcgttcattccccgatccaaggggcctgtaccacttctgtttatattggaacaggcacgccggtcggctgcacctgctgtatggtaaacgggacttcctactttccgataaggcatcctcattgctgtgcttccagcaccaagaagagagcctggctcagggccctccgcttcttgccaccagtgtaacatcctggtggagtcctcagaacatttctcttccctccgcggctagttttactttcagttttcactctcctccccatactgccgcacacaatgcctccgtggacatgtgtgagcttaaacgcgacttgcagcttctgtcccagttcttgaagcacccacagaaggcctcacgacggccatcagcagcccctgccagtcaacaactgcagtccttagagtccaagctgaccagcgtccgtttcatgggcgacatggtatctttcgaagaggaccgcatcaacgccaccgtgtggaaactgcagcccactgcaggactgcaagatttgcatattcattctcgccaggaagaagaacagtctgagattatggagtattctgtattgttgccccggacactgtttcagcggacaaaaggtagatctggcgaggctgaaaaaaggttgcttcttgttgactttagcagtcaggcgttgttccaggataaaaatagttcccaagtgttgggggagaaagtccttggcattgtagtccaaaatacaaaggtggctaacttgactgaaccagttgtgttgacatttcagcatcagctgcaacctaagaatgtcaccttgcagtgtgttttttgggtggaagaccctacactttcctccccaggtcactggtcatctgctgggtgtgagacagtgcggcgtgagacccagacttcctgtttttgcaatcacctgacctattttgccgtgcttatggtctccagtgtggaagtagatgcggtgcacaagcactatctttctctcctgtcttatgtgggctgtgtcgtcagtgcgctggcctgcctcgtcacaatcgcagcctatttatgcagccgggtacccctgccttgcagacgcaaacccagagattatactataaaggtgcacatgaacctcttgctggccgtgttcctgcttgacaccagtttcctcctgtcagagccggtggcactgacaggcagtgaggctggatgtcgtgcttccgccatcttcctccatttctctttattgacctgcctgagttggatgggcctcgaaggctataacctgtatcgcctggtggtggaggtgtttggcacatatgtgccgggatatctcctgaagttgagcgcaatgggctggggcttccccatcttcctggtaacccttgttgctctggttgacgtggataattatggacctataattctggcagtgcataggacgccagagggcgtgatatacccaagcatgtgctggattcgggacagcctggtcagttacataacgaatctgggactgttcagcttagttttcttgttcaatatggcaatgctagccactatggtggtgcagatacttagattacggccccatactcaaaagtggtcacacgtgctcaccctattgggactgagcctagtactgggcctgccttgggccctgatcttcttcagtttcgctagcggtaccttccagctggtcgtgctgtatctgttttccatcatcacatccttccagggctttctgatttttatttggtactggagcatgagacttcaagcgaggggcggcccctcacccctcaagagtaattcagattccgcacgtctccccatcagtagtggaagcacctccagcagcagaatttag

SEQ ID NO: 293984 - DNA, 2082 bp, Artificial Sequence
  derived and/or modified sequence
atgactcctcagtctctgttgcagactaccctcttccttctcagcctgctttttctggtgcagggagcacacgggcggggccacagagaggactttcgtttctgtagtcaaagaaaccaaactcacaggagtagcctgcactataagcccacccccgatctgcgtatatccatcgaaaattctgaggaggccctcacggtgcacgcaccgtttcccgcagctcaccccgcatcacgtagctttcccgatccccgggggctctaccacttttgtctttactggaataggcatgcggggaggctccaccttttatatgggaagagagactttttgttgagcgacaaggccagctcacttctgtgcttccagcaccaagaggaaagtctggcgcagggcccccctctgcttgcaaccagtgtaacctcatggtggagtccgcaaaacattagtttacccagtgctgcttctttcaccttttctttccacagtccccctcatacagccgcccataatgctagcgtagacatgtgtgagctgaagagagacctccagctgttaagtcagtttttaaaacacccccaaaaagccagtcgacggccatccgcagcccctgcgagccagcagctccagtctcttgaaagtaaattgacatctgtaagattcatgggagatatggtttcctttgaagaggatcggatcaacgcaacagtatggaaactgcagcctactgctgggctccaggatctacatatacatagtcgacaggaggaggagcaaagtgaaattatggaatactctgtcctcctgcctcgcaccctgtttcagcggacaaaggggaggtctggggaggcggagaaacgcctgcttttagtcgacttttcaagccaggccttgttccaagataagaactcttcacaagttctgggcgaaaaggtcctgggaattgtggtgcagaacacaaaggtcgctaatctcaccgagccagtggtgctcaccttccagcaccagctgcagcccaagaatgtgaccctgcagtgcgtattttgggtggaagatcccaccctgagcagtcctggtcattggagcagtgccggatgcgagacagtcagacgggagactcaaaccagctgtttctgcaatcacctgacttacttcgctgtacttatggtctctagcgtggaggtagacgcggtccacaagcattacttgtccctgttaagctacgtgggttgcgttgtgtctgccctggcctgtctagtgacaatagccgcatacttgtgtagcagagtccccctcccctgccggcggaagcccagggactacaccataaaggtccatatgaatctgttgctggccgtgtttctgctggatacatcgttcctcctctccgagccggtggcactaaccgggtcggaagcagggtgtagagcttctgcgatatttctccactttagcctgctcacatgcctgagttggatgggtctggaggggtacaacctatatagacttgtagtggaagtattcgggacatacgtgcctgggtaccttctcaagttgtcggcaatgggctggggcttccccattttccttgtgacactggtggccctcgtggatgtagataactacggcccaatcatacttgcggttcacagaaccccagaaggagtaatctatccttcaatgtgttggatccgcgattctctagtgtcttacatcacgaaccttggactgttttccctggtatttctgtttaatatggcaatgttagccactatggtggtgcagatactgaggctccggccacacacacagaaatggtcacatgtcctcactctactgggtctcagcctggtgctggggctcccttgggccttgattttttttagttttgcctccgggaccttccagctcgtggtgctctatcttttctcaattattaccagcttccagggcttcctgatcttcatttggtattggtccatgaggctccaagcacgcggcgggcctagcccacttaagtcaaactccgactccgccagattacccattagctctggttcaaccagttcttcacgcatttag

SEQ ID NO: 293985 - DNA, 2082 bp, Artificial Sequence
  derived and/or modified sequence
atgacaccccagtccctgctgcaaaccacactctttttactctcgctgctgttccttgtacaaggtgcccacggccggggacatagagaagactttcgattctgttctcagcggaatcagacccatcggagctctctgcattacaaacccaccccagatctccgcatatccattgaaaattctgaagaagctctgacggtgcacgctcccttccctgcagcccatccagctagcagatcttttcctgatccccgaggactttatcacttctgtctgtactggaacaggcacgctgggaggttgcatctgctatatggtaagagagatttcctcttgtccgataaagcatcctcgctactgtgtttccagcatcaggaagaaagcctggctcagggaccaccactcctggcgactagcgtgacttcctggtggagcccccagaacatttcactgcctagtgccgcatcatttaccttttcttttcactcaccgcctcacaccgccgcccacaatgcctccgtagatatgtgtgaattgaagagagatctgcaactcctcagccagttcctgaaacacccccagaaagctagtagacgcccctccgcagcacctgcatcacagcagctgcagtccttagagtccaaactcacttctgtgcggtttatgggagacatggtttcattcgaagaggacagaattaacgccactgtctggaagctgcagccaacggcaggcctccaggatctacacatacactctaggcaggaagaggaacagagcgaaatcatggaatactcagtgctactgcccaggactcttttccagaggaccaaggggcgtagcggagaggccgaaaaaagactgttactagtggatttcagttcgcaggctctgttccaagataagaacagctctcaagtgctaggtgaaaaagtcctgggcatcgtagttcagaatacaaaggtagcgaacctaaccgagcctgtcgtgctcacctttcagcaccagcttcagcccaagaacgttactttgcagtgtgtgttctgggttgaagatccaacgttaagttcccctgggcactggtctagtgctgggtgcgaaaccgttcgaagggaaacccagacaagttgcttttgtaaccacctcacgtactttgccgtactgatggtgtctagtgtggaagttgacgctgtccataagcactacttgtcgctgttgagctatgtgggctgcgtggtgagcgccctggcttgtctcgtaactatcgccgcatatctatgttcgagagtgcccctgccgtgtagaagaaaaccacgcgattataccatcaaggtgcacatgaacctgcttttggcagtctttcttctcgatacatccttcctgctgtctgaaccagtcgccctgaccggctctgaagctggttgccgtgcgagcgccattttcttgcacttttcgctgctgacatgtctgtcctggatgggactggagggatacaacttatataggttggtggtggaggtttttggtacctatgttcctggctacctgttaaaattaagcgctatggggtggggcttcccgatttttctggtgaccctcgttgctctagttgacgtggataattacgggccgataattcttgccgtgcacagaacacccgaaggggttatctatccatcgatgtgttggattagagacagcctcgtgtcttacattaccaacctggggctgtttagtcttgtgtttctctttaacatggccatgctcgctacaatggtggtacaaattctcagattgcgcccacacacacagaaatggtcccacgtcctgaccctccttggtctgtcgctagtactggggcttccttgggcactgatctttttctcctttgcatccgggacctttcagctggtggtcctgtacctcttctcaatcatcacaagtttccaagggttcttgatatttatctggtactggtctatgcgcctccaggcgagaggcgggccctctcccctgaagtcaaatagcgactctgctcggctgccgatcagcagcggctccaccagtagttctagaatttag

SEQ ID NO: 293986 - DNA, 2082 bp, Artificial Sequence
  derived and/or modified sequence
atgaccccccagagcctgctgcagaccaccctcttcctgctgagcctgctcttcctggtgcagggcgcccacggccggggccaccgggaggacttccgcttctgcagccagaggaaccagacccacaggagcagcctgcactacaagcccaccccagacctgcgcatcagcattgaaaattctgaggaggccctgactgtgcacgcccccttccctgctgcccacccagccagccgctccttcccagacccccggggcctgtaccacttctgcctgtactggaacagacatgctggccgcctgcacctgctgtatggcaagagggacttcctgctgagtgacaaggccagcagcctgctgtgcttccagcaccaggaggagagcctggcccagggcccccccctgctggccacctctgtgacctcctggtggagcccccagaacatcagcctgcccagcgctgccagcttcaccttctccttccacagccccccccacacagctgcccacaatgcctctgtggacatgtgtgagctgaagagggacctgcagctgctgagccagttcctgaagcacccccagaaggccagccggcggcccagcgctgccccagccagccagcagctgcagagcctggagagcaagctgacctctgtgcgcttcatgggagacatggtgtcctttgaggaggaccgcatcaatgccaccgtgtggaagctgcagcccacagctggcctgcaggacctgcacatccacagccggcaggaggaggagcagagcgagatcatggagtacagcgtgctgctgcccaggaccctcttccagaggaccaagggccgctctggagaggccgagaagaggctgctgctggtggacttcagcagccaggccctcttccaggacaagaacagcagccaggtgctgggggagaaggtgctgggcatcgtggtgcagaacaccaaggtggccaacctgacagagcctgtggtgctgaccttccagcaccagctgcagcccaagaatgtgaccctgcagtgtgtgttctgggtggaggaccccaccctgagcagccctggccactggagcagcgctggctgtgagaccgtgcggcgggagacccagaccagctgcttctgcaaccacctgacctactttgctgtgctgatggtgtcctctgtggaggtggatgctgtgcacaagcactacctgagcctgctgtcctatgtgggctgtgtggtgtctgccctggcctgcctggtgaccatcgccgcctacctgtgcagccgggtgcccctgccctgcaggaggaagccccgggactacaccatcaaggtgcacatgaacctgctgctggccgtgttcctgctggacaccagcttcctgctgtctgagcctgtggccctgactggaagtgaagctggctgccgggccagcgccatcttcctgcacttcagcctgctgacctgcctgtcctggatgggcctggagggctacaacctgtaccgcctggtggtggaggtgtttggcacctacgtgcccggctacctgctgaagctgagcgccatgggctggggcttccccatcttcctggtgaccctggtggccctggtggatgtggacaactacggccccatcatcctggccgtgcacaggaccccagagggcgtcatctaccccagcatgtgctggatccgggacagcctggtgtcctacatcaccaacctgggcctcttcagcctggtgttcctgttcaacatggccatgctggccaccatggtggtgcagatcctgcggctgcggccccacacccagaagtggagccacgtgctgaccctgctgggcctgagcctggtgctgggcctgccctgggccctgatcttcttctcctttgccagcggcaccttccagctggtggtgctgtacctgttcagcatcatcaccagcttccagggcttcctgatcttcatctggtactggagcatgaggctgcaggcccggggcggccccagccccctgaagagcaacagcgacagcgcccggctgcccatcagcagcggcagcaccagcagcagccgcatctag

SEQ ID NO: 293987 - DNA, 2082 bp, Artificial Sequence
  derived and/or modified sequence
atgaccccccagagcctgctgcagaccaccctgttcctgctgagcctgctatttctagtgcagggcgcgcacggcagaggccaccgagaggactttcggttttgttcacaaaggaaccagacccacagaagcagtttgcattataaacctactcctgatttgcgaattagcatcgagaatagcgaagaggctttgacagtgcatgccccattccccgccgcccacccagcgtcacggagttttcccgacccacgtgggttgtaccacttctgcctctactggaaccgccacgccggacgcctgcatctgctatacggtaagcgcgacttcctcctttcagataaggcgtctagccttctgtgttttcagcaccaggaggaaagcctcgctcagggccccccgttgcttgccacatctgtaacttcctggtggtcaccccagaacatttcactgcctagcgccgcatcttttacatttagttttcacagtccaccccatactgcagcccataacgcgtcagtggatatgtgcgagttaaagcgcgacctccagctcctttcgcagtttctgaagcatccacagaaagcgtcgcggcggccaagtgcagcccccgcgtcacaacagctccaatctctagagagcaaactaacctctgtgcgcttcatgggcgacatggtaagcttcgaagaggacagaataaacgcaactgtgtggaaactgcagcctactgccggcctgcaagacctgcacattcactccagacaggaggaggagcagtccgagataatggagtatagtgtgctgctacctcgaacgttgtttcagaggacaaagggccgcagcggcgaggctgaaaagcgattactcctggtggacttctcatcccaggctctattccaggacaagaatagctcgcaagttcttggcgaaaaggtactgggcatcgtcgtgcagaacacaaaggtcgcaaacttgacggagcctgttgtcctaacatttcagcaccagctacagccaaagaacgtgaccctgcagtgtgtcttctgggtcgaggaccctaccctgagctccccagggcattggtcttccgctggctgcgaaacagtcagacgagagacgcagacctcctgtttctgtaaccacctcacttatttcgctgtgctgatggtgtcttctgtcgaggttgacgccgttcacaagcactacctgtcccttctcagctatgtcggctgcgtcgtcagcgctctcgcatgcttggtgaccatcgcggcttacttgtgtagccgggtacctctcccatgcaggcggaagccaagggactacaccattaaggtgcacatgaatctgctgctggctgtttttctgctagacacatcctttctgctatccgagcctgtggcgctgaccggatctgaggcagggtgccgagcatctgccatcttcctgcatttcagtctacttacctgtttgagctggatgggcctggaagggtataatctctacagactggtggtggaggtgtttggcacgtacgttcccggttatctgcttaagctgtcagcgatgggttggggattccccattttcctggtcacactggtggctctggtggacgtggataactatggccccattatcctcgctgtgcaccgcactcctgagggggtcatctacccctcaatgtgctggattcgggacagcctcgtgtcatacataaccaacctcggccttttttccctggtctttttattcaatatggcaatgttggccactatggtggtgcaaatcctgagactgaggccacacacacaaaaatggtcccacgtgctgaccctgttgggattgtcacttgtcttgggactgccatgggctctaatcttcttctctttcgcaagtgggacttttcagcttgtcgtgttgtacctcttttcgattataacatctttccaaggctttctgatttttatctggtactggtcgatgaggctgcaggcccgtgggggacccagcccactaaagtctaactccgacagtgccaggctgccgatttctagcggctctacatcttcctctagaatttag

SEQ ID NO: 293988 - DNA, 2082 bp, Artificial Sequence
  derived and/or modified sequence
atgaccccccagagcctgctgcagaccaccctgttcctgctgagcttgctttttctcgttcagggcgcccacggccggggccacagagaggactttagattctgcagccagaggaatcagacccacagaagtagcctgcactacaaacccacccccgatctgcggatttcaattgaaaactcagaggaggctttgacagtgcacgccccatttccagctgctcacccggctagtcgttcgttccctgaccctcggggactctaccatttttgcctgtattggaatcgacacgctggcagactccatttgctgtatggcaagagagacttcctcctaagcgataaagcatcttccttgctgtgcttccagcatcaggaggagagcctggcccagggaccacccctgttggccacctccgtcacgtcttggtggagtcctcagaatatctccctgccaagcgccgccagttttacattcagcttccactcccccccccacacagctgcacataatgcctcagtggatatgtgcgaactcaagcgggacttgcagctactgagccaatttctcaagcacccacagaaggcttcccgacgtccatcagccgcaccagcctctcaacagctgcaatccctggagagtaaacttacgagtgtgaggtttatgggcgacatggtgtctttcgaagaggatcgcatcaacgctactgtgtggaagctacagccgacggcaggattgcaggacctacatatacactcccgacaagaagaggagcagtctgaaattatggaatattctgttctgctgcctcgcacattatttcagcggaccaaaggcaggagcggagaggcagagaaaaggctcttacttgtagacttttcttctcaggctctgttccaggacaaaaactcaagtcaggtactcggcgagaaggtgctaggcatcgtagtccagaataccaaagtggccaatcttaccgaaccggtcgtcctgacatttcagcaccagcttcagcccaagaatgttacgctgcagtgtgtgttttgggttgaggaccctaccctctcatctccgggacactggtccagtgcaggatgtgagacagttcgaagagagactcagactagctgcttctgtaaccacctgacctactttgcagtcttgatggtaagttccgttgaagtggacgctgtgcataaacattacctttctctgctctcctacgtgggatgtgtggtgtccgcactggcctgtctggttactatcgccgcctacttatgctccagagtgcccttaccttgtaggcggaaaccacgtgactacactatcaaagtgcacatgaacctcctgttagccgttttcctactcgacaccagctttcttctctccgagccagtagcattaaccgggagtgaggccggttgcagggcctcagccattttcctgcacttctccttgctgacatgcctttcctggatgggtcttgaagggtataatctatatcgcctcgtcgtcgaagtgtttggtacctatgtacccggttacctgctcaaactttccgccatgggttggggctttcccatttttctagttaccttagtggccctggttgacgtagataactacgggccaataatcctggctgtacacagaactcctgagggcgtgatatatccatccatgtgttggatccgggatagcctggtgagctatataacaaacctgggactattttcactggtgttcctgttcaatatggccatgctggccaccatggttgtccaaatcctccgcctgaggccccacacacagaagtggtctcacgtgttgacccttttggggctttctctggtcctgggacttccgtgggctctgatttttttctcgtttgcctcgggtacttttcaacttgttgtgctgtacttgttttccatcattacgagtttccaaggcttcttaatcttcatttggtattggagtatgcgcctgcaggcccgaggggggcccagcccgttgaagagcaactcggactccgcacgtctgcctatttcatccgggagcacatcctcttctaggatctag

SEQ ID NO: 293989 - DNA, 2082 bp, Artificial Sequence
  derived and/or modified sequence
atgaccccccagagcctgctgcagaccaccctgttcctgctgagcttgctctttcttgtgcagggggcccatggaagaggacaccgcgaggatttcaggttttgttctcagcggaaccagacgcacagatcttccctgcattacaagcctaccccagatttgaggatttccatcgaaaactctgaagaggcgctgaccgtgcatgccccgttccctgccgcccaccccgccagccgctcctttcctgaccccagggggctgtaccatttttgtttgtactggaatcggcacgccggccgcctccacctgttatacgggaagcgtgacttccttttatctgacaaagcttcatcgctgctgtgctttcagcaccaggaagaaagtctggcgcagggacccccattactcgccaccagtgttactagttggtggtcccctcagaacatctcccttccatctgctgcatcgtttacattcagcttccactccccaccacacacagctgcacacaatgcatcggtcgatatgtgcgagctgaagcgtgacctgcaactgctgtcccagttcctgaaacatcctcaaaaggcttcccgacgcccttctgccgcccccgctagccagcagctacaatctcttgagagtaaactgacctccgttcgcttcatgggagacatggtgtcattcgaggaagacaggattaatgcaactgtctggaagctgcagccaaccgccggtctgcaagatcttcacatccattcccggcaagaggaggagcagagcgaaattatggagtactcggtgttactgcccagaaccctgttccaacgcacaaaggggaggtcaggcgaagcagaaaagaggcttctgctcgtcgatttttccagccaagccctcttccaggacaagaactcctctcaggtgctgggtgagaaagtgctgggaatcgtcgtgcagaatactaaggtggcaaacctgaccgagcccgtcgttctcacatttcagcaccaactgcaacccaaaaatgtgacgctgcagtgcgtgttttgggttgaggacccaactttgagcagccctgggcattggtctagcgctggatgcgaaaccgtaagacgggagacccaaacctcttgtttttgcaaccatctcacctatttcgccgtgctgatggtatcgtctgttgaagttgacgccgtccacaaacactacctttccctgttaagctatgtcggctgtgtagtgtccgcccttgcctgcctcgtcacgatagcggcatatctgtgttcgcgcgttcccctgccatgccggcggaaacctcgcgattacacaatcaaggtgcatatgaatctactgctggcggtgtttctcctggacacctccttcctgctgagcgaacctgtcgcactgaccggatccgaagccggctgcagagcctctgctatcttcctgcacttttccctgctgacttgtctctcttggatgggtctcgaggggtataacctgtaccgcctggtcgtggaggtgtttggtacctacgtacccggctacttacttaaactttccgctatgggatggggattccccattttcttagtgacactcgtggccctggtggacgtggacaattatggaccaatcatactggccgtgcatcggacacccgagggggtcatctatcccagcatgtgctggattcgcgactcgcttgtgtcatacattacaaacctggggctgttcagtctcgtgtttctgttcaacatggcaatgctggcgacaatggttgtgcagatcctgcggctgcggccacacacccaaaagtggtctcacgtgctaaccctgcttggcctctctctcgtgcttggactcccttgggcgctgatcttttttagcttcgcctcagggactttccagctagtggtgctctatcttttcagcattatcacttccttccaggggttcctaatctttatttggtattggtccatgcggttgcaggcgcgcggcggtccaagccctctcaagtctaattccgattcagctaggctgccaatcagttccggcagtacttccagctccaggatttag

SEQ ID NO: 293990 - DNA, 2082 bp, Artificial Sequence
  derived and/or modified sequence
atgacaccccagtcattgctgcaaactactctgttcctgctgagcctcctgttcttagtccagggagctcacggccgaggccatagggaagatttcaggttttgttcacaacgcaaccagacccacaggagctctcttcactataaaccaacacccgacctgcgcatcagtatcgaaaacagcgaggaagctctgaccgtccacgcaccattccccgcagctcacccagcctctaggagcttcccggatcctagaggactctaccacttttgtctctactggaaccggcacgcgggaaggctgcacctgctctatggcaagcgtgactttctcctgtcggataaggcttcatcgcttttgtgcttccagcaccaagaggagtctttggctcaaggcccacccctattagccacctctgtgacttcttggtggagtcctcagaatatctccttaccatcagccgcatcatttacattctcattccacagccctccgcacacggcggctcacaatgcatctgtcgacatgtgtgagttgaaaagagaccttcagttgctgtcgcaattcctgaaacacccacagaaagcatcccgtaggccctcagccgctcccgctagccaacagctgcagagtctggaaagcaagcttacctcagtgagatttatgggcgacatggtctccttcgaagaggaccggatcaatgcgacagtttggaagctgcaacccactgccggactgcaggacctgcacatccatagccgacaggaggaggaacaatcagagatcatggagtatagcgtactcctcccccgaactctcttccagcgcaccaaaggacggagtggagaggctgaaaagcgtttgctgctggtggacttctcctctcaggcactattccaggacaaaaactctagccaggtcctgggagaaaaggtcctgggcatcgtggtccaaaataccaaggttgccaacctcaccgagcccgtggtattgacattccagcaccagctgcagcctaaaaacgtgacccttcagtgcgttttttgggtggaggatccaactcttagtagtcccggacattggtcaagtgctggatgcgagaccgtgcgcagggagacccagacgtcttgcttttgcaaccacctcacatacttcgccgtgctgatggtgtcatccgtggaggtcgacgctgtgcataagcactatctgtcccttctttcttacgtgggatgcgtggtgtctgccttggcatgtctggttacaatcgccgcttatctttgctctcgagttcctttgccatgtaggagaaagccacgcgactataccattaaagtccacatgaacttactgctggctgtcttcctgctcgacacaagcttcctcttgtcagagcctgtggctttgaccggttccgaagccggatgcagagccagcgctatcttcctgcattttagtctgttgacctgtcttagctggatgggcctcgagggttacaacttgtatcggctggtggtcgaggtgttcggcacctacgtgcccggatatctactgaaactctccgccatgggctgggggtttcctattttcctggtcaccctggtggcacttgtggacgtggacaactacggaccgataatactcgctgtgcatagaacccccgaaggagttatatatccatccatgtgctggatccgcgactccctggtgagctacatcaccaatttaggactgttttccctggtttttctttttaacatggccatgcttgccaccatggtcgtccaaatattgcgattgcgcccacacacccagaagtggtcccacgtgcttaccttattagggctgagcttagttctgggcttgccttgggcattgattttcttcagctttgcctcaggcaccttccagctggtggtcctctatctgtttagcatcatcacctcattccaggggtttctgatctttatttggtactggtccatgagattacaggcgagaggagggccttcaccgctgaagagcaatagcgactccgcacgactgcctatttccagcggtagcacaagcagctcaaggatctag

SEQ ID NO: 293991 - DNA, 2082 bp, Artificial Sequence
  derived and/or modified sequence
atgacaccacaaagccttctccagactacattgttcctgttatccctgctgttccttgtccagggtgcccacggacgaggtcacagggaggatttccggttctgctctcagagaaatcaaacgcatcgctccagtctccactacaaacctacgcctgacttgaggatctccattgaaaactcggaagaggccctgacagtgcacgcaccgttccctgccgcacatcccgcttcccgtagcttccccgaccctcgcggtctgtatcacttctgcttgtattggaataggcatgccggaagattgcacctgctgtacgggaagcgggactttctgctcagcgataaggcgtcttccttattgtgctttcagcaccaggaggagagtctggcacaaggtccacctctgctcgcaaccagtgtgacctcttggtggtctccgcagaacatttccttgcccagtgccgctagtttcaccttctcctttcactccccgccacatactgctgcacacaacgcctccgttgacatgtgtgaactgaaacgcgaccttcagcttctgagtcagtttctgaagcatcctcagaaggcttctagacgcccttctgctgccccagccagccagcagcttcagtcactggagagcaagctgacaagcgttcggttcatgggcgacatggtctcttttgaggaggaccgtattaacgccactgtttggaagctgcagcctaccgccggtctccaagacttgcatattcatagccgccaggaggaggagcaatcagagatcatggaatattcggtgctgctaccaaggacgctgtttcaaaggaccaaaggcaggtctggggaagctgagaaacggctcctgctggtcgacttttcgagccaggccctctttcaggacaagaattcgagccaggtgctcggggagaaggtgctgggaattgtcgtgcagaatactaaagtggctaacctgacagaaccggtggtcctgacgtttcaacaccagttacagcccaagaacgtgaccctgcagtgcgtattctgggtggaggaccccaccctgagctccccgggacactggagcagcgctggatgcgagactgtgagaagagagacacaaacgtcctgcttttgtaaccacttaacatatttcgcggtcctgatggtttcttctgtggaagttgacgctgtgcataaacattacttgagccttctgtcttacgtgggttgcgtcgtgtccgctctagcgtgcctggtgaccatcgctgcctacctgtgctcgagagtccctttaccttgcaggagaaagcccagagattacaccatcaaggtacacatgaacttgctgctggcagtatttctgcttgatacttctttcctgctgtccgaacctgtggctcttacagggtccgaggctggctgccgtgcctcagccatttttctacatttcagcctgcttacatgcctttcctggatgggtttagagggatataacctgtatagactcgtggtggaggtctttggtacctatgtccctggctacttattgaaacttagtgccatggggtggggctttcctatattccttgtgactctggtcgcactagttgacgttgacaactacgggccaatcatattagcagtgcacaggactccggaaggagtcatctacccgtcaatgtgctggatccgggactcacttgtttcatatatcacaaatctggggctattctcgcttgtgttcctctttaatatggcgatgcttgccacaatggtggtgcaaatattgcgcctgcgaccccatacgcagaagtggagccacgtactgaccttactcggcctatctctggtcttggggcttccatgggccttgattttcttctcttttgcctccggaacctttcaactggtcgtcctgtatctgttcagcatcattaccagtttccagggtttcttgatctttatttggtactggagcatgaggctgcaggcacgcggtggcccttccccactgaagagtaatagcgacagtgctcgactccctatttctagcggaagtacatcctcttccaggatatag

SEQ ID NO: 293992 - DNA, 2082 bp, Artificial Sequence
  derived and/or modified sequence
atgacaccacagagtctgttgcagaccacactttttctactgtcactgttgttcttggtacagggcgctcatgggaggggccatcgggaggatttccgattctgcagtcagagaaaccagacccaccgttcaagcttgcattacaagcccacacctgacctcaggatttccatcgaaaattcagaagaggctctaacagtccatgcccctttcccggcagctcaccctgcttcccgttccttccccgacccacggggtctataccatttttgtttgtactggaacaggcatgcaggaaggcttcatctgctctatggtaaacgagacttcctcctgtctgacaaggcgtccagcctcttgtgcttccaacaccaggaagaatccctagcgcagggtcctcctttattggccaccagcgtgactagctggtggtctcctcagaacatctcactaccttctgctgcctccttcacttttagttttcattctccccctcataccgctgcgcacaacgcttctgttgatatgtgcgaattgaaacgcgatcttcaactgctctcccagtttctaaagcacccacagaaggcttcccgtaggccctcagctgctccggcttctcagcagttgcagtccctggagagcaaattgacttccgtgcgctttatgggagatatggtgagcttcgaggaagaccggattaatgcaactgtctggaaactccaacctacggcaggcctgcaagacctgcatattcacagccgccaggaggaagagcagtcagagattatggagtatagcgtgctcctccccagaacattattccagaggactaagggtaggtccggagaggcagagaagaggcttttgctagtggacttcagctcccaagccctctttcaggacaaaaacagcagccaggtgttgggtgagaaagtgttggggattgtcgttcagaataccaaagtggccaatctgacagagcctgtggttctcacgttccaacaccagttacagccaaaaaatgtgacgctgcagtgtgtcttttgggttgaagaccctacgttaagctcccctgggcattggtcatcagcgggatgtgagaccgtgcggagagaaactcagacaagttgtttttgtaaccacctgacatattttgcggtccttatggtctcctccgttgaggttgacgccgttcacaagcactacctgtcactcctgtcgtacgtgggctgcgttgtgagcgccttggcttgtctggttacaattgctgcctacctctgcagccgggttcctctcccctgtcgaaggaagcctcgtgactacacaattaaagttcatatgaatttactcctcgccgtgtttcttttggatacctcttttctgctctccgagccagtagccctcacgggttccgaggctggctgtcgcgcttccgcaattttcctacatttttccctgcttacttgcctgtcttggatgggcctggaaggatacaacctgtaccgactagtggtggaggtcttcggcacctacgttccaggctatctgcttaagctgagtgcgatggggtggggtttcccgatctttctcgtgaccctggtcgcgttagttgatgtggacaactatggacctattatcctggccgtccaccggactcctgaaggagtcatctatccctccatgtgctggatccgtgatagcctcgtgtcttacattacgaatctgggactgtttagtctggtttttctcttcaacatggctatgttggctacaatggtggtgcaaatcctgagactccgcccacacacccagaagtggtcgcatgtcttgactctgctgggcttgtccttggttcttggcctcccttgggccctgatctttttttctttcgctagtgggactttccagctggtagtcctgtatctctttagcattatcacgtcattccagggatttctgatcttcatttggtactggtcgatgcgtttgcaggccagaggtgggccatctcccttaaaaagtaacagcgatagtgctcgtctcccaattagctccggaagtacgagttcgagccgaatctag

SEQ ID NO: 293993 - DNA, 2082 bp, Artificial Sequence
  derived and/or modified sequence
atgaccccccagagcctgctgcagaccaccctgttcctgctgagcctgctgttcctggtgcagggcgcccacggcagaggccacagagaggacttcagattctgcagccagagaaaccagacccacagaagcagcctgcactacaagcccacccccgacctgagaatcagcatcgagaacagcgaggaggccctgaccgtgcacgcccccttccccgccgcccaccccgccagcagaagcttccccgaccccagaggcctgtaccacttctgcctgtactggaacagacacgccggcagactgcacctgctgtacggcaagagagacttcctgctgagcgacaaggccagcagcctgctgtgcttccagcaccaggaggagagcctggcccagggcccccccctgctggccaccagcgtgaccagctggtggagcccccagaacatcagcctgcccagcgccgccagcttcaccttcagcttccacagccccccccacaccgccgcccacaacgccagcgtggacatgtgcgagctgaagagagacctgcagctgctgagccagttcctgaagcacccccagaaggccagcagaagacccagcgccgcccccgccagccagcagctgcagagcctggagagcaagctgaccagcgtgagattcatgggcgacatggtgagcttcgaggaggacagaatcaacgccaccgtgtggaagctgcagcccaccgccggcctgcaggacctgcacatccacagcagacaggaggaggagcagagcgagatcatggagtacagcgtgctgctgcccagaaccctgttccagagaaccaagggcagaagcggcgaggccgagaagagactgctgctggtggacttcagcagccaggccctgttccaggacaagaacagcagccaggtgctgggcgagaaggtgctgggcatcgtggtgcagaacaccaaggtggccaacctgaccgagcccgtggtgctgaccttccagcaccagctgcagcccaagaacgtgaccctgcagtgcgtgttctgggtggaggaccccaccctgagcagccccggccactggagcagcgccggctgcgagaccgtgagaagagagacccagaccagctgcttctgcaaccacctgacctacttcgccgtgctgatggtgagcagcgtggaggtggacgccgtgcacaagcactacctgagcctgctgagctacgtgggctgcgtggtgagcgccctggcctgcctggtgaccatcgccgcctacctgtgcagcagagtgcccctgccctgcagaagaaagcccagagactacaccatcaaggtgcacatgaacctgctgctggccgtgttcctgctggacaccagcttcctgctgagcgagcccgtggccctgaccggcagcgaggccggctgcagagccagcgccatcttcctgcacttcagcctgctgacctgcctgagctggatgggcctggagggctacaacctgtacagactggtggtggaggtgttcggcacctacgtgcccggctacctgctgaagctgagcgccatgggctggggcttccccatcttcctggtgaccctggtggccctggtggacgtggacaactacggccccatcatcctggccgtgcacagaacccccgagggcgtgatctaccccagcatgtgctggatcagagacagcctggtgagctacatcaccaacctgggcctgttcagcctggtgttcctgttcaacatggccatgctggccaccatggtggtgcagatcctgagactgagaccccacacccagaagtggagccacgtgctgaccctgctgggcctgagcctggtgctgggcctgccctgggccctgatcttcttcagcttcgccagcggcaccttccagctggtggtgctgtacctgttcagcatcatcaccagcttccagggcttcctgatcttcatctggtactggagcatgagactgcaggccagaggcggccccagccccctgaagagcaacagcgacagcgccagactgcccatcagcagcggcagcaccagcagcagcagaatctag

SEQ ID NO: 293994 - protein, 366 aa, Artificial Sequence
  derived and/or modified sequence
MESETEPEPVTLLVKSPNQRHRDLELSGDRGWSVGHLKAHLSRVYPERPRPEDQRLIYSGKLLLDHQCLRDLLPKVAESTEEPAGSNRGQYPEDSSSDGLRQREVLRNLSSPGWENISRPEAAQQAFQGLGPGFSGYTPYGWLQLSWFQQIYARQYYMQYLAATAASGAFVPPPSAQEIPVVSAPAPAPIHNQFPAENQPANQNAAPQVVVNPGANQNLRMNAQGGPIVEEDDEINRDWLDWTYSAATFSVFLSILYFYSSLSRFLMVMGATVVMYLHHVGWFPFRPRPVQNFPNDGPPPDVVNQDPNNNLQEGTDPETEDPNHLPPDRDVLDGEQTSPSFMSTAWLVFKTFFASLLPEGPPAIAN

SEQ ID NO: 293995 - DNA, 1101 bp, Artificial Sequence
  derived and/or modified sequence
atggagtctgaaacagagccagagccagttacactgttggttaaatccccgaatcagcgacaccgtgacctggagctttctggcgaccgcggctggagcgtaggacacttgaaagctcatctgtcccgagtgtatcccgagaggccccgacccgaggaccaaagactgatttatagtggcaaactgctcctggaccatcaatgtctccgtgacctgctgccaaaggtcgccgagtccacagaagaacccgcaggatcgaacaggggacagtatcccgaagacagttcctcagacggtctgagacagcgggaggtcttacgcaacttgtctagtcccggttgggagaatatctcaagacccgaagccgctcagcaggcttttcagggcctcggcccaggattttccggctacaccccctacggctggctacagctatcgtggttccaacaaatttacgccagacaatattacatgcagtacttggccgcaacagcagcgtcaggggcattcgtgccgccgccctctgcccaggagatccccgttgtaagtgctcctgcgccagctccaatccacaatcaatttcctgccgagaaccagcctgcaaatcaaaatgctgcaccccaagtggtcgtgaaccctggagcgaatcagaacctgcgaatgaacgctcaggggggaccgattgtcgaagaggatgacgaaattaaccgagactggctggattggacctactctgcagccacattcagcgttttcctatcgatcttatacttttactcttccctgtctagatttctgatggtgatgggtgccaccgtagtgatgtaccttcaccacgtaggttggttccccttccggcctcgcccagtgcagaattttcccaacgatggcccacctcccgatgtggtcaaccaagaccctaacaataacctgcaggaaggtaccgaccccgaaactgaggaccctaatcatctgccaccagaccgcgacgtgctggacggagagcagacgtcccctagcttcatgtccacagcctggctggtcttcaagaccttcttcgctagccttttgccagaggggccacctgccattgctaattag

SEQ ID NO: 293996 - DNA, 1887 bp, Artificial Sequence
  derived and/or modified sequence
ccgaagcgggggcgcgcgccccagagacgtgaactgtcgttgcagagattgcgggcggctgagacgccgcctgcctggcacctaggagcgcagcggagccccgacaccgccgccgccgccatggagtccgagaccgaacccgagcccgtcacgctcctggtgaagagccccaaccagcgccaccgcgacttggagctgagtggcgaccgcggctggagtgtgggccacctcaaggcccacctgagccgcgtctaccccgagcgtccgcgtccagaggaccagaggttaatttattctgggaagctgttgttggatcaccaatgtctcagggacttgcttccaaagcaggaaaaacggcatgttttgcatctggtgtgcaatgtgaagagtccttcaaaaatgccagaaatcaacgccaaggtggctgaatccacagaggagcctgctggttctaatcggggacagtatcctgaggattcctcaagtgatggtttaaggcaaagggaagttcttcggaacctttcttcccctggatgggaaaacatctcaaggcctgaagctgcccagcaggcattccaaggcctgggtcctggtttctccggttacacaccctatgggtggcttcagctttcctggttccagcagatatatgcacgacagtactacatgcaatatttagcagccactgctgcatcaggggcttttgttccaccaccaagtgcacaagagatacctgtggtctctgcacctgctccagcccctattcacaaccagtttccagctgaaaaccagcctgccaatcagaatgctgctcctcaagtggttgttaatcctggagccaatcaaaatttgcggatgaatgcacaaggtggccctattgtggaagaagatgatgaaataaatcgagattggttggattggacctattcagcagctacattttctgtttttctcagtatcctctacttctactcctccctgagcagattcctcatggtcatgggggccaccgttgttatgtacctgcatcacgttgggtggtttccatttagaccgaggccggttcagaacttcccaaatgatggtcctcctcctgacgttgtaaatcaggaccccaacaataacttacaggaaggcactgatcctgaaactgaagaccccaaccacctccctccagacagggatgtactagatggcgagcagaccagcccctcctttatgagcacagcatggcttgtcttcaagactttctttgcctctcttcttccagaaggccccccagccatcgcaaactgatggtgtttgtgctgtagctgttggaggctttgacaggaatggactggatcacctgactccagctagattgcctctcctggacatggcaatgatgagtttttaaaaaacagtgtggatgatgatatgcttttgtgagcaagcaaaagcagaaacgtgaagccgtgatacaaattggtgaacaaaaaatgcccaaggcttctcatgtctttattctgaagagctttaatatatactctatgtagtttaataagcactgtacgtagaaggccttaggtgttgcatgtctatgcttgaggaacttttccaaatgtgtgtgtctgcatgtgtgtttgtacatagaagtcatagatgcagaagtggttctgctggtacgatttgattcctgttggaatgtttaaattacactaagtgtactactttatataatcaatgaaattgctagacatgttttagcaggacttttctaggaaagacttatgtataattgctttttaaaatgcagtgctttactttaaactaaggggaactttgcggaggtgaaaacctttgctgggttttctgttcaataaagttttactatgaatgaccctg

SEQ ID NO: 293997 - DNA, 2101 bp, Artificial Sequence
  derived and/or modified sequence
ccacccgagctgggggcctcgcaggtctcagaccaagctccccgcgcggcctgcagcgcacccaaacatggccaccgaacccgggttcccggggcacagccgcgcctctgggtgacgcagacgcggcgggttgcatcagcccgtgcccacgtgctcggtccgccctctgccacccggatccggacgccgattgggccacgttgggagagtgcctccgcctcagccaatgggcggcagccacagagcgttctgtccgcagagccgggcgcggggcttctataaaaggcgcccgaagcgggggcgcgcgccccagagacgtgaactgtcgttgcagagattgcgggcggctgagacgccgcctgcctggcacctaggagcgcagcggagccccgacaccgccgccgccgccatggagtccgagaccgaacccgagcccgtcacgctcctggtgaagagccccaaccagcgccaccgcgacttggagctgagtggcgaccgcggctggagtgtgggccacctcaaggcccacctgagccgcgtctaccccgagcgtccgcgtccagaggaccagaggttaatttattctgggaagctgttgttggatcaccaatgtctcagggacttgcttccaaaggtggctgaatccacagaggagcctgctggttctaatcggggacagtatcctgaggattcctcaagtgatggtttaaggcaaagggaagttcttcggaacctttcttcccctggatgggaaaacatctcaaggcctgaagctgcccagcaggcattccaaggcctgggtcctggtttctccggttacacaccctatgggtggcttcagctttcctggttccagcagatatatgcacgacagtactacatgcaatatttagcagccactgctgcatcaggggcttttgttccaccaccaagtgcacaagagatacctgtggtctctgcacctgctccagcccctattcacaaccagtttccagctgaaaaccagcctgccaatcagaatgctgctcctcaagtggttgttaatcctggagccaatcaaaatttgcggatgaatgcacaaggtggccctattgtggaagaagatgatgaaataaatcgagattggttggattggacctattcagcagctacattttctgtttttctcagtatcctctacttctactcctccctgagcagattcctcatggtcatgggggccaccgttgttatgtacctgcatcacgttgggtggtttccatttagaccgaggccggttcagaacttcccaaatgatggtcctcctcctgacgttgtaaatcaggaccccaacaataacttacaggaaggcactgatcctgaaactgaagaccccaaccacctccctccagacagggatgtactagatggcgagcagaccagcccctcctttatgagcacagcatggcttgtcttcaagactttctttgcctctcttcttccagaaggccccccagccatcgcaaactgatggtgtttgtgctgtagctgttggaggctttgacaggaatggactggatcacctgactccagctagattgcctctcctggacatggcaatgatgagtttttaaaaaacagtgtggatgatgatatgcttttgtgagcaagcaaaagcagaaacgtgaagccgtgatacaaattggtgaacaaaaaatgcccaaggcttctcatgtctttattctgaagagctttaatatatactctatgtagtttaataagcactgtacgtagaaggccttaggtgttgcatgtctatgcttgaggaacttttccaaatgtgtgtgtctgcatgtgtgtttgtacatagaagtcatagatgcagaagtggttctgctggtacgatttgattcctgttggaatgtttaaattacactaagtgtactactttatataatcaatgaaattgctagacatgttttagcaggacttttctaggaaagacttatgtataattgctttttaaaatgcagtgctttactttaaactaaggggaactttgcggaggtgaaaacctttgctgggttttctgttcaataaagttttactatgaatgaccctg

SEQ ID NO: 293998 - DNA, 2173 bp, Artificial Sequence
  derived and/or modified sequence
ccacccgagctgggggcctcgcaggtctcagaccaagctccccgcgcggcctgcagcgcacccaaacatggccaccgaacccgggttcccggggcacagccgcgcctctgggtgacgcagacgcggcgggttgcatcagcccgtgcccacgtgctcggtccgccctctgccacccggatccggacgccgattgggccacgttgggagagtgcctccgcctcagccaatgggcggcagccacagagcgttctgtccgcagagccgggcgcggggcttctataaaaggcgcccgaagcgggggcgcgcgccccagagacgtgaactgtcgttgcagagattgcgggcggctgagacgccgcctgcctggcacctaggagcgcagcggagccccgacaccgccgccgccgccatggagtccgagaccgaacccgagcccgtcacgctcctggtgaagagccccaaccagcgccaccgcgacttggagctgagtggcgaccgcggctggagtgtgggccacctcaaggcccacctgagccgcgtctaccccgagcgtccgcgtccagaggaccagaggttaatttattctgggaagctgttgttggatcaccaatgtctcagggacttgcttccaaaggaaaaacggcatgttttgcatctggtgtgcaatgtgaagagtccttcaaaaatgccagaaatcaacgccaaggtggctgaatccacagaggagcctgctggttctaatcggggacagtatcctgaggattcctcaagtgatggtttaaggcaaagggaagttcttcggaacctttcttcccctggatgggaaaacatctcaaggcctgaagctgcccagcaggcattccaaggcctgggtcctggtttctccggttacacaccctatgggtggcttcagctttcctggttccagcagatatatgcacgacagtactacatgcaatatttagcagccactgctgcatcaggggcttttgttccaccaccaagtgcacaagagatacctgtggtctctgcacctgctccagcccctattcacaaccagtttccagctgaaaaccagcctgccaatcagaatgctgctcctcaagtggttgttaatcctggagccaatcaaaatttgcggatgaatgcacaaggtggccctattgtggaagaagatgatgaaataaatcgagattggttggattggacctattcagcagctacattttctgtttttctcagtatcctctacttctactcctccctgagcagattcctcatggtcatgggggccaccgttgttatgtacctgcatcacgttgggtggtttccatttagaccgaggccggttcagaacttcccaaatgatggtcctcctcctgacgttgtaaatcaggaccccaacaataacttacaggaaggcactgatcctgaaactgaagaccccaaccacctccctccagacagggatgtactagatggcgagcagaccagcccctcctttatgagcacagcatggcttgtcttcaagactttctttgcctctcttcttccagaaggccccccagccatcgcaaactgatggtgtttgtgctgtagctgttggaggctttgacaggaatggactggatcacctgactccagctagattgcctctcctggacatggcaatgatgagtttttaaaaaacagtgtggatgatgatatgcttttgtgagcaagcaaaagcagaaacgtgaagccgtgatacaaattggtgaacaaaaaatgcccaaggcttctcatgtctttattctgaagagctttaatatatactctatgtagtttaataagcactgtacgtagaaggccttaggtgttgcatgtctatgcttgaggaacttttccaaatgtgtgtgtctgcatgtgtgtttgtacatagaagtcatagatgcagaagtggttctgctggtacgatttgattcctgttggaatgtttaaattacactaagtgtactactttatataatcaatgaaattgctagacatgttttagcaggacttttctaggaaagacttatgtataattgctttttaaaatgcagtgctttactttaaactaaggggaactttgcggaggtgaaaacctttgctgggttttctgttcaataaagttttactatgaatgaccctg

SEQ ID NO: 293999 - DNA, 1101 bp, Artificial Sequence
  derived and/or modified sequence
atggagagcgagacagagcctgagcctgtgaccctgctggtgaagagccccaaccagaggcaccgggacctggagctgagcggggaccggggctggagcgtgggccacctgaaggcccacctgagccgggtgtacccagagcggcccaggcctgaggaccagaggctcatctacagcggcaagctgctgctggaccaccagtgcctgcgggacctgctgcccaaggtggccgagagcacagaggagcccgccggcagcaacagaggccagtacccagaggacagcagcagtgatggcctgcggcagcgggaggtgctgaggaacctgagcagccctggctgggagaacatcagcaggcctgaggccgcccagcaggccttccagggcctgggccctggcttcagcggctacaccccctacggctggctgcagctgtcctggttccagcagatctatgcccggcagtactacatgcagtacctggccgccacagctgccagcggggcctttgtgcccccaccttctgcccaggagatccctgtggtgtctgccccagccccagcccccatccacaaccagtttcctgctgagaaccagcctgccaaccagaatgctgccccccaggtggtggtgaaccctggggccaaccagaacctgaggatgaatgcccagggcggccccatcgtggaggaggatgatgagatcaacagagactggctggactggacctacagcgctgccaccttcagcgtcttcctgagcatcctgtacttctacagcagcctgagccgcttcctgatggtgatgggcgccaccgtggtgatgtacctgcaccacgtgggctggttccccttccggcccaggcctgtgcagaacttccccaatgatggccccccaccagatgtggtgaaccaggaccccaacaacaacctgcaggagggcacagatcctgagacagaggaccccaaccacctgcccccagacagagatgtgctggatggagagcagaccagccccagcttcatgagcacagcctggctggtgttcaagaccttctttgccagcctgctgcctgagggccccccagccatcgccaactag

SEQ ID NO: 294000 - DNA, 1101 bp, Artificial Sequence
  derived and/or modified sequence
atggagagcgagaccgagcccgagcccgtgaccctgctggtgaagtcaccaaaccagcgacatcgcgacctggaattgagcggtgacaggggttggtcagtcggacatcttaaggcacacttgtccagagtttaccccgaaagacctagacccgaagaccagaggctgatttatagcggcaaattattactcgatcatcagtgtttgcgagatctgctccccaaagtggccgaaagcaccgaggagcctgccgggtctaaccgtggccaatatcccgaggattcaagctccgacggcctccgtcagagggaagtactgagaaatctgtcaagtcccgggtgggagaacattagtagacctgaggccgcccagcaagctttccaggggctgggtccagggttcagcgggtacacaccttacggatggctccagctctcctggttccagcagatatacgcgagacaatactacatgcagtatttggctgctaccgcagcaagtggcgccttcgtgccacctcctagcgcccaagagattccggtggtgtctgccccagccccggcccctattcataatcagttccctgcagagaaccaaccagccaatcagaatgctgccccacaagtggtggtgaatcctggtgctaatcagaatttacgcatgaacgcgcagggaggacccatagtggaggaggatgacgagatcaaccgggattggctggattggacctactcagcagcaacgttcagtgtattcctcagtatcctttatttctacagtagcctgagccgtttcctgatggtgatgggagcaacggtggtcatgtacctgcaccacgtcggctggtttcccttccgccctagaccagtccagaatttccccaatgacggcccaccacccgatgtggtgaaccaggatcctaataacaatctgcaggaaggaacagatcctgaaacggaagatcctaatcatttgcctccggaccgggatgtactggacggcgagcagacttctccatctttcatgagtactgcttggctggtgtttaaaaccttttttgcttcgctactgccagagggcccccctgccatcgctaattag

SEQ ID NO: 294001 - DNA, 1101 bp, Artificial Sequence
  derived and/or modified sequence
atggaatccgagactgaaccagaacctgtcacgctgctggtgaagagtcccaatcagcgccaccgcgacctcgaactgagcggcgacagagggtggtctgtcggccaccttaaggcacacttaagcagagtctacccagaacggcctcggcctgaagatcagcgactgatctactcagggaagttactgcttgatcatcagtgcctgagagacttgcttcctaaggtggccgagagcaccgaggagccagctgggtccaaccgcggtcagtacccggaggacagcagttctgatggtctcaggcagcgggaagtgctgcggaatcttagcagccccggatgggaaaacatttctaggcctgaagcagcccagcaagcattccaagggctgggtcctggcttttcggggtacactccgtatggatggctacaactgtcgtggttccagcagatttatgcgcgtcaatattacatgcagtatctagcagctaccgccgcaagcggagcatttgtccctcccccatcagcacaggaaatcccggtcgtgtcagctcctgcaccagcaccaattcataaccaatttcctgctgagaatcagcctgcaaaccagaatgccgctccgcaggtggtagtgaatccaggcgcaaatcagaacttgcgaatgaacgctcaggggggaccaatagtggaggaagatgacgaaataaaccgggattggctggactggacctattcagctgccacgttcagcgtgttcttgtctatcctatacttctactctagcctgagccgcttcttgatggtgatgggggcaacggttgtgatgtatcttcaccatgtcggctggttcccatttcgccctcgacctgttcagaattttcctaatgatggccctccaccggatgttgttaatcaggatcctaataacaacctccaggaaggcaccgaccccgagactgaggatccaaaccatcttccccctgaccgcgatgtgctggacggagaacaaacctctccatccttcatgtccactgcttggttggtcttcaaaaccttttttgcctctcttctaccggaaggccctccggctatagctaattag

SEQ ID NO: 294002 - DNA, 1101 bp, Artificial Sequence
  derived and/or modified sequence
atggagagcgagaccgagcccgagcccgtgaccctgctggtgaagagccccaaccagagacacagagacctggagctgagcggcgacagaggctggagcgtgggccacctgaaggcccacctgagcagagtgtaccccgagagacccagacccgaggaccagagactgatctacagcggcaagctgctgctggaccaccagtgcctgagagacctgctgcccaaggtggccgagagcaccgaggagcccgccggcagcaacagaggccagtaccccgaggacagcagcagcgacggcctgagacagagagaggtgctgagaaacctgagcagccccggctgggagaacatcagcagacccgaggccgcccagcaggccttccagggcctgggccccggcttcagcggctacaccccctacggctggctgcagctgagctggttccagcagatctacgccagacagtactacatgcagtacctggccgccaccgccgccagcggcgccttcgtgcccccccccagcgcccaggagatccccgtggtgagcgcccccgcccccgcccccatccacaaccagttccccgccgagaaccagcccgccaaccagaacgccgccccccaggtggtggtgaaccccggcgccaaccagaacctgagaatgaacgcccagggcggccccatcgtggaggaggacgacgagatcaacagagactggctggactggacctacagcgccgccaccttcagcgtgttcctgagcatcctgtacttctacagcagcctgagcagattcctgatggtgatgggcgccaccgtggtgatgtacctgcaccacgtgggctggttccccttcagacccagacccgtgcagaacttccccaacgacggccccccccccgacgtggtgaaccaggaccccaacaacaacctgcaggagggcaccgaccccgagaccgaggaccccaaccacctgccccccgacagagacgtgctggacggcgagcagaccagccccagcttcatgagcaccgcctggctggtgttcaagaccttcttcgccagcctgctgcccgagggcccccccgccatcgccaactag

SEQ ID NO: 294003 - protein, 604 aa, Artificial Sequence
  derived and/or modified sequence
MRGAGPSPRQSPRTLRPDPGPAMSFFRRKVKGKEQEKTSDVKSIKASISVHSPQKSTKNHALLEAAGPSHVAINAISANMDSFSSSRTATLKKQPSHMEAAHFGDLGRSCLDYQTQETKSSLSKTLEQVLHDTIVLPYFIQFMELRRMEHLVKFWLEAESFHSTTWSRIRAHSLNTVKQSSLAEPVSPSKKHETTASFLTDSLDKRLEDSGSAQLFMTHSEGIDLNNRTNSTQNHLLLSQECDSAHSLRLEMARAGTHQVSMETQESSSTLTVASRNSPASPLKELSGKLMKSIEQDAVNTFTKYISPDAAKPIPITEAMRNDIIARICGEDGQVDPNCFVLAQSIVFSAMEQEHFSEFLRSHHFCKYQIEVLTSGTVYLADILFCESALFYFSEYMEKEDAVNILQFWLAADNFQSQLAAKKGQYDGQEAQNDAMILYDKYFSLQATHPLGFDDVVRLEIESNICREGGPLPNCFTTPLRQAWTTMEKSSVKKASIKILKNFDEAIIVDAASLDPESLYQRTYAGKMTFGRVSDLGQFIRESEPEPDVRKSKGSMFSQAMKKWVQGNTDEAQEELAWKIAKMIVSDIMQQAQYDQPLEKSTKV

SEQ ID NO: 294004 - DNA, 1815 bp, Artificial Sequence
  derived and/or modified sequence
atgcggggtgcaggaccaagtcccagacagagtcctagaaccctgcgtcccgaccctggccctgcgatgtcattttttagacggaaggtcaagggtaaagagcaggagaagacatccgatgttaagtccatcaaagcctccatcagcgtgcattctccccagaaatcaaccaaaaatcacgccctgttagaagccgctggcccatcccatgtcgcaatcaatgccatctcggcaaatatggattctttctcttcctcccggaccgccacactcaaaaagcagccctcgcatatggaagccgcacacttcggcgatctcggccggtcatgcctggattatcaaacacaggaaaccaaaagctccttatcaaagacactcgagcaggtgcttcacgataccattgtcctgccttactttatccaatttatggaacttaggcgaatggagcacctcgtgaagttttggctggaggccgagtcattccactcgacaacatggtctaggatcagggcccactcccttaataccgtaaaacagagtagcctcgctgagcccgtgagcccttcaaaaaagcacgaaacaaccgcttccttcctgacagacagcctcgacaagcggttggaggattccggttccgcacagctgtttatgacacacagcgagggtattgacctcaataatcgcacgaattccacccagaaccatcttctgctgtcacaggagtgcgatagcgcacactcccttcggctagaaatggcaagggccgggactcaccaagtctcaatggagacacaagaatccagctcaactttaaccgtcgcttcccgcaactcccccgcttcccccctgaaggagctaagcggtaagctgatgaagtctattgagcaggacgctgtcaacactttcaccaagtatatttccccggacgccgcgaaacctatccccataacagaggccatgcggaatgatatcatcgcccggatctgcggtgaggacgggcaagtggacccaaactgcttcgtgttggctcaaagcatagtgttctctgccatggagcaagaacacttttcagaattcctgcgctctcatcacttctgcaagtatcagatcgaagtcctcacatctgggaccgtgtatctggctgacatcctgttttgcgaatcagccttattctacttcagcgagtacatggagaaagaggatgccgttaacattcttcaattttggctagcagccgataattttcagagccagctggctgcgaagaaagggcagtacgacggccaggaagcccagaacgacgccatgatactgtatgacaaatactttagtctccaagccacacacccgctggggttcgatgacgtggtgcggttagaaattgaaagcaacatatgtcgggagggcgggccactgccgaactgctttaccactccccttcgccaggcctggaccactatggaaaagtcgtcggtcaagaaagcatccattaagattctgaaaaatttcgatgaggccattattgtggatgctgcaagtcttgatcctgagtctctttaccagcgcacctacgccggcaagatgacgttcggacgcgtgagcgacctgggtcagtttatccgggaatctgagcccgaacctgatgtgaggaaatctaagggttccatgttttcgcaggccatgaaaaaatgggtgcaaggtaataccgatgaagctcaggaggagcttgcctggaagattgcgaagatgattgtctcagacataatgcagcaggcccagtatgaccagccccttgaaaaatcaaccaaggtctag

SEQ ID NO: 294005 - DNA, 1815 bp, Artificial Sequence
  derived and/or modified sequence
atgagaggagctggccccagcccccggcagagccccaggaccctgcggccagaccccggccctgccatgtccttcttccggaggaaggtgaagggcaaggagcaggagaagaccagtgatgtgaagagcatcaaggccagcatctctgtgcacagcccccagaagagcaccaagaaccacgccctgctggaggccgccggccccagccacgtggccatcaatgccatcagcgccaacatggacagcttcagcagcagcaggacagccaccctgaagaagcagcccagccacatggaggccgcccactttggagacctgggccgcagctgcctggactaccagacccaggagaccaagagcagcctgagcaagaccctggagcaggtgctgcatgacaccatcgtgctgccctacttcatccagttcatggagctgcggaggatggagcacctggtgaagttctggctggaggccgagagcttccacagcaccacctggagccgcatccgggcccacagcctgaacacagtgaagcagagcagcctggccgagcctgtgagccccagcaagaagcatgagaccacagccagcttcctgacagacagcctggacaagaggctggaggacagcggcagcgcccagctgttcatgacccacagcgagggcatcgacctgaacaacagaaccaacagcacccagaaccacctgctgctgagccaggagtgtgacagcgcccacagcctgcggctggagatggcccgggccggcacccaccaggtgtccatggagacccaggagagcagcagcaccctgactgtggccagcaggaacagccctgccagccccctgaaggagctgagcggcaagctgatgaagagcattgagcaggatgctgtgaacaccttcaccaagtacatcagcccagatgctgccaagcccatccccatcacagaggccatgagaaatgacatcatcgcccgcatctgtggagaagatggccaggtggaccccaactgctttgtgctggcccagagcatcgtgttttctgccatggagcaggagcacttcagcgagttcctgcggagccaccacttctgcaagtaccagatcgaggtgctgaccagcggcaccgtgtacctggccgacatcctcttctgtgagagcgccctcttctacttcagcgagtacatggagaaggaggatgctgtgaacatcctgcagttctggctggccgctgacaacttccagagccagctggccgccaagaagggccagtatgatggccaggaggcccagaatgatgccatgatcctgtatgacaagtacttcagcctgcaggccacccaccccctgggctttgatgatgtggtgcggctggagattgagagcaacatctgccgggagggcggccccctgcccaactgcttcaccacccccctgcggcaggcctggaccaccatggagaagagctctgtgaagaaggccagcatcaagatcctgaagaactttgatgaggccatcatcgtggatgctgccagcctggaccctgagagcctgtaccagaggacctacgccggcaagatgaccttcggccgggtgtctgacctgggccagttcatccgggagagcgagcctgagccagatgtgaggaagagcaagggctccatgttcagccaggccatgaagaagtgggtgcagggcaacacagatgaggcccaggaggagctggcctggaagatcgccaagatgattgtgtctgacatcatgcagcaggcccagtatgaccagcccctggagaagagcaccaaggtgtag

SEQ ID NO: 294006 - DNA, 1815 bp, Artificial Sequence
  derived and/or modified sequence
atgcggggcgccggccccagcccccggcagagcccccggaccctgcgccctgaccctggccccgctatgagtttttttcgacggaaggtaaagggcaaggaacaggaaaagacgagtgacgttaaatccataaaagcttccataagcgtccatagcccacagaaatctaccaagaatcacgcattgctagaggccgctggtcccagtcacgttgcgattaatgctatatccgctaatatggactctttcagttccagtcgtacggcgaccttgaagaaacagccaagtcacatggaggccgctcatttcggcgatctgggcaggtcgtgtctagattatcagacacaagaaactaaatcgtctctctctaagaccctcgaacaagtcctgcacgacactattgtgttaccctacttcatccaatttatggagctgaggcgaatggagcatctcgtaaaattctggttagaggcggaatccttccattccaccacctggtctaggatacgggcgcacagtttaaatacagtgaagcaatccagtcttgctgaacccgtcagcccatcaaaaaagcacgaaaccacagccagtttcctgacagacagcctggacaagaggctggaagactctggctccgcccagctgtttatgacgcactccgagggcatagacctgaacaacaggactaatagtacacaaaaccatctattgctgtcccaagagtgcgattccgctcattcattgcggctggaaatggccagggcgggcacgcaccaggtgagcatggagacccaggagagcagctcaaccctcacagtcgccagccgtaacagtcctgcaagcccacttaaggagctgagtggcaagctgatgaagagtatagagcaggatgccgtcaataccttcacgaagtacatcagccccgatgcggcaaagcccatccccatcacggaggcgatgcgtaatgacattatagcccgcatttgcggagaggatggccaggtggatcctaactgcttcgtacttgcgcagtccattgtgtttagcgccatggaacaggagcattttagcgagttcctgcggagccaccacttttgtaagtatcaaatcgaagtcctgacctccggaactgtttatctggcagatattctgttctgcgagtccgccctgttctacttctcagagtatatggagaaagaagacgccgtgaacattctgcagttttggttggccgcagacaattttcagtcacaactcgcggccaagaaaggacaatacgatggtcaggaagcgcagaatgatgcgatgatcttgtacgataaatattttagcctccaagccactcatccattaggttttgacgatgttgtgaggttggagatagagtcaaacatttgtcgcgaaggcgggccgttaccaaattgttttaccaccccattaagacaagcttggacaaccatggaaaaatcaagcgtgaaaaaagcctcaattaaaatactcaagaattttgacgaagcaatcatcgtcgacgcagcctcacttgacccagagtcactgtatcaacgtacatacgccggcaaaatgacgttcgggcgtgtcagcgacttgggccagttcattcgagagtccgagcccgagccggatgtcaggaagtcgaagggttccatgttttctcaggctatgaaaaaatgggtgcaggggaatacagacgaggcccaggaagaactggcatggaagattgcaaaaatgattgtgagcgacatcatgcagcaggcgcagtatgaccagccactggaaaaatctaccaaggtatag

SEQ ID NO: 294007 - DNA, 1815 bp, Artificial Sequence
  derived and/or modified sequence
atgcgaggtgccggtccctcccccaggcaatcccctcgaaccttgagaccagacccaggtcccgctatgtccttcttcagaagaaaggtgaagggcaaagagcaggaaaagacatccgacgtgaaatcaattaaggcgagtatcagtgtacatagtccacagaagtctactaaaaatcatgcgctgcttgaagccgctggtccttcacatgtagcgattaacgccattagcgctaacatggactccttctcctcttcacgaaccgctacactaaagaaacagccaagccatatggaggctgctcacttcggagacctcgggagatcttgtctcgactatcagacccaggagaccaagagttccctgagcaaaacattggagcaggtcttgcacgacacgatcgtgctgccttattttatccagttcatggagcttaggcggatggaacatctggtgaaattctggctcgaagcagaatctttccattcaactacatggtcacgtatccgcgcacactccctcaatactgtaaaacaatctagtttagctgagcccgtgagccctagcaaaaagcacgagacaacagctagtttcctcacagatagcctggacaaacggttagaggacagcggatctgcccagctgttcatgacccactcagagggcatcgacctaaataatcggacaaatagcactcagaatcacctgctgctgtctcaggagtgcgattctgctcacagtttgagacttgaaatggcaagggcaggcactcaccaggtgtctatggagacacaggagagcagtagcacgctcaccgtagcctcgaggaatagccctgccagccctttgaaggagctgagcggcaagctgatgaagagcatcgaacaggacgctgttaacacattcaccaaatatatttccccagatgcagccaaacctattcctatcaccgaggcaatgcgaaacgacatcatagcacggatctgtggtgaagacggacaggtggatcctaactgtttcgtactggcccaatccatagttttcagtgccatggaacaagaacactttagcgaatttctgagatcacaccacttttgcaaataccagattgaagttcttacttccgggaccgtgtaccttgccgatatactgttctgtgaaagtgccctgttttatttcagcgaatatatggaaaaggaggacgcagttaatatccttcaattttggctggccgctgataattttcagtcacagctcgctgctaaaaaagggcaatacgacgggcaggaggcacaaaacgatgctatgatactgtacgataagtactttagcctgcaggctactcaccccctgggttttgacgacgtggtgaggctcgagatagagagcaatatatgtagggaagggggtcctctccctaactgcttcactacccccctgaggcaggcttggacaaccatggaaaaatcatctgtcaaaaaagcatcgataaaaatactgaagaacttcgatgaagccatcattgtggacgccgcatcacttgacccggaatcactgtaccagcggacctacgccggaaaaatgacgttcggcagggtgtcggatctgggccagttcattagagaaagcgaacccgaacccgacgtgaggaagtccaagggttccatgttctcccaagccatgaagaaatgggtgcaaggaaatacagacgaggcccaagaagagttggcctggaagattgctaaaatgatcgttagcgatattatgcaacaagcacagtacgatcagccattagagaaatctaccaaggtctag

SEQ ID NO: 294008 - DNA, 1812 bp, Artificial Sequence
  derived and/or modified sequence
atgaggggagccgggccctccccgcgccagtccccccgcaccctccgtcccgacccgggccccgccatgtccttcttccggcggaaagtgaaaggcaaagaacaagagaagacctcagatgtgaagtccattaaagcttcaatatccgtacattccccacaaaaaagcactaaaaatcatgccttgctggaggctgcaggaccaagtcatgttgcaatcaatgccatttctgccaacatggactccttttcaagtagcaggacagccacacttaagaagcagccaagccacatggaggccgctcattttggtgacctgggcagatcttgtctggactaccagactcaagagaccaaatcaagcctttctaagacccttgaacaagtcttgcacgacactattgtcctcccttacttcattcaattcatggaacttcggcgaatggagcatttggtgaaattttggttagaggctgaaagttttcattcaacaacttggtcgcgaataagagcacacagtctaaacacagtgaagcagagctcactggctgagcctgtctctccatctaaaaagcatgaaactacagcgtcttttttaactgattctcttgataagagattggaggattctggctcagcacagttgtttatgactcattcagaaggaattgacctgaataatagaactaacagcactcagaatcacttgctgctttcccaggaatgtgacagtgcccattctctccgtcttgaaatggccagagcaggaactcaccaagtttccatggaaacccaagaatcttcctctacacttacagtagccagtagaaatagtcccgcttctccactaaaagaattgtcaggaaaactaatgaaaagtatagaacaagatgcagtgaatacttttaccaaatatatatctccagatgctgctaaaccaataccaattacagaagcaatgagaaatgacatcatagcaaggatttgtggagaagatggacaggtggatcccaactgtttcgttttggcacagtccatagtctttagtgcaatggagcaagagcactttagtgagtttctgcgaagtcaccatttctgtaaataccagattgaagtgctgaccagtggaactgtttacctggctgacattctcttctgtgagtcagccctcttttatttctctgagtacatggaaaaagaggatgcagtgaatatcttacaattctggttggcagcagataacttccagtctcagcttgctgccaaaaagggccaatatgatggacaggaggcacagaatgatgccatgattttatatgacaagtacttctccctccaagccacacatcctcttggatttgatgatgttgtacgattagaaattgaatccaatatctgcagggaaggtgggccactccccaactgtttcacaactccattacgtcaggcctggacaaccatggagaagtccagtgtgaaaaaagccagtattaaaatactgaaaaattttgatgaagcgataattgtggatgcggcaagtctggatccagaatctttatatcaacggacatatgccgggaagatgacatttggaagagtcagtgacttggggcaattcatccgagaatctgagcctgaacctgatgtaaggaaatcaaaaggatccatgttctcacaagctatgaagaaatgggtgcaaggaaatactgatgaggcccaggaagagctagcttggaagattgctaaaatgatagtcagtgacattatgcagcaggctcagtatgatcaaccgttagagaaatctacaaaggta

SEQ ID NO: 294009 - DNA, 1815 bp, Artificial Sequence
  derived and/or modified sequence
atgagaggcgccggccccagccccagacagagccccagaaccctgagacccgaccccggccccgccatgagcttcttcagaagaaaggtgaagggcaaggagcaggagaagaccagcgacgtgaagagcatcaaggccagcatcagcgtgcacagcccccagaagagcaccaagaaccacgccctgctggaggccgccggccccagccacgtggccatcaacgccatcagcgccaacatggacagcttcagcagcagcagaaccgccaccctgaagaagcagcccagccacatggaggccgcccacttcggcgacctgggcagaagctgcctggactaccagacccaggagaccaagagcagcctgagcaagaccctggagcaggtgctgcacgacaccatcgtgctgccctacttcatccagttcatggagctgagaagaatggagcacctggtgaagttctggctggaggccgagagcttccacagcaccacctggagcagaatcagagcccacagcctgaacaccgtgaagcagagcagcctggccgagcccgtgagccccagcaagaagcacgagaccaccgccagcttcctgaccgacagcctggacaagagactggaggacagcggcagcgcccagctgttcatgacccacagcgagggcatcgacctgaacaacagaaccaacagcacccagaaccacctgctgctgagccaggagtgcgacagcgcccacagcctgagactggagatggccagagccggcacccaccaggtgagcatggagacccaggagagcagcagcaccctgaccgtggccagcagaaacagccccgccagccccctgaaggagctgagcggcaagctgatgaagagcatcgagcaggacgccgtgaacaccttcaccaagtacatcagccccgacgccgccaagcccatccccatcaccgaggccatgagaaacgacatcatcgccagaatctgcggcgaggacggccaggtggaccccaactgcttcgtgctggcccagagcatcgtgttcagcgccatggagcaggagcacttcagcgagttcctgagaagccaccacttctgcaagtaccagatcgaggtgctgaccagcggcaccgtgtacctggccgacatcctgttctgcgagagcgccctgttctacttcagcgagtacatggagaaggaggacgccgtgaacatcctgcagttctggctggccgccgacaacttccagagccagctggccgccaagaagggccagtacgacggccaggaggcccagaacgacgccatgatcctgtacgacaagtacttcagcctgcaggccacccaccccctgggcttcgacgacgtggtgagactggagatcgagagcaacatctgcagagagggcggccccctgcccaactgcttcaccacccccctgagacaggcctggaccaccatggagaagagcagcgtgaagaaggccagcatcaagatcctgaagaacttcgacgaggccatcatcgtggacgccgccagcctggaccccgagagcctgtaccagagaacctacgccggcaagatgaccttcggcagagtgagcgacctgggccagttcatcagagagagcgagcccgagcccgacgtgagaaagagcaagggcagcatgttcagccaggccatgaagaagtgggtgcagggcaacaccgacgaggcccaggaggagctggcctggaagatcgccaagatgatcgtgagcgacatcatgcagcaggcccagtacgaccagcccctggagaagagcaccaaggtgtag

SEQ ID NO: 294010 - DNA, 79 bp, Artificial Sequence
  derived and/or modified sequence
aatggaatcgaatggaatcaacatcaaacggaaaaaacggaattatcgaatggaatcaaagagaatcatcgaatggacc

SEQ ID NO: 294011 - DNA, 63 bp, Artificial Sequence
  derived and/or modified sequence
atcaacatcaaacggaaaaaacggaattatcgaatggaatcgaagagaatcatcgaacggacc

SEQ ID NO: 294012 - protein, 313 aa, Artificial Sequence
  derived and/or modified sequence
MTSCHIAEEHIQKVAIFGGTHGNELTGVFLVKHWLENGAEIQRTGLEVKPFITNPRAVKKCTRYIDCDLNRIFDLENLGKKMSEDLPYEVRRAQEINHLFGPKDSEDSYDIIFDLHNTTSNMGCTLILEDSRNNFLIQMFHYIKTSLAPLPCYVYLIEHPSLKYATTRSIAKYPVGIEVGPQPQGVLRADILDQMRKMIKHALDFIHHFNEGKEFPPCAIEVYKIIEKVDYPRDENGEIAAIIHPNLQDQDWKPLHPGDPMFLTLDGKTIPLGGDCTVYPVFVNEAAYYEKKEAFAKTTKLTLNAKSIRCCLH

SEQ ID NO: 294013 - DNA, 942 bp, Artificial Sequence
  derived and/or modified sequence
atgaccagctgccacatcgccgaggagcacatccagaaggtggccatcttcggcggcacccacggcaacgagctgaccggcgtgttcctggtgaagcactggctggagaacggcgccgagatccagagaaccggcctggaggtgaagcccttcatcaccaaccccagagccgtgaagaagtgcaccagatacatcgactgcgacctgaacagaatcttcgacctggagaacctgggcaagaagatgagcgaggacctgccctacgaggtgagaagagcccaggagatcaaccacctgttcggccccaaggacagcgaggacagctacgacatcatcttcgacctgcacaacaccaccagcaacatgggctgcaccctgatcctggaggacagcagaaacaacttcctgatccagatgttccactacatcaagaccagcctggcccccctgccctgctacgtgtacctgatcgagcaccccagcctgaagtacgccaccaccagaagcatcgccaagtaccccgtgggcatcgaggtgggcccccagccccagggcgtgctgagagccgacatcctggaccagatgagaaagatgatcaagcacgccctggacttcatccaccacttcaacgagggcaaggagttccccccctgcgccatcgaggtgtacaagatcatcgagaaggtggactaccccagagacgagaacggcgagatcgccgccatcatccaccccaacctgcaggaccaggactggaagcccctgcaccccggcgaccccatgttcctgaccctggacggcaagaccatccccctgggcggcgactgcaccgtgtaccccgtgttcgtgaacgaggccgcctactacgagaagaaggaggccttcgccaagaccaccaagctgaccctgaacgccaagagcatcagatgctgcctgcactag

SEQ ID NO: 294014 - DNA, 942 bp, Artificial Sequence
  derived and/or modified sequence
atgacctcctgccacatcgccgaggaacacattcagaaggtggccatatttggcggcacccatgggaacgagttaaccggcgtatttctggttaagcactggctagaaaacggggctgagattcagcgcaccggcctcgaagtgaagccttttatcacaaacccccgtgccgtgaagaaatgcactagatacatcgactgtgatttgaacagaatcttcgacctcgaaaacctcggcaagaaaatgtctgaggatcttccgtatgaggtcagacgcgctcaagaaatcaatcacctgttcgggccaaaggactctgaggacagctacgatattatctttgatctgcacaacactaccagcaatatgggatgcacactgatccttgaagattcccggaataacttcctgattcagatgttccactatataaagacctccctagcccctctcccatgctacgtgtacttaatcgaacatccctcactgaagtatgccaccactagaagcattgcaaagtatccggtgggtatcgaggtagggccccagcctcagggtgttttgcgcgcggatattcttgaccaaatgagaaagatgattaagcatgctctcgatttcattcaccactttaatgagggcaaggagttccccccctgtgccattgaggtgtataaaatcattgagaaagtggactaccccagggatgagaatggagagatcgctgcaattattcaccccaacctgcaggaccaagactggaaaccccttcaccctggggatcccatgttcctcaccctggatggcaaaacaatcccactcggaggtgactgtacagtatatcctgtattcgtcaatgaggccgcttattacgagaagaaagaggcattcgcaaaaacgacaaagctgaccctcaacgcaaaatctattagatgctgcctacactag

SEQ ID NO: 294015 - DNA, 942 bp, Artificial Sequence
  derived and/or modified sequence
atgacctcctgccacatagccgaggagcatattcagaaggtggccatcttcggcggtactcatggcaacgagcttaccggcgtgttcttagtgaagcactggttagagaacggggcagaaattcagagaaccggcctagaggtgaagcctttcatcacaaatccccgggctgtgaagaagtgcacccgatacattgactgtgacctcaacaggatctttgatctggagaacctgggtaagaaaatgagtgaagacttgccttacgaggttaggagggcccaggagattaaccatctgttcggacctaaggatagcgaggatagctatgatatcatttttgatttacataacacaactagcaacatggggtgcactttgatcctcgaagatagccgtaataacttcctgattcaaatgtttcattacattaagacaagtctggctccattgccatgttatgtctacttaatcgagcatccgtccttgaaatacgctaccacaaggtcaattgccaagtatcctgtgggcattgaggtggggcctcaacctcagggcgtactcagggcggacattctggatcagatgcgaaaaatgatcaagcacgcactcgactttatccatcactttaacgaaggcaaggaatttcctccatgcgcaatcgaggtttataaaatcatcgagaaggtggattaccctagagacgagaatggagagattgccgccatcatccaccccaatctacaggaccaggactggaagccattgcaccctggcgatcccatgtttctaaccctggacggaaaaactatccccctcgggggcgattgcactgtgtatcctgtcttcgtcaacgaggctgcctactacgagaagaaggaagccttcgctaaaaccactaaactaacactgaatgcaaaatccatcagatgctgtcttcattag

SEQ ID NO: 294016 - DNA, 5431 bp, Artificial Sequence
  derived and/or modified sequence
ttgtaacagaaaattaaaatatactccactcaagggaattctgtactttgccctttgggtaaagtctcatttacatttctaaacctttcttaagaaaatcgaatttcctttgatctctcttctgaattgcagaaatcagataaaaactacttggtgaaatgacttcttgtcacattgctgaagaacatatacaaaaggttgctatctttggaggaacccatgggaatgagctaaccggagtatttctggttaagcattggctagagaatggcgctgagattcagagaacagggctggaggtaaaaccatttattactaaccccagagcagtgaagaagtgtaccagatatattgactgtgacctgaatcgcatttttgaccttgaaaatcttggcaaaaaaatgtcagaagatttgccatatgaagtgagaagggctcaagaaataaatcatttatttggtccaaaagacagtgaagattcctatgacattatttttgaccttcacaacaccacctctaacatggggtgcactcttattcttgaggattccaggaataactttttaattcagatgtttcattacattaagacttctctggctccactaccctgctacgtttatctgattgagcatccttccctcaaatatgcgaccactcgttccatagccaagtatcctgtgggtatagaagttggtcctcagcctcaaggggttctgagagctgatatcttggatcaaatgagaaaaatgattaaacatgctcttgattttatacatcatttcaatgaaggaaaagaatttcctccctgcgccattgaggtctataaaattatagagaaagttgattacccccgggatgaaaatggagaaattgctgctatcatccatcctaatctgcaggatcaagactggaaaccactgcatcctggggatcccatgtttttaactcttgatgggaagacgatcccactgggcggagactgtaccgtgtaccccgtgtttgtgaatgaggccgcatattacgaaaagaaagaagcttttgcaaagacaactaaactaacgctcaatgcaaaaagtattcgctgctgtttacattagaaatcacttccagcttacatcttacacggtgtcttacaaattctgctagtctgtaagctccttaagagtagggttgtgccttattcaactgcatacatagctcctagcacagtgccttattcggtaggcatctaagcacatttcttaaattaattaatatatctttaaagatatcatattttatgtatgtagcttattcaaagaagtgtttcctatttctatatagtttattatacatgatacttgggtagctcaacattcttaataaacagcctttgtattcagaatataaaattgaaatagatatatataaagttatttgttttattgtgctttgccttactacacttcacggatactgtacttgtactttttttccaaattgaaggtttttggcaaccctgtgtctagaaagtctaacagtgccatgtttccaacagcatgtgctcactccttgtctctgtgtcaccctttgataatatttcaagcttttttatgatttatttattatatctgctatggtgatctgtgatcagtggcctttgatgttactgttgttaagtgttttggggcaccatgaatcgtgcccatgtgagactgcgaacttagtgaatgttgtgtgagttctaactgctctactgaccggccatttccttgtctctctccctgtcctctggcctccctgttccttgagacacaataattaataagtctacagcagactctgtgtgttcaagtgaaagaaagggtcatacttctagaaattaagcttagtaaggaaggcatgtcaaaagctgagacaggctgaaagctaggcctcttgcactggttagccaagttgtgaattcaaagaaaaggatcttgaagaaaattaaaaattctactccagtgcacacacacaaatgataagaaagcaaaacaaccttattgctgatatggagacagttttagtggtctggatagaagatcaaaccagccacacattaagccaaagcatgacccacagcaaggccctaactctcttcaattctgtgaaggctgagagaggtgaggaagctgcaggaagctgggagaggttggttcacaaggtttaaggaaagaagacagctctaaaacctacaagtggaaagcgaaccagcaagttgctgatgtggaagctgtagcaagttatccagaagatgtagctaaaatcattgacaaagatggctacactaaacaacggatcttcagtgtagttgaaacagccttctattggaagaagatgctatctaggactttcctagctagaggggagaaatgaatgcctagcttcaaagcttcaaaggacagcctgactctcttaagagctaacacagctggtgactttgggttaaagccaaagctcattaactgtttcaaaaatcctaaaactcttgttttttgttttttttttgagacggagtcttgctctgtcgtccaggctggagtgcagtggcgcaatctcggctcactgcaagctccgcctcccaggttcatgccattctcctgcctcagcctccccagtagctgagattacaggtgcctgccaccacgcccggctaattttttgcatttttttagtagagatggggtttcactctgctagccaggatggtctcgatctcctgacctcatgatccgcctgcctcggcctcccaaagtgctgggattacaggcatgagccaccacgcccggcccaaaaatcgtaggactctgaagactgatgctaaacctgctgtgtctgagctctataaatggaacaacaaagcctcgctggcagcacatctgtttgcggcatggtttactgtatattttaagcccactgttgagacctactgcttgggaaaaaaaaaaattcctttcaaaatactactgctgattgacaatacaccatgttacccaagagctctgctggagatgtgcgaagagattagcattgttttcgcgcctgctaccacgacatccagccgaagcccatggatcaaggcgtcattgtgactttcaaatctaactatttaagaaatacatttcaggctgggggaggggagaaaaaagaaaaaaaagaaaggaagaaaaaaatcatttcataaggctatagctgccatagatagtgattcctctgatggagctgggcaaagtaaacagaaaacctctggaaaggattcagcattccagatgccattaagaacattcaggatccgtgggaggagatcaaaatatcaacattaacaggagtttggaaaaagtgaattccaaccctcttggatgactctgaggaattcgagacttgagtaaaggaagtcatgcagatgtacagcaagagaatgagaagtggagcctgaagatgtaactgaactgctgcaatctcatgatcacacttgaatggatgaggagtcgcttcttataaatgagcaaaaaagtggtttcttggctgcaatcaactcttgttgcagatgctgtgaacactgttgaaatgacaaaggatttagaatattacgtaaacatagttgataaagcagcagcagggtttaagaggattgactcctattttgaaatgagttcggctgggagaagtggctcatgcctgtcgtcctagcactttgggaggccaaggcagacagagcacctgaggtaaggagttcgagaccagcctggccaacatggtgaaaccccctctctactaaaaataccaacatattagccaggcgtggtggcacgtgcctgtagtcccagctacttgggaggctgaggcagaaggatcacttgaacccaggaggcagaggttgcagtaagccaagactgcgccactgcactccagcctggtggacacagcaagcctccatctcaaaaaaaaaaaaaaaaaaaaaatgagttctactgtgaataaaatgttattaaacagcatttcatgctacagagaaatctttcacgaaaggaagagtcaatcaatgcagcgaacttgttgttttattttaagaaattgtcacggccatcccaaccctcagtgcccaaccaccctgatcaggcagccatcatcaaggcaaggccctccaccagcaaaaagatcatgaattgctgaaagctcaaatgatggttagcttttttagcaataaagcatttttaatgaaggaatgtacatgttttagatataatgctattacacatttaacatactacatatagtgtgagcataacttttacacgtactggaaaatcaaaaaatatgtgtggctcatctgttataatgtttgttttattgtggtgatctggagccaaggctgaaatatctctgaggtatgcctgtaatgtataagtgctagtagaaatgagttgtgcagaattgctatttttttcaatttttatatttgggttaatggtaatatactaagcgtccagtctataaacttcagcattcgttgcgaaatccagaggagacttttaagtgctgttttgtagatgaaatatgaaagagaaacaagggcttaatggtaaagatgacatatgactatattaagaaactgaatggccctttgtccacaaacagtaacccacacagcattgctactgtggcatgcccactgctctgcactgacctcatggagcagagaacctccttcagacacctcacgcaccccctgaggagctaatgtttcttcccaacatggaaaatttggaagaggcctattcttcacagctgtcacttctcattttgaaagaatatgcccacccttattcgcaggcaaggtgtgaggaggtctttgggctccagctgttgccagcagaggtggtgaaagtcaacaacagggcactggacacacatagaaatgtgacccacagctatggtttgcaaatacagtctttcaagaagtcctgccatgtcctaaatgcccaaaccccttgcctcccatgattcttctcctcaaaggaccttctgctggacgccgccccctccctctccagccccaccagggccctccccgccatcctcttaggccacagcagccaataaagagtgtttttattccatgatctgtacccccaatgaatccataatcatagtttcaaatgtatttaccaaaaatactaacattatctggaatgaatgaatgaatgaatgaatgaataaatattatatatttatacattttcattcttccaaagtgaaccccactatgccagttttactccatactcagtgttctggaaagcccatattctttctaaatttttcagcatttttttctatttttgtactttaccaaaattatttacattggaataaactctcttccttctgaattctgtagtaaaaa

SEQ ID NO: 294017 - DNA, 1350 bp, Artificial Sequence
  derived and/or modified sequence
gaaatgctctcctttttcctaataaagctttccacagaagacaaactctgtacacaaaaaacaagaaatcagataaaaactacttggtgaaatgacttcttgtcacattgctgaagaacatatacaaaaggttgctatctttggaggaacccatgggaatgagctaaccggagtatttctggttaagcattggctagagaatggcgctgagattcagagaacagggctggaggtaaaaccatttattactaaccccagagcagtgaagaagtgtaccagatatattgactgtgacctgaatcgcatttttgaccttgaaaatcttggcaaaaaaatgtcagaagatttgccatatgaagtgagaagggctcaagaaataaatcatttatttggtccaaaagacagtgaagattcctatgacattatttttgaccttcacaacaccacctctaacatggggtgcactcttattcttgaggattccaggaataactttttaattcagatgtttcattacattaagacttctctggctccactaccctgctacgtttatctgattgagcatccttccctcaaatatgcgaccactcgttccatagccaagtatcctgtgggtatagaagttggtcctcagcctcaaggggttctgagagctgatatcttggatcaaatgagaaaaatgattaaacatgctcttgattttatacatcatttcaatgaaggaaaagaatttcctccctgcgccattgaggtctataaaattatagagaaagttgattacccccgggatgaaaatggagaaattgctgctatcatccatcctaatctgcaggatcaagactggaaaccactgcatcctggggatcccatgtttttaactcttgatgggaagacgatcccactgggcggagactgtaccgtgtaccccgtgtttgtgaatgaggccgcatattacgaaaagaaagaagcttttgcaaagacaactaaactaacgctcaatgcaaaaagtattcgctgctgtttacattagaaatcacttccagcttacatcttacacggtgtcttacaaattctgctagtctgtaagctccttaagagtagggttgtgccttattcaactgcatacatagctcctagcacagtgccttattcggtaggcatctaagcacatttcttaaattaattaatatatctttaaagatatcatattttatgtatgtagcttattcaaagaagtgtttcctatttctatatagtttattatacatgatacttgggtagctcaacattcttaataaacagcctttgtattcagaatataaaattgaaatagatatatataaagtt

SEQ ID NO: 294018 - DNA, 942 bp, Artificial Sequence
  derived and/or modified sequence
atgaccagctgccacatcgccgaggagcacatccagaaggtggccatctttggaggcacccatggaaatgagctgactggagtcttcctggtgaagcactggctggagaatggagctgagatccagaggacaggcctggaggtgaagcccttcatcaccaaccccagggctgtgaagaagtgcacccgctacatcgactgtgacctgaaccgcatctttgacctggagaacctgggcaagaagatgtctgaggacctgccctatgaggtgagaagagcccaggagatcaaccacctgtttggccccaaggacagcgaggacagctatgacatcatctttgacctgcacaacaccaccagcaacatgggctgcaccctcatcctggaggacagcaggaacaacttcctgatccagatgttccactacatcaagaccagcctggcccccctgccctgctacgtgtacctgattgagcaccccagcctgaagtatgccaccaccaggagcatcgccaagtaccctgtgggcatcgaggtgggcccccagccccagggcgtgctgcgggctgacatcctggaccagatgaggaagatgatcaagcacgccctggacttcatccaccacttcaatgaaggcaaggagttccccccctgtgccatcgaggtgtacaagatcatcgagaaggtggactaccccagagatgaaaatggagaaattgctgccatcatccaccccaacctgcaggaccaggactggaagcccctgcaccctggggaccccatgttcctgaccctggatggcaagaccatccccctgggcggggactgcaccgtgtaccctgtgtttgtgaatgaggccgcctactatgagaagaaggaggcctttgccaagaccaccaagctgaccctgaatgccaagagcatccgctgctgcctgcactag

SEQ ID NO: 294019 - DNA, 942 bp, Artificial Sequence
  derived and/or modified sequence
atgaccagctgccacatcgccgaggagcacatccagaaggtggccatctttggaggaacccatggtaatgagctaactggcgtgttcctagttaagcattggttagaaaatggagcagaaatccagagaactgggcttgaggtgaaacccttcatcaccaatcctcgcgccgtgaaaaagtgcactagatatatcgattgtgatctgaaccgtattttcgacctggagaacctcggcaaaaagatgagcgaagatctgccctacgaggtgcgtcgcgcccaggagattaaccacctcttcggccctaaagactccgaggatagctacgatataattttcgacttgcataacacaacatccaacatggggtgcaccctaatcttggaggacagtcggaacaatttcttaatccagatgttccattatataaagacctctcttgctccactaccctgttatgtgtacctgatcgaacaccccagccttaaatatgccaccactagatccatcgcaaaataccccgtggggatagaagtgggcccacaacctcagggggtcctgcgtgctgacattctggaccagatgcgtaaaatgattaaacacgctctggattttatccaccatttcaatgaaggaaaggaatttcctccctgtgccatcgaggtatacaaaattattgagaaggtcgattatccgagggatgagaacggggaaattgctgctataatccacccaaatctgcaagaccaggactggaagccattacatcctggagatccgatgttcctcactctcgatggtaagactatccctcttggcggcgactgcacagtgtatccggtctttgtgaatgaggccgcgtattatgagaagaaagaagccttcgctaaaaccacaaagctcaccctcaacgctaagagtatccgctgctgcctacattag

SEQ ID NO: 294020 - DNA, 942 bp, Artificial Sequence
  derived and/or modified sequence
atgaccagctgccacatcgccgaggagcacatccagaaggtggccatttttggcggcacacatgggaacgagttaactggggtgtttctagtaaagcactggttggagaatggggccgagattcagagaaccgggctggaagtgaaaccctttattactaacccgcgtgctgtgaagaagtgtacacgctacatcgattgcgacttgaacaggatcttcgacctggaaaatttagggaagaaaatgtcagaagacctgccctatgaggttagaagggctcaggagataaatcacttatttgggccaaaagactccgaggactcctacgacataatatttgacctacataacacaacatcaaacatgggatgcaccttgattctagaggactcacggaataatttcctcattcagatgtttcactatattaagacaagtctggcccccctgccctgctatgtgtacctgattgagcacccaagccttaagtatgctaccacaaggtcaattgcaaagtatccggtcggaatagaagtaggtcctcagccccagggtgtgctgcgggcagacatattggaccagatgcggaaaatgattaagcacgctcttgattttattcaccacttcaacgaaggtaaagagttccctccatgcgcgatcgaggtgtataaaataatcgaaaaggtggattaccctcgcgatgagaatggtgaaattgcggctattatccaccccaatctgcaggaccaagactggaaaccactgcatcccggggaccctatgtttctcactcttgatgggaagacaattcctctcggaggggattgcaccgtgtaccctgtgttcgtgaatgaggccgcttactatgagaagaaggaggctttcgctaagactacaaagttgactctgaatgctaaaagcatcagatgctgccttcattag

SEQ ID NO: 294021 - DNA, 942 bp, Artificial Sequence
  derived and/or modified sequence
atgacgtcctgccacatagctgaggagcacatccagaaggtggcaatctttggcggtacacacggcaatgagctgacaggggtgttcctagtgaagcactggctcgaaaacggggcagaaatccagcggactggacttgaagtgaagcctttcatcactaaccccagggccgttaaaaaatgtacgcggtatatcgactgtgacctgaaccgcatttttgaccttgaaaacctcggaaaaaagatgagcgaggacctcccctacgaggtgcgcagagcccaggagatcaatcacctgtttgggccaaaggattcggaggattcatatgatatcatttttgacctccacaacaccacctctaatatgggatgcacacttatcctggaggactcccgcaataattttttgattcagatgtttcattacatcaagacctctctggcacccttaccttgctatgtgtacctcattgagcacccttcccttaaatacgcaacaactaggtcaatagcaaagtaccctgtgggcatcgaggtcggtcctcagccacaaggcgtcctgcgcgctgacatacttgatcagatgagaaaaatgataaagcacgcattggatttcatccatcacttcaatgaaggaaaagaattcccgccatgtgctattgaggtgtataagatcattgagaaagtggactaccctagagacgagaacggtgagatcgcagccataatccacccaaatctccaagaccaggattggaaaccactgcaccctggggaccctatgttcctgacgctggacgggaaaacaattccccttggcggagattgcaccgtgtatccagtattcgttaatgaagccgcttactacgagaagaaggaggcgttcgccaagacaactaagctcacactgaatgctaaaagtatccgttgctgcttgcactag

SEQ ID NO: 294022 - DNA, 942 bp, Artificial Sequence
  derived and/or modified sequence
atgacaagttgccatatcgccgaggagcacattcagaaggtggcaatttttggtggaacacatgggaacgagctgaccggcgtgttcctagtgaaacattggctggagaacggcgctgagatccagcggaccggcctggaggtgaagccttttatcactaatcctagagccgtgaagaagtgcacccggtatatcgattgcgatctgaacaggatcttcgaccttgagaacttagggaaaaagatgtcagaggatctgccttacgaggtgagacgtgcccaggagatcaatcacctgttcgggccaaaagactctgaggactcatacgatataattttcgatctgcataacactacgagcaatatgggttgtaccttaattctggaggacagccggaacaatttcctcattcagatgttccattatatcaaaaccagcctagcccctttaccgtgttacgtctacttaatagagcacccgtccctgaagtatgccaccactagatccatagccaaataccccgtgggaattgaagtgggccctcagccgcagggggtattgcgcgcagacattctggaccaaatgcggaagatgattaaacatgctcttgacttcatccaccactttaatgaggggaaggagtttcccccttgtgccatcgaggtatataaaatcatagagaaggtcgattacccgcgtgatgagaatggtgaaattgctgccatcatccacccaaaccttcaggaccaagattggaaaccgttgcatccgggtgaccctatgttcctcactctagatggtaaaacaattccactcggaggggattgcaccgtgtacccagtgtttgtgaatgaggccgcttattatgagaagaaggaggcttttgccaaaacgactaagctcacactgaacgctaaaagcattcgctgttgcctgcattag

SEQ ID NO: 294023 - DNA, 939 bp, Artificial Sequence
  derived and/or modified sequence
atgacttcgtgccatatcgctgaggaacatatccaaaaagtggccatcttcggcggaacgcatggaaacgaacttaccggcgtgtttctcgtgaagcactggctggaaaatggagcagaaatccagcgcactggattggaggttaagccattcatcaccaacccacgggccgtgaagaagtgtacccggtacatcgattgcgatctcaataggatctttgacctggagaacctcggaaagaagatgtcagaagatctcccatatgaagtccgccgcgcgcaagaaatcaaccacctgttcgggccgaaggattccgaggattcctacgacatcatcttcgacctgcataataccactagcaacatgggatgtaccctgattctcgaggactcgcggaataacttcctgatccaaatgttccactacattaagacttcgctggccccgttgccgtgctacgtgtacttgattgagcacccctcactcaagtacgcgaccacgagatccatcgccaaatacccggtcggaatcgaagtcggaccgcagcctcagggagtccttcgagcggacatcctggaccagatgaggaagatgatcaagcacgcactggacttcatccatcatttcaatgaaggcaaggaatttccgccttgcgccattgaagtgtacaagatcatagagaaagtggattatccgcgcgatgagaacggggagattgcggcaatcatccacccaaatcttcaggaccaggactggaagccgctgcaccccggcgaccccatgtttctgactctggatggtaaaaccatccctctcgggggtgactgcactgtgtacccagtgttcgtcaacgaggctgcttactacgaaaagaaggaagcattcgccaaaaccaccaaactcactctgaacgccaaaagcatcagatgttgcctgcac

SEQ ID NO: 294024 - DNA, 939 bp, Artificial Sequence
  derived and/or modified sequence
atgacttcgtgtcatattgcggaagagcatattcagaaggtggctatctttggaggaactcacggcaacgagctgactggagtgtttctggtgaagcattggttggaaaacggtgcagaaattcaaagaactgggctggaagtgaagccattcattactaatcctagagcagtgaagaagtgtacccgttacattgattgtgatctcaaccgcatttttgacctcgaaaaccttggaaagaagatgtccgaggatctgccgtacgaagtcagacgggcccaggagattaatcatctgtttggccctaaagactcggaagattcgtacgatatcatttttgatcttcataacaccacctcgaacatggggtgtacccttattctggaggactcgagaaacaacttccttattcagatgttccattacattaagacctcactggcgcctttgccatgctacgtctatctcatcgaacatccaagcctgaaatatgcaaccactagatcgatagcaaaataccctgtgggtatagaagtgggacctcaaccacaaggagtgttgcgggccgatatcctggatcaaatgagaaagatgattaagcacgcactggatttcatacaccactttaatgagggaaaagaatttcccccttgtgcgatcgaagtgtacaaaatcatcgaaaaagtcgattaccctagggatgagaacggggaaattgccgcaataatccatccaaatctgcaagatcaggattggaaacccctgcacccaggcgatcccatgtttcttacccttgatggtaagacgattcctctgggaggagattgtaccgtgtaccccgtgttcgtgaatgaggcggcctactacgaaaagaaggaggcatttgcaaaaaccactaagctgaccctgaacgcaaagtccatccgttgctgtctccat

SEQ ID NO: 294025 - DNA, 939 bp, Artificial Sequence
  derived and/or modified sequence
atgactagctgccacatcgccgaagaacacattcagaaggtggccatcttcggaggtacgcacggcaacgaactcactggcgtgttccttgtgaagcactggttggaaaacggtgcggagatccagcggaccggcctcgaggtcaaaccgtttatcaccaacccacgcgccgtgaaaaagtgtactcgctacatcgactgcgacctgaatagaatctttgacctggaaaatcttggaaagaaaatgtcggaggacttgccgtacgaggtccgccgggcccaggaaatcaaccacttgttcggcccgaaggactccgaagattcgtacgacatcatattcgacctgcataataccacttcgaacatgggatgcactcttatccttgaggactcccgcaataactttctcatccaaatgttccactacatcaagaccagcctggccccgctgccatgctacgtgtatctgatcgagcatccgtccctcaagtacgccactacccggtcaatcgcaaagtacccggtgggaatcgaggtgggcccgcagccacagggagtgctgcgcgcagacatcctggaccagatgagaaaaatgattaaacatgcactcgactttatccaccatttcaacgaaggaaaggagttccccccatgcgccattgaggtgtataagatcatcgagaaggtggattaccctagagacgaaaatggcgaaatcgcagctatcatccacccgaatctgcaggatcaggattggaaacctctccaccctggtgatcctatgttcctgacgctcgacggaaagacgatcccccttggaggtgactgtaccgtgtacccggtgttcgtgaatgaagctgcctattatgagaagaaggaggccttcgcaaagaccacgaagctcactctgaatgcaaaatcaattcggtgctgcctgcat

SEQ ID NO: 294026 - DNA, 939 bp, Artificial Sequence
  derived and/or modified sequence
atgacctcctgtcacatagccgaggagcacatacagaaggttgctatcttcggtgggacgcatggtaatgagttaaccggagtgttcctggtgaaacactggctagagaatggagctgagatccaacgaacaggcctggaagttaagccttttatcaccaaccctagggccgtcaagaagtgtaccaggtatatcgactgtgatctgaacaggatttttgatctcgagaatctaggcaagaagatgtccgaagacctaccgtatgaagtcagaagagcccaagaaattaaccatctcttcgggcccaaagacagcgaagattcttacgatatcatttttgacctgcataacacaacttcaaacatgggatgcacactcatcctcgaggattctcggaataacttcttaatccagatgtttcactacataaagacctctttggcaccactcccctgctacgtttaccttattgaacacccctctctgaagtacgccaccacccgaagtatcgctaaataccccgtaggcatcgaggtgggcccacaacctcagggcgtactgagggctgacatcctggaccaaatgaggaagatgattaagcacgccctcgatttcattcatcacttcaatgaggggaaggagttccccccgtgcgcaatagaggtatacaagatcatcgagaaagtggattacccaagggacgagaatggcgaaattgccgctatcatccacccaaacctgcaagaccaagattggaagcccctacaccccggggaccccatgttcctcaccctagatgggaaaacaatcccgttgggcggtgactgtacagtttatcccgtatttgtgaatgaggccgcatattacgaaaagaaagaagcattcgctaagacaacgaagctgactctcaatgccaagtccattaggtgttgtctgcac

SEQ ID NO: 294027 - DNA, 939 bp, Artificial Sequence
  derived and/or modified sequence
atgacttcgtgccatattgctgaagagcatatccagaaagttgctatcttcggaggcactcatggtaacgaactgaccggtgtgttcctcgtcaagcactggctggaaaacggagccgagatacagcgcactggactggaagtgaagcctttcataactaacccaagggcggtgaaaaagtgtacccggtacatcgactgcgacctgaaccggattttcgatcttgagaatctgggcaagaagatgtctgaagatttgccatacgaggtcaggcgtgcccaggagatcaaccacttgttcggccctaaagacagcgaagattcctacgacattatctttgacctccacaataccacctcgaacatgggatgcaccctgattttggaagattcccgcaacaacttcctgatccaaatgttccactatatcaagacctccctcgccccgcttccgtgttacgtgtacctgatcgaacatccgtcactcaaatacgcgactacgaggtcgatcgctaagtacccagtgggtatcgaggtgggaccacaaccacagggagtgctgcgcgcggatatccttgatcagatgcgaaaaatgatcaagcacgcgctcgactttatccatcacttcaatgagggaaaagaattccctccgtgtgccatcgaggtgtacaagatcattgagaaggtcgactacccgcgggacgagaacggggaaattgcagcaatcatccatcctaatctgcaagatcaggactggaagcccctgcacccgggggatccgatgttcctgactctcgacggaaaaaccataccactcgggggcgattgcactgtgtacccggtctttgtcaacgaggccgcatattacgaaaagaaggaagcctttgctaagaccactaagttgacgctgaatgccaagtccattcgctgctgcctgcac

SEQ ID NO: 294028 - DNA, 939 bp, Artificial Sequence
  derived and/or modified sequence
atgacctcatgccacatagccgaggaacatattcagaaggtggcaattttcggtgggactcacggcaatgaactcacgggagtattcttagtgaaacactggctggagaatggcgccgaaatccaacggacgggattggaggttaagccattcataactaacccacgtgcggtgaagaagtgtacacgctatatcgactgtgaccttaaccggatattcgacctggaaaatctcggcaagaagatgagtgaggatctgccttacgaagtgcggcgggctcaggaaattaatcatctgtttggccccaaagacagcgaagattcctacgatattatattcgatctccacaacaccacaagtaacatgggatgtacactgattctagaggacagcagaaataatttcctgattcagatgttccattacatcaaaacatccttagctccgcttccctgctatgtctacttgatcgagcacccctccctcaaatatgcaacaacccgctcaattgccaagtacccagtaggaattgaggtgggtccccaaccccagggggtcctgcgggcagacattctggaccagatgcggaaaatgattaaacatgcactggatttcatccaccacttcaatgagggaaaagagtttcccccttgcgcgatcgaggtttacaagatcattgagaaagtggattacccccgggatgagaatggtgaaattgcggcgatcatccaccccaatctccaggatcaggattggaaacctctccaccccggtgacccaatgttcttaactctggacggaaagactatccccctaggaggcgattgcaccgtctatcccgtgtttgtcaacgaagcggcgtattatgagaagaaagaagcatttgccaagaccaccaaactgaccttgaatgcgaagagcatccgatgttgtttgcac

SEQ ID NO: 294029 - DNA, 939 bp, Artificial Sequence
  derived and/or modified sequence
atgaccagctgtcatattgcggaggaacatattcaaaaggtcgcaattttcggaggaacgcacggaaacgaacttactggtgtgttcctggtcaagcactggttggagaatggagcggagatacagaggacgggtctggaggtgaagccgttcattactaaccctcgagcagttaagaagtgcacgcgctacatcgattgcgatttgaatcggattttcgacctggagaatctgggtaaaaagatgtcagaagatctcccgtacgaagtgcgcagggcacaggagataaaccatctgtttggtcctaaggactcagaggacagctacgatatcatctttgatctgcataataccacctccaacatgggctgtactctcatcttggaggacagcagaaacaatttcctgattcaaatgtttcattacatcaagacctcgctggcgccgcttccatgttacgtgtaccttattgaacacccttcgctcaaatacgcaaccacccgctccatagcgaaataccctgtgggaatagaagtcggaccccaaccccagggagtgcttcgggcagatattctggatcagatgaggaagatgattaaacacgcgctcgactttattcaccatttcaatgaaggcaaagagtttccgccctgcgccattgaagtctacaagatcattgagaaggtggactacccacgcgatgaaaacggagagattgcagcaatcatccatcctaatctgcaagaccaagactggaagcctttgcatcccggtgatcctatgtttcttactttggacggaaagaccatccctctcggaggcgattgtacggtgtatcccgtttttgtgaacgaagcagcatactacgaaaagaaggaagcgtttgccaagactaccaagttgactcttaacgcaaaatcgataagatgttgtctgcat

SEQ ID NO: 294030 - DNA, 939 bp, Artificial Sequence
  derived and/or modified sequence
atgacctcctgccacatcgccgaagaacacattcagaaagtggcaatctttggcggtactcatgggaacgagcttaccggagtttttcttgtgaaacactggctcgaaaatggagcagaaatacaaagaacgggtctggaggtgaagccgttcataacgaatcctagagctgtcaagaagtgcactcggtacatagactgtgatctcaacaggatttttgatctggaaaaccttggaaagaagatgtccgaggacctgccgtacgaggtgcggcgggcccaggagattaatcatctttttggacccaaggacagcgaagattcctacgacatcatctttgatcttcataatactacctcaaacatggggtgcacccttattctggaagattcgcggaacaactttttgattcaaatgttccattacatcaaaactagccttgccccactgccctgttacgtctacttgattgaacatccatcgctgaagtacgccacgacccgctctattgctaaataccctgtcggaattgaggtgggaccccagccacaaggggtgttgagggctgatatacttgaccaaatgcgaaagatgatcaagcacgcactggatttcatacatcacttcaacgaaggaaaggagtttcctccctgtgcgatcgaggtgtataagattattgaaaaggtcgattacccaagagatgaaaacggtgaaattgccgctatcatccacccaaatctgcaagaccaggattggaaaccactgcatcctggcgatccgatgttcttgactcttgatggtaagactattccacttgggggcgactgtaccgtctaccctgtgtttgtcaatgaggctgcgtactatgagaaaaaagaagcgtttgcaaagaccaccaaattgactctgaacgccaagagcatccgctgctgtctgcat

SEQ ID NO: 294031 - DNA, 939 bp, Artificial Sequence
  derived and/or modified sequence
atgaccagctgtcacattgctgaggagcacatccagaaggtggcgatctttggggggacccacgggaatgaacttaccggtgtattcctggttaaacactggctcgagaacggagccgagattcagcggacaggactggaagtcaaacccttcatcacaaacccaagagcagttaagaaatgtactagatatattgattgcgacctcaataggatatttgacctcgaaaacctgggaaagaaaatgtctgaggacctgccctacgaggtgaggcgggcccaggagatcaaccacctcttcggcccaaaggactctgaggattcctacgatatcatctttgacctgcataacacgactagcaacatgggctgcacccttatcctggaggacagcaggaataactttctgatccagatgttccactacataaagacgagcttggccccactcccttgctacgtctatctgatcgagcacccctcattgaagtatgccactacacgcagcatagctaagtatcctgtggggattgaggtgggtccacagccccaaggagtgcttagagctgacatcctggaccagatgcggaagatgatcaagcacgccctcgacttcattcatcactttaacgaaggtaaagagtttcctccctgcgctattgaggtatacaagatcattgaaaaagtggattatccccgggatgagaatggcgagattgctgccatcatccaccccaatctccaggaccaggactggaagcctctgcatccgggagaccccatgtttttgaccctggatggcaaaacgataccgttgggaggggattgtacagtttaccccgtcttcgtgaatgaagctgcttactatgagaaaaaagaggccttcgctaaaactacgaagcttaccctcaatgccaagagcatccggtgttgccttcac

SEQ ID NO: 294032 - DNA, 939 bp, Artificial Sequence
  derived and/or modified sequence
atgaccagttgccacatcgccgaagagcatattcagaaggtggccattttcggaggcactcacggcaacgagttgacaggcgtgttcctggtgaagcattggttggaaaacggggcagaaatccagcgaactgggcttgaagtaaaacccttcatcacaaatcccagagccgtgaagaagtgtacccgctacattgactgcgacctcaaccggatttttgatttagaaaacctcggtaagaagatgtccgaggacctcccatacgaggtgcggcgagcccaggaaatcaaccatttgtttgggcccaaagacagcgaggatagctacgatatcatcttcgatttacataataccacaagcaacatgggctgcactctcattctggaagacagtaggaataatttcctgatccagatgtttcattacattaaaacgtccctcgcacccctcccgtgttatgtctatttaatcgagcatccgagcctgaaatacgcaaccacacgttccatagccaagtaccccgtgggaatagaggttgggccacagcctcagggcgttctgagggcggacatactcgaccaaatgagaaaaatgataaaacatgcattggatttcatccaccactttaacgagggcaaagaatttccaccttgcgctatcgaggtctacaaaataatcgagaaggtcgactatcccagggatgagaatggcgagattgctgctatcatccatcccaatcttcaggaccaggattggaagcctctccatcctggcgaccctatgttcctaacactggacggtaaaacgatcccccttgggggggattgtaccgtgtacccggtctttgtgaacgaagcggcctattatgagaaaaaggaggcctttgcaaaaaccaccaaacttactttgaatgccaagtccattcgttgctgtttgcat

SEQ ID NO: 294033 - DNA, 939 bp, Artificial Sequence
  derived and/or modified sequence
atgacaagctgccacatcgccgaagagcacatacagaaggtggctatattcgggggcactcacggcaacgagctgaccggggtgtttctcgtaaaacactggctggagaacggggccgagattcaaaggacagggctagaagttaagccctttatcaccaatccgagggccgtgaagaagtgcacccgctacattgattgcgatctgaaccggatatttgatctggaaaatctgggaaagaaaatgtcagaagacctaccttatgaagttcgaagagcccaggagattaaccatctcttcggccctaaggattctgaggactcgtatgacatcatcttcgatctgcataacaccacttcaaatatgggctgcaccctgattcttgaagactcccgcaacaatttcctgattcagatgtttcattatattaaaacgtctctggccccattgccctgttacgtctatttgattgagcatccatctctcaagtacgcgactacccgctccatcgcgaagtacccagtgggcatagaggtggggccccagccacagggcgtcctgcgggcagatatactcgaccagatgcgaaagatgatcaagcacgcacttgacttcatccaccactttaatgagggcaaagaattccccccatgcgctatcgaggtatacaagataatcgagaaggtggattatcctcgggacgagaatggcgaaatcgcagctatcatccatcccaatttacaggaccaggattggaagcccctgcaccctggagatcccatgttcctgactctggacgggaaaacgattcccctcgggggtgattgtaccgtatatcctgtgttcgtcaacgaagctgcctactacgagaaaaaggaggcgttcgccaaaaccacaaagctgaccctgaatgccaagagtatccgatgctgcctccac

SEQ ID NO: 294034 - DNA, 939 bp, Artificial Sequence
  derived and/or modified sequence
atgaccagttgtcacatcgctgaagagcacatccaaaaggttgctattttcggcggaacccacgggaacgagctcaccggagtcttcctggttaaacactggctcgaaaacggagctgagatccaaaggacgggtctcgaagtgaaaccttttatcaccaatcctcgcgccgttaagaagtgtactcggtacatcgattgtgatctaaaccgcattttcgacctggagaaccttgggaagaagatgtccgaagacctgccgtacgaagtgcggcgggcccaggagatcaaccatctgttcggacccaaagatagtgaggactcatatgatatcatcttcgatctgcacaataccacctccaatatgggctgcaccttgatactcgaggattcacgcaacaatttcctgatccagatgtttcactacattaagacttccctggcgccactgccttgctatgtctatcttattgaacacccaagcctcaaatatgcgactacgcgcagcatcgcgaaatatccggttggaatcgaagtggggcctcagccacaaggcgttcttagagcagatatcctggaccaaatgaggaaaatgattaaacatgctctggatttcatacaccacttcaatgaggggaaggaatttcccccttgtgcaattgaagtttacaagatcattgagaaggttgattatcctcgcgatgaaaatggagaaattgcagctatcattcatcccaatctgcaggaccaagactggaaaccactacaccctggggatccaatgttccttacccttgatgggaaaaccattccacttgggggagattgtaccgtttaccccgtgtttgtgaatgaggctgcctactatgagaaaaaggaggccttcgccaaaaccaccaagctcactctgaacgcaaagagcatacggtgctgtctccat

SEQ ID NO: 294035 - DNA, 939 bp, Artificial Sequence
  derived and/or modified sequence
atgacctcctgccatattgcggaggaacatattcaaaaggtcgcgatttttggagggacccacggaaacgaactcactggcgtctttcttgtcaaacactggttggagaacggagcagaaattcaacggactggtcttgaggtgaaaccgttcatcactaacccccgtgcggtgaagaagtgtacccggtatatcgattgcgacctgaatcggatttttgatctggagaatctcggaaaaaagatgagcgaggaccttccgtacgaagtgagacgcgcacaagaaatcaaccacttgtttggacctaaagattcggaagatagctacgacatcattttcgaccttcacaacacgacttccaatatgggctgcaccctcatacttgaagattcaagaaacaactttctgattcagatgttccactacattaagacttctctggcaccactgccttgttacgtgtacctgattgaacatccttcgcttaagtacgcaactactaggtcaattgcgaagtaccccgtgggcatcgaagtcggccctcagccacaaggcgtgctccgtgccgatatccttgaccagatgcggaaaatgatcaagcatgcacttgacttcatccatcactttaacgaagggaaggagttccctccatgtgctatagaggtgtacaagataatcgaaaaggtggattaccctcgagacgaaaacggagaaatcgcagcgattatccaccccaacctccaagaccaggattggaagccactccatccaggggatcctatgttcctcaccctggacggaaagaccattccactgggaggagattgtaccgtctacccggtgtttgtgaatgaggcggcctattacgagaagaaggaagcatttgcaaagactactaaattgactctcaatgcaaagtcgatccgatgttgtttgcat

SEQ ID NO: 294036 - DNA, 939 bp, Artificial Sequence
  derived and/or modified sequence
atgactagttgtcacattgctgaagagcacatccagaaggtggctatattcgggggaacgcacgggaacgagctgacgggcgtgttccttgttaaacattggctggagaatggtgccgagatccaacggaccggtctggaggtgaagccctttataacgaatccgcgcgcagtaaagaagtgcacccgatacatagactgcgacctgaatcgcattttcgatctggagaatctcggaaaaaagatgtccgaggatctcccttatgaggtgcggcgagctcaggagatcaatcacttatttggccccaaggactctgaggattcatatgatataatctttgaccttcacaatacaaccagcaacatgggctgtacgttgatactagaagacagcagaaacaattttctgatccagatgtttcactatatcaagaccagcttagcccctcttccatgctacgtgtatcttatagaacacccatccctcaaatacgctaccaccagatccatcgctaagtacccggtgggcatagaggtggggccccaacctcagggtgtgctgcgggccgatatcctggatcagatgagaaaaatgatcaagcatgccctagatttcattcaccattttaatgaaggaaaagaattcccgccgtgcgccatcgaggtctacaagattatcgaaaaggtagattaccctcgcgatgaaaatggcgagattgcagctatcattcaccccaatttgcaggaccaggattggaaaccccttcatcctggcgaccctatgtttctcacactggacggtaagacaatccctctaggaggagattgcaccgtctatcccgtttttgtgaatgaagccgcgtactacgagaaaaaagaagctttcgccaaaaccacgaagttaacactgaacgccaaatctatcagatgctgccttcat

SEQ ID NO: 294037 - DNA, 939 bp, Artificial Sequence
  derived and/or modified sequence
atgacctcttgtcacatagctgaggagcacattcagaaggtcgctatttttggcggcacccacggcaatgagctgactggcgtatttctggtcaagcattggcttgaaaacggcgctgagatccagcgcacaggtctggaagttaagccgtttatcacaaacccgagggctgttaaaaaatgtactaggtacatcgattgcgacctcaacagaattttcgacctcgaaaacttgggcaagaaaatgtccgaggatctgccgtatgaagtaaggagagcccaagagatcaaccacctcttcggacccaaggatagcgaggacagttatgacattatattcgatctgcacaacacgacctccaacatgggctgtactctgatcttggaggactctaggaacaattttttgattcagatgtttcactatatcaaaactagcttggcgcccctgccttgctatgtataccttattgagcatccctccctgaagtatgctactacgagatctatcgcaaaataccccgtgggcatcgaagttggcccgcagcctcagggcgttctgcgcgctgacattcttgatcaaatgagaaaaatgataaagcacgctctggattttatccaccacttcaacgaaggtaaggaattccccccttgcgccattgaggtttataaaattattgaaaaggttgactaccccagggatgagaacggcgaaatcgccgctatcattcatccaaacctgcaggatcaagactggaaaccactgcatcccggcgatccaatgtttctgaccctggatggcaagacgatcccacttggtggcgactgcactgtgtatccagttttcgtcaacgaagcggcttactacgagaagaaggaggcctttgcaaaaactaccaagctgactctcaacgctaagagcatcagatgctgtttgcac

SEQ ID NO: 294038 - DNA, 939 bp, Artificial Sequence
  derived and/or modified sequence
atgacatcgtgccacatcgctgaagagcacatccaaaaagtcgcgatctttgggggaacacacggcaacgaattaaccggggtctttcttgtcaaacactggctcgaaaatggagctgagattcagcggacgggtttagaggttaaaccgttcatcacaaacccgagagccgttaagaagtgtacaagatatatcgattgcgatttaaatagaatttttgatctggaaaatttgggcaaaaagatgtcagaagacctcccgtacgaagtccggcgcgcacaggaaataaatcatctgtttgggccaaaagattctgaggattcttacgatatcatatttgacctgcataacacaacgagtaatatgggatgcactttaattttagaagacagtcgaaataattttctgatccaaatgttccattacatcaaaacatctctcgccccgttaccctgttatgtgtatttaatcgaacatccgagcctgaagtacgcaacaacaagaagcattgccaaatacccagtaggaatcgaagtaggaccgcaaccgcaaggcgtcttaagggccgacattcttgatcagatgagaaaaatgattaaacatgccttagattttattcatcactttaatgaggggaaagaatttccgccgtgcgctattgaagtctataagattattgagaaggtcgactatcccagagacgaaaatggcgaaatagcagctattattcaccctaacctgcaagatcaggattggaaaccgctgcatccaggtgacccgatgtttctgacacttgatggcaagacaatacctcttggaggagattgtacggtgtatcctgtgtttgttaatgaagcagcctattatgaaaaaaaagaagctttcgcaaaaacaacaaagcttactcttaacgcaaaatcaattagatgctgtcttcat

SEQ ID NO: 294039 - DNA, 939 bp, Artificial Sequence
  derived and/or modified sequence
atgacttcgtgccacatcgccgaggagcacattcagaaagtcgccatctttgggggcactcacggcaatgaattgactggagtgtttctggtgaagcattggctcgaaaacggcgctgaaattcagcgcaccggactggaagtgaaaccgttcatcacgaatcctcgcgcggtgaagaagtgcacgcggtacatcgactgtgacctgaacagaattttcgacctcgaaaatcttggcaagaaaatgagcgaggacctgccttacgaggtgcggagagcgcaggaaatcaaccacttgttcggtccgaaggactctgaagattcttatgacatcatctttgatctgcataacaccacctcgaacatgggatgcactctgatcctcgaagatagcagaaacaactttctgatccagatgttccactacatcaaaacttcactcgcaccgctcccgtgttacgtgtatctcatcgaacatccttccctgaagtacgcgacgactagaagcattgccaagtacccggtcggaatcgaggtcggcccgcagccccaaggagtgctgagagcagacattctcgatcagatgcgcaagatgatcaaacacgccctggatttcatccaccatttcaacgaaggaaaggagttcccaccgtgtgctatcgaagtctacaagattatcgagaaagtggattacccccgggatgaaaatggggaaatcgctgccatcatccatccgaatctccaagaccaggattggaagccgctgcacccaggcgacccaatgttcctgaccctggacggcaagacgatcccactcgggggagattgcactgtctacccggtgttcgtcaatgaggccgcgtactacgaaaagaaagaagccttcgccaagaccactaagctgaccctgaatgcgaagtccatccggtgctgcctgcac

SEQ ID NO: 294040 - DNA, 939 bp, Artificial Sequence
  derived and/or modified sequence
atgaccagctgtcatatagccgaagaacatattcagaaggtcgcgatttttggaggcacccacggtaacgaacttactggtgtgttcttggtgaaacactggcttgagaacggtgcagaaatccaacggactggccttgaagtcaagccgtttatcaccaacccacgggccgtgaaaaagtgtacccggtacattgattgtgatctgaacaggattttcgatctcgaaaacctggggaagaaaatgagcgaggatctgccatacgaggtgagaagagcacaggagatcaaccatctctttggtccaaaggacagcgaggactcgtacgatatcatctttgatcttcataatactacttccaacatgggctgtaccctcatccttgaggatagcagaaataactttctgattcagatgtttcactacatcaagacctcccttgcacccctcccgtgttacgtgtaccttatcgagcacccatcactgaagtacgcgaccactcggtcaattgccaaatatcctgtgggaatcgaggtgggcccccagccccaaggtgtgcttcgcgcagacattcttgatcaaatgcggaagatgattaagcatgcgcttgactttatacatcacttcaatgaaggcaaagagtttcccccctgtgcgattgaagtgtacaagatcattgaaaaggtggactacccacgggacgagaatggagaaattgccgcaatcattcatccaaacctccaggatcaagattggaagccactccatcctggtgatccaatgttccttacgctggacggaaagaccatccctcttggaggagattgtaccgtctaccctgtctttgttaatgaagcagcatactacgaaaagaaggaagcatttgcaaagacgactaagctgactttgaatgccaagtccatccggtgctgtctgcat

SEQ ID NO: 294041 - DNA, 939 bp, Artificial Sequence
  derived and/or modified sequence
atgacttcttgtcatattgcagaagaacatatacaaaaagttgcaatttttggaggaacacatggaaatgaactaacaggagtttttcttgttaagcattggcttgaaaatggagcagaaatacaaagaacaggtttagaggtaaagccattcattacaaatccaagagctgttaaaaaatgtacacgatatattgattgtgatcttaatagaatttttgatttagaaaatctagggaagaaaatgtctgaagatttaccatatgaagtaagaagagcacaagaaattaatcatcttttcggtcctaaggatagtgaagattcttatgatataatttttgatttacataatacaactagtaatatgggatgtacattaattttagaagattcacgaaataattttttgattcaaatgtttcattatattaaaacatcacttgctccacttccttgttatgtttatcttattgagcatccatctcttaaatatgcaactactagatcaatagcaaaatatccagttggaatagaagttggaccacaaccacaaggagtattaagagctgatattcttgatcaaatgagaaaaatgataaaacatgcacttgattttattcatcattttaatgaaggaaaggaattcccaccatgtgctattgaagtttataagattattgaaaaagttgattacccaagagacgaaaatggagaaattgctgctattattcatcctaacttacaagaccaagattggaaaccattacatccaggagatccaatgtttttaactttagatggaaagacaattcctcttggtggtgattgtactgtttatccagtattcgttaacgaagcagcatactatgaaaaaaaggaagcattcgcaaaaactacaaagttaactcttaatgcaaaatcaattagatgttgtttacat

SEQ ID NO: 294042 - DNA, 939 bp, Artificial Sequence
  derived and/or modified sequence
atgacttcctgtcacattgcagaggaacatattcagaaagtcgctatttttggggggacccatggtaacgaactgactggcgtgttcttggtgaaacattggctcgaaaatggcgcggagattcagcgcacagggcttgaggttaagccattcataactaaccctcgcgcagtcaagaaatgtacaagatacatcgactgcgacttgaatcgtatctttgacctggagaatctcggaaagaagatgtctgaggatctcccttatgaggtccgccgagcccaggagatcaatcatctcttcggtccgaaggacagcgaagactcttacgacattatctttgacctgcacaacaccacatccaatatggggtgcacactgattttggaggacagtaggaataactttctgatacaaatgtttcactatatcaagacaagtctcgctccattgccctgttatgtctacctcattgagcacccctccctaaagtacgccaccacccgttcaatcgctaaataccctgttggaattgaagtgggcccacaacctcaaggagtgctgcgggcagatatactggatcagatgaggaaaatgatcaagcacgcgctggattttatccaccactttaacgagggcaaagaattccctccatgtgccattgaggtttataagattatagagaaagtggactacccccgagacgagaacggggaaattgcagcgatcattcaccctaacctgcaagatcaagactggaagcccttgcaccccggcgaccccatgtttttgaccctcgatgggaagactataccgctaggaggcgattgtaccgtctaccccgtctttgtgaacgaggccgcctactatgagaagaaagaagcattcgcgaaaaccacaaagctcaccctgaacgcgaagagtatacggtgttgtctgcac

SEQ ID NO: 294043 - DNA, 939 bp, Artificial Sequence
  derived and/or modified sequence
atgacttcctgccatatcgccgaggagcatatccagaaggtggctatattcgggggaactcacgggaacgaactgaccggagtgttccttgtaaaacactggctcgagaacggcgcagagatccagcgcaccggactggaagtcaagccctttatcaccaacccgcgcgctgtgaagaaatgtaccagatatatcgattgtgaccttaacaggatttttgacctggaaaatctgggaaagaagatgtctgaagatttgccgtacgaagtaagacgcgcgcaggaaatcaaccatttgtttggacccaaggactccgaagattcctacgacatcattttcgacctgcacaataccacgagcaacatgggatgcacgctgattctggaagattcgcgcaacaacttcctgattcagatgttccattacatcaagacttcacttgcgcctctcccttgctacgtctatttgatagaacacccgagcttgaaatacgccacgaccaggtcaatcgcaaaataccctgtgggaattgaggtgggaccccagcctcaaggcgtgctcagggcagacatcctggatcaaatgcggaagatgataaagcacgccctggacttcatccaccacttcaacgaaggaaaggagtttccgccgtgtgctattgaagtgtacaaaatcatcgagaaggtcgactaccctcgagacgagaacggtgaaattgctgcaatcatccatccaaatctccaagaccaagactggaagccactgcatccgggcgatccgatgtttcttactctcgatggtaagaccatcccgctcgggggagattgcaccgtttacccggtgttcgtgaatgaggctgcctactacgaaaagaaggaagccttcgccaagactaccaagctgacccttaatgccaagagcatcagatgctgcctgcat

SEQ ID NO: 294044 - DNA, 939 bp, Artificial Sequence
  derived and/or modified sequence
atgactagctgccacatagcggaagagcatatccagaaagttgccattttcggtgggacccacgggaacgagttgaccggagtgttccttgtcaagcactggctcgagaacggggcggagatccagcgcaccggactcgaagtgaagccattcatcactaacccgcgggccgtgaagaaatgcacgcgctacatcgactgcgacttgaatcgcatctttgacttggagaacctgggcaagaaaatgtcggaagatctcccatacgaggtccggcgcgcacaagagatcaatcacctgtttgggcctaaggactcggaagattcatacgatatcatcttcgacctgcataacaccactagcaatatgggctgtactctgattctcgaagattcacgaaataactttctgattcagatgttccactacatcaaaactagcctcgcgccgctcccttgctacgtgtacctcattgagcacccgtcgcttaagtacgcaaccacccgctccatcgcgaagtacccggtgggcatagaagtgggaccgcagccccagggcgtgctgagagcagatatcctggatcaaatgcggaagatgataaagcacgctctggactttatccatcatttcaatgagggaaaagaattccctccgtgtgccattgaagtgtacaagatcatagaaaaggtcgattatccgagagacgagaacggcgaaatcgcagctatcatccatccaaatctgcaagaccaggactggaagcccctgcacccaggcgacccgatgttcctgactctcgacggaaagaccatcccgctcggaggagattgtacggtctacccagtgttcgtgaacgaggccgcctactatgaaaagaaagaggcattcgctaaaactactaaactgaccctgaacgctaagtccatcagatgctgccttcat

SEQ ID NO: 294045 - DNA, 939 bp, Artificial Sequence
  derived and/or modified sequence
atgacgtcgtgccacatcgcggaagagcacattcagaaggtggcgatcttcggcgggactcacgggaacgagctcaccggagtattcctggtgaagcactggctcgaaaacggagccgagatccaaagaaccgggcttgaagtgaagccctttatcaccaacccccgcgccgtcaagaaatgtactcgatacatcgattgcgatctgaacaggatctttgatctcgaaaatctgggcaagaaaatgtctgaagatctgccttatgaggtccgcagggcgcaggaaatcaatcatctgttcggccctaaagacagcgaggactcctatgatatcatcttcgatctccataacactacctcgaatatgggatgcaccctcattctcgaggattcgcggaataacttcctcatccaaatgttccactacataaagacttcactggcaccactcccgtgttacgtgtacctgatcgaacacccgtcgctcaagtacgccaccacgcgcagtatcgccaagtacccggtgggtatcgaagtggggccgcagcctcagggagtcctccgggcagatatcttggaccagatgcgaaagatgatcaagcatgccctggacttcattcatcacttcaatgagggaaaagagttccctccgtgcgctatcgaagtgtacaagattatcgagaaggtggactacccacgcgacgagaacggggaaatcgccgcaatcattcatccgaacctccaggatcaagactggaagcctctccacccgggagatccgatgttcctgactttggacggaaagaccattcctctgggcggagattgcactgtctaccctgtttttgtgaacgaggcggcctactacgaaaagaaggaagcgtttgccaagaccaccaaattgaccctgaacgctaagagcatccggtgctgcctgcat

SEQ ID NO: 294046 - DNA, 939 bp, Artificial Sequence
  derived and/or modified sequence
atgacctcctgtcatatcgccgaagagcatatccaaaaggtcgcgatttttggcgggactcacggcaacgaactgactggagtgtttctcgtcaagcactggctggaaaacggagctgagatccagaggaccggactggaggtcaagccatttatcaccaaccctcgcgccgtaaagaagtgcaccagatatatcgactgcgatttgaaccggatattcgaccttgagaatctcggaaagaagatgagcgaagatctgccgtacgaggtgcggcgcgcccaggagatcaaccacctgttcggcccaaaggactccgaagattcctacgacatcatcttcgacctgcataacaccactagtaatatgggatgcactctcatcctggaagattcacgcaacaatttcttgatccagatgttccactacattaagacctccctcgccccactgccgtgctacgtgtaccttatcgaacacccctcgttgaagtacgcaaccacccgctcgatagccaaatacccagtgggaatcgaagtgggaccgcagccgcaaggcgtgctgcgcgcagacatcctggatcagatgcgcaaaatgatcaaacatgcgctggacttcatccatcacttcaacgaaggtaaggagttccctccttgcgccatcgaagtgtacaaaatcatcgagaaggtggactacccgcgcgacgagaatggcgaaattgctgccatcatccatccaaatctccaggaccaagactggaaacctctgcacccaggtgacccaatgtttctcactttggacgggaaaaccatcccactgggcggagattgcaccgtctatcccgtgtttgtgaacgaagcagcgtactacgagaagaaggaagcctttgcaaaaactacgaaactgactctgaacgcgaagtctattcgctgttgcctgcac

SEQ ID NO: 294047 - DNA, 939 bp, Artificial Sequence
  derived and/or modified sequence
atgacttcgtgccatatcgccgaggaacatatacaaaaggtcgcaatcttcggaggcactcatggaaacgaacttactggtgtattccttgttaagcattggcttgaaaatggggcagaaatccagaggactgggctcgaagtcaagcctttcattaccaatccacgggcggtgaagaaatgtactcggtacatcgactgcgatctgaatcgcatctttgatcttgaaaatctgggaaagaaaatgagcgaagatctgccttacgaagtgagacgagcacaagaaatcaaccatctcttcggacccaaggactccgaggattcatacgatatcattttcgatctccataataccacttccaacatggggtgtacccttatcctcgaagattcaagaaacaatttccttatacaaatgttccactacattaagacgtccttggcccctctgccatgttacgtgtaccttattgaacacccttccctcaaatacgcaaccacccgctcgattgcaaagtacccagtggggattgaggtcgggcctcaaccacagggagtgcttcgtgctgacatactcgaccaaatgagaaaaatgatcaagcatgccctggatttcattcaccactttaatgaaggcaaggaatttccaccgtgcgccattgaagtgtacaagattatcgaaaaggtggactatcctcgggacgagaacggagaaattgcggcaatcattcatcccaaccttcaggaccaagattggaagcctcttcatccaggtgatccaatgttcctcactctggatggaaagaccataccgctgggaggcgattgcactgtgtacccagtttttgtgaacgaggcggcctattacgaaaagaaggaggcatttgcaaagactactaaattgacgcttaacgcgaagtccattaggtgttgcctgcat

SEQ ID NO: 294048 - DNA, 939 bp, Artificial Sequence
  derived and/or modified sequence
atgacctcatgccacatagccgaagaacatattcaaaaggtggcgatttttggaggtacccacggaaacgaactgaccggagttttcctcgtgaagcattggctggagaacggtgcggaaatccaaaggaccggccttgaggtgaagccctttatcacgaaccctagggcagtgaagaagtgtacccgttacatcgactgcgaccttaaccgaatcttcgacctcgagaaccttggtaaaaagatgagtgaggacctcccatatgaggtcaggagagcacaggaaatcaaccatctgtttggtccgaaggatagcgaggatagctacgatatcatattcgatcttcataataccaccagcaacatgggttgtactcttattctggaggatagccgtaacaactttttgattcaaatgttccattacatcaaaacttcacttgcaccactgccttgttacgtgtacctgatcgaacatccatcccttaagtacgcaaccacccggtccatcgcaaaatacccagtgggtattgaagtgggtccacagcctcaaggggtgcttcgggcagatatcctggatcagatgaggaaaatgataaaacatgcactggacttcattcaccacttcaacgaggggaaggaatttcctccttgtgctattgaagtctacaagataatagaaaaagtcgactaccctagagacgaaaacggtgagattgccgcgattatacatccaaacctgcaagaccaagactggaagccacttcaccctggagatcccatgtttctcacccttgacggaaagaccatacctctcggaggagattgtactgtgtaccccgtctttgtgaacgaagcagcttactacgagaagaaagaggcatttgcaaagactactaagctgacgttgaacgcaaagtcgatccgctgttgcctgcat

SEQ ID NO: 294049 - DNA, 939 bp, Artificial Sequence
  derived and/or modified sequence
atgacatcctgccatatcgccgaggagcatatccagaaagttgccatctttggaggtacacacggaaacgaattgactggcgtttttctggtcaaacactggctcgaaaatggagctgagattcaaaggacaggtctggaagtgaaaccgttcatcaccaatccgcgtgccgtaaagaagtgtactcggtatattgactgtgatctcaaccgtatattcgatttagaaaacttggggaagaagatgtctgaggatcttccatatgaagttcgtcgtgcacaagagattaatcatctatttgggccaaaagattcagaagacagttatgacattatatttgatctacataacactactagcaatatgggctgtacattaattcttgaagattcgcgaaacaatttcctgatccagatgttccattacatcaagacctcgcttgccccactcccttgctatgtgtatcttatcgagcatccatcacttaaatatgcaacaacaagatctattgcaaaatatccagtcggaattgaggtgggaccccagccacaaggcgtattacgggcagacattttagaccaaatgagaaaaatgattaaacatgccttggattttattcaccattttaacgaaggtaaagaattcccaccatgcgcgatcgaagtttacaaaataatagagaaagttgactacccacgcgatgaaaatggagaaattgcagctatcattcatccaaatttgcaggatcaagattggaaaccgttgcatccaggtgatcctatgttcttgacgcttgatggaaagaccatcccgttaggaggagattgtacggtttacccggtttttgttaatgaagcagcttattacgagaagaaggaagcgttcgcaaaaacgacaaaacttactcttaatgctaaatccatccgctgctgtcttcat

SEQ ID NO: 294050 - DNA, 939 bp, Artificial Sequence
  derived and/or modified sequence
atgacttcttgtcacatcgccgaagagcatattcagaaggtggccattttcggagggacccacgggaacgaactgacaggcgtcttcctcgtgaagcactggttagaaaatggtgcagaaatccaacgtaccggcctggaagtgaagcccttcatcacaaaccctcgtgctgtcaaaaaatgtactcggtatatcgactgcgacctcaaccggatatttgatctggaaaacctgggaaagaagatgagcgaagatctgccctatgaggtgcgcagggctcaggaaatcaatcacctgttcggaccaaaggatagtgaagatagttacgacataatattcgacctacacaatacaacatcgaacatgggttgtactttaatcctggaggattctaggaataacttcttgatccagatgttccactacataaaaacctctctggcaccgctgccatgctacgtttacttgatagaacatccttcgttgaagtatgccaccacacgatctattgccaaatatccagtgggcatcgaggtcggcccacagccccagggcgtcctgcgcgcagacatacttgaccagatgcggaagatgattaagcatgcactcgactttatccaccacttcaacgaggggaaggaattcccgccctgcgctattgaggtctacaaaattattgagaaagtggactacccgcgggatgaaaatggcgagattgcagcgatcatacacccaaacctccaggatcaggactggaagcccctgcaccccggcgaccccatgttcctgacgctggacggcaaaactatccctctggggggtgactgcacagtgtatcccgtttttgttaacgaggcagcttattacgagaagaaggaggctttcgcgaagaccacgaagcttacactgaatgctaaaagtattcgatgctgtctgcat

SEQ ID NO: 294051 - DNA, 939 bp, Artificial Sequence
  derived and/or modified sequence
atgacctcatgtcatatcgccgaggaacacatccagaaagtggcaatcttcggagggacgcacggaaacgagctgactggtgtgtttctggtcaagcactggttggaaaacggagctgaaatccagcgaactggactggaggtgaagcctttcatcaccaacccgcgcgcggtgaaaaagtgcacccgctatattgattgtgatttgaatcgcatttttgacctggaaaacctgggcaaaaagatgtccgaggatctgccttacgaagtccgccgggcgcaggaaatcaaccatctgttcggcccaaaggacagcgaggactcgtacgacattatcttcgatctccacaataccacctccaatatgggatgcactctgattctggaagattcacggaacaatttcctgatccaaatgttccattacatcaagacctcgttggctccgctgccttgttacgtctacctgatcgaacacccatcgttgaagtacgcgaccactcggagtatcgcaaagtaccccgtgggcattgaagtgggaccacaaccacagggggtgctgagagctgatatcctggaccagatgcgcaagatgatcaagcatgcactggactttatccatcatttcaatgagggtaaggagttccctccgtgtgctattgaagtttacaagatcatcgaaaaagtcgactacccgcgcgacgagaacggggagatcgccgcgatcattcacccgaaccttcaggaccaagattggaagccattgcatcctggagatccgatgtttttgaccttggacggaaagactatcccgctgggcggcgactgcaccgtgtacccagtgtttgtcaacgaagccgcatactacgaaaagaaagaagccttcgcaaagactactaagctcaccctgaacgctaagtcgatcaggtgttgcctgcat

SEQ ID NO: 294052 - DNA, 939 bp, Artificial Sequence
  derived and/or modified sequence
atgacctcctgtcatattgcagaagagcatattcaaaaggtggcaattttcggagggactcatggcaacgagcttaccggagtgttccttgtcaagcattggcttgaaaacggtgcagaaattcagagaactggcctggaagtgaagccattcatcactaacccccgtgcagtgaagaaatgcacgcgctacatagactgtgatctgaaccggatatttgaccttgaaaatctgggtaaaaagatgtccgaggacctgccttacgaagtgaggagggcccaagagataaaccacctttttggccccaaggactcggaggattcgtacgacatcatttttgatctgcacaacactactagcaacatgggatgcactctcatcctcgaagattcgcggaacaactttcttattcaaatgtttcactacataaagaccagcctggcacccctcccgtgctacgtgtacctgattgaacatccttcgctgaagtacgcgactactcggtccattgcgaaataccctgtgggaatcgaagtgggtcctcagccacagggagtcctcagggcagacattcttgatcaaatgaggaaaatgatcaaacatgcgctggactttattcatcactttaacgaaggaaaagagttccccccatgcgcgattgaagtctacaaaatcattgagaaagtggactacccacgggatgagaatggagaaatcgcagcaattatccacccaaaccttcaggaccaagactggaagcctctccacccaggcgaccccatgttccttactctggatgggaaaactatcccacttggtggtgattgtactgtctatccagtctttgttaacgaagccgcctactacgaaaagaaggaggcattcgcaaagactaccaagctcaccctgaatgctaagtcgattagatgttgtttgcat

SEQ ID NO: 294053 - DNA, 939 bp, Artificial Sequence
  derived and/or modified sequence
atgaccagctgtcatatcgctgaagaacatatacaaaaagtagctatcttcggtggcacccacgggaacgagctgactggagtctttctggtgaagcattggctcgaaaacggagcagaaatccagagaactggtctggaagtgaaaccgttcattaccaaccctcgggccgtgaagaagtgtactcgctacattgactgtgatctgaatcgcattttcgacctggaaaatctgggaaagaaaatgagcgaagatctcccttacgaggtgcggagggcccaagagattaatcatctgtttggtcctaaggattcggaggactcgtacgacatcatatttgacctccataacacgacttcaaatatgggttgtaccttgattctggaggattcccggaacaactttctgattcaaatgttccactacattaagacgtccttggcgccacttccctgttacgtctacttgatcgaacacccttctctgaagtacgcgactacccgatcgatcgcaaaatacccagtgggaatcgaagtgggtccccagcctcaaggtgtgcttagagcagatattctcgaccagatgcgaaagatgatcaagcatgcgttggacttcattcatcatttcaacgaaggaaaggaatttcctccttgtgccatagaagtctacaaaatcattgaaaaggtcgattatcctcgagacgaaaacggcgagatcgcggctatcatccatcccaatcttcaggaccaagattggaagcccctgcacccaggagatccaatgtttctgacccttgatggaaagaccatcccattgggaggggattgcaccgtctatccagtgtttgtcaacgaagccgcgtactacgagaagaaggaagcatttgcgaaaaccactaagctgacgctgaacgcaaagtccattcgctgttgccttcat

SEQ ID NO: 294054 - DNA, 939 bp, Artificial Sequence
  derived and/or modified sequence
atgacctcctgtcatatcgccgaggagcatatacaaaaggttgccatttttggaggaacgcacggtaacgagctgacaggagtattcctggtgaagcattggcttgaaaatggggcagaaatacagaggactggactggaggtcaaaccgtttatcaccaacccgcgggccgttaagaaatgtaccagatatattgactgtgacctgaatcggatcttcgaccttgaaaatctggggaagaaaatgagcgaggacctgccatacgaagtgagacgcgcccaggaaattaaccacctgtttgggcccaaggattctgaggactcctatgacatcattttcgatttgcacaacaccacctccaatatggggtgcacccttatcctcgaggacagtcgaaacaatttcctcatccaaatgttccactatatcaagaccagcctggcgcccctgccttgttatgtctacctcatagagcacccaagtctcaagtacgccacaacgcgctccatcgccaagtaccctgtcggaatcgaagtgggtccccagccccaaggtgtccttcgcgctgacattctggaccagatgcgaaaaatgatcaaacacgccctggattttatccaccattttaatgagggtaaagaattcccaccctgcgccattgaagtctacaaaattatcgagaaggtcgattatccgagagatgagaatggagagattgccgctattatccatcccaatcttcaggatcaggactggaaaccgctgcaccccggcgaccctatgttcctcaccctcgatgggaagacgataccccttggcggagattgcacagtgtaccctgttttcgtgaacgaagctgcatattacgagaagaaagaggcattcgctaagacaaccaaactgactctcaacgcaaagtcaattagatgctgccttcat

SEQ ID NO: 294055 - DNA, 939 bp, Artificial Sequence
  derived and/or modified sequence
atgacatcatgtcacattgcggaagaacatatccagaaagtggccatcttcggcgggacacacggaaacgaactgaccggcgtgttcctcgtgaagcactggctggagaacggagctgagattcagagaacaggtctggaggtcaagccctttataacgaaccccagagcagtaaagaagtgtactcgatatatagattgtgacttgaatagaatttttgatctggagaacttagggaaaaaaatgagcgaagatctcccctacgaagtgagacgagcccaagaaatcaatcatctgtttggaccgaaagattccgaggatagttacgatatcatcttcgacttacacaatactacttctaatatgggctgcacactgatcctggaggattctagaaataacttcttgattcaaatgtttcactacattaagacatccctcgcccctctcccttgttacgtctacctgattgagcatccgtcattgaagtacgctactacgagaagtatcgctaaatatcccgtggggattgaagtggggccccagccgcaaggcgtcctgcgggcagatatactggatcagatgagaaagatgattaagcacgctcttgatttcatccaccacttcaacgaaggcaaagaattccccccttgtgccattgaagtgtacaagataatcgagaaggtggactatcctcgagacgaaaacggggaaatcgcagctataatccaccctaatctacaggatcaggactggaaacctctccatcctggagacccaatgttcctgacactggacgggaagactatacctcttggcggcgattgcacagtctaccccgttttcgtgaatgaagcagcgtattacgaaaaaaaagaagccttcgcaaaaacgactaagctgaccctgaacgctaagtctatcagatgctgtctgcat

SEQ ID NO: 294056 - DNA, 939 bp, Artificial Sequence
  derived and/or modified sequence
atgacttcctgccacatcgctgaagaacacattcaaaaagtggccatctttggagggacacatgggaatgaactgaccggagttttcctcgttaagcattggttggagaacggcgcggagatccagaggaccgggctcgaggtcaagccgtttatcacaaatcccagggccgtgaagaagtgtacgcgctacattgactgcgacttgaatcggatctttgacttggaaaatttgggcaaaaagatgtcagaggacttgccctatgaagttcgaagagcccaggaaattaatcatctctttgggccgaaagactccgaggattcatacgacataatattcgatctgcacaacaccacaagtaacatgggctgtaccctaatcctggaggattctagaaataacttccttatacagatgtttcattatatcaagacaagcctggcaccacttccttgctacgtgtatttaatcgaacatccttccctcaagtatgcgaccacacgttctatagctaagtacccggtcgggatcgaagtgggtccacagccacagggagtgctgagagcagatatcttggaccagatgcgaaagatgatcaaacatgcccttgacttcattcatcacttcaacgaggggaaggagttccccccatgcgctattgaagtgtacaagattattgagaaagtggattacccgagagatgagaatggcgagattgcagctattatccatcctaatctgcaagaccaggattggaagccactccaccctggcgaccctatgtttctgactcttgatgggaaaaccatacctctcggcggggattgcacagtctatcccgtctttgtgaacgaagccgcatactatgaaaagaaggaggcctttgcaaaaactaccaagctcaccttgaacgccaagtcgattaggtgttgtttgcac

SEQ ID NO: 294057 - DNA, 939 bp, Artificial Sequence
  derived and/or modified sequence
atgacaagttgtcacattgccgaagagcatattcagaaagtggcgatttttgggggcacgcatgggaacgaactgacgggagtttttttggtcaagcattggttggaaaacggtgcagaaattcagaggactggattggaagtgaaaccattcattaccaacccacgagcggtgaagaaatgtactcggtacatcgattgcgatctgaataggatttttgacctggagaatctcggcaagaagatgagcgaagacctgccatatgaagtgcgacgagcacaggaaataaatcatttgtttggtcccaaggattccgaggactcttacgacattatattcgacctgcacaataccacctcaaacatgggctgcaccctgatactcgaggattctcgaaataacttcttgatccagatgtttcactatatcaagacctctttggctccactaccatgttatgtgtacctgattgagcacccatccctgaaatatgccactacacgttctattgccaagtatcccgtgggcatagaagtgggaccacagccacaaggggtgttacgagctgacatactggatcaaatgcggaaaatgattaagcatgccctggacttcattcaccattttaatgagggcaaggagtttcctccttgtgctattgaagtatacaagattatcgaaaaggtcgattatcccagagatgagaacggcgaaattgctgcaataatccaccctaacctgcaggatcaggattggaagcccctgcacccgggggatcctatgttccttaccctcgatgggaaaacgatcccccttggaggagactgcaccgtttatcctgtatttgtgaacgaggctgcatattatgaaaagaaggaagcctttgcaaagactacaaaactcaccttgaacgccaagtccatccgctgctgtctccac

SEQ ID NO: 294058 - DNA, 939 bp, Artificial Sequence
  derived and/or modified sequence
atgacttcctgtcacattgccgaggagcacatacaaaaggtcgctatcttcggaggaacccatggtaacgagctgacgggggtgtttctcgtgaaacactggctcgaaaacggagcggagattcaacggaccggcctggaagtgaagccattcattactaacccccgggccgtcaagaagtgtactaggtacatcgactgcgacctcaatcgcattttcgacctcgagaacctgggaaagaaaatgagcgaagatctgccgtacgaggtgcgcagggcacaggaaatcaaccatctgtttggaccaaaggactccgaggactcgtacgacatcatcttcgaccttcataataccacctctaatatgggctgtactctgatcctcgaagattcacgcaacaacttccttatccagatgttccactatatcaagacgtcactcgcacccctgccttgctacgtgtacctgatcgagcaccctagcctcaagtacgcgactactcggtccatcgctaaatacccggtgggaatcgaagtgggacctcagccacagggagtgttgcgggcggacatcctggatcagatgcgcaagatgatcaagcacgcgctggactttatccaccactttaacgaaggaaaagagttccccccttgtgccatcgaggtgtacaaaatcattgaaaaggtagattaccccagagacgagaatggcgagatcgcagcaatcatccatccaaatctgcaagaccaggactggaaacccctgcacccgggtgatcccatgttcctgactctggacggcaagactattccgttgggaggcgactgcaccgtgtacccggtgttcgtgaacgaggctgcttactacgagaagaaggaggccttcgccaagactactaaactgactctcaacgccaaatcaatcagatgttgcctgcat

SEQ ID NO: 294059 - DNA, 939 bp, Artificial Sequence
  derived and/or modified sequence
atgacctcctgccacattgctgaggagcatatccagaaggtggccatctttggcgggacacacggtaacgagctgaccggcgtgtttctcgtcaagcattggcttgagaacggcgcagaaatccagagaacaggtctggaagtcaaaccttttatcacaaatccccgagctgttaaaaaatgcaccagatatatcgactgcgatctcaatcggatttttgacctggagaatctcggcaagaaaatgagcgaggaccttccatacgaagtccgccgagcccaagagattaaccatctctttgggccaaaagacagcgaagactcctacgatatcatttttgatctccataacaccacctcaaacatgggctgtactcttatccttgaggattccaggaataactttctgatccaaatgttccattacatcaagacctcactcgcaccacttccttgttacgtttacctcatagaacacccttctctcaagtacgcaacaacaagatctatcgcaaagtaccctgttgggatcgaggtgggacctcagcctcaaggcgtcctgagggctgatatcctcgatcaaatgagaaagatgattaagcacgctctggactttatacatcatttcaacgaagggaaagagtttccgccctgcgctattgaagtgtacaagatcatcgaaaaagtggattacccgcgggatgaaaacggggaaatcgctgccatcatacacccaaacttgcaagaccaagactggaaaccgctgcatccaggtgacccaatgttcctcactttggacggaaaaacgatccccctgggcggcgattgcaccgtttatccagtgtttgttaacgaggccgcctactacgaaaaaaaggaggcattcgctaaaaccacaaagctgacactcaacgctaagtcaatccggtgttgcctgcac

SEQ ID NO: 294060 - DNA, 939 bp, Artificial Sequence
  derived and/or modified sequence
atgacgagctgtcacatcgcggaggaacacattcaaaaggtcgcaattttcggcggcacccacggaaacgaactgactggtgtgttccttgtcaagcattggctcgagaatggagcggagatccagagaactggtcttgaagttaaaccgtttatcactaaccctcgggcagtgaagaaatgcaccaggtatattgattgtgacctgaatcgcatcttcgaccttgagaatcttggaaagaagatgtctgaagatctcccctacgaagtgagacgcgcccaggagattaaccacctctttggacccaaggactcggaggactcgtacgacattatctttgatctgcataacactacctcaaatatggggtgtactcttatcctggaagattcccggaataactttcttatccagatgtttcattacataaagacctccctggccccacttccttgttacgtgtatttgattgaacatcctagccttaagtacgctaccaccagatcaatcgccaagtaccccgttggaattgaggttggtcctcaaccgcaaggagttttgagggcggacattcttgatcaaatgcggaagatgatcaagcatgcactcgatttcattcaccatttcaatgaaggaaaagaattccccccttgtgctatcgaagtgtacaaaatcatcgaaaaagtggactacccgcgggatgagaacggtgaaatcgctgcgattatacatccaaaccttcaagaccaagattggaagccccttcacccaggtgatcccatgttcctgactctggacggaaagacgattcctctgggaggggactgtactgtgtaccctgtgttcgtcaatgaagcagcatattacgagaaaaaggaggcttttgcaaagacgaccaagctgactcttaacgccaagtccattagatgttgccttcac

SEQ ID NO: 294061 - DNA, 939 bp, Artificial Sequence
  derived and/or modified sequence
atgaccagctgccatatcgcagaagaacatatccagaaagtcgcaatctttggaggaacccatggcaacgaacttaccggcgtgtttctggtgaagcactggctggaaaacggagcagagattcagcgtacgggactggaggtcaagcctttcataacgaaccctcgcgccgtgaagaagtgtactcgctatatcgattgtgatcttaaccgcatttttgatctggaaaatctgggaaagaaaatgtcagaagatcttccctacgaagtgagaagagcgcaagagatcaaccatcttttcggcccaaaggattccgaggattcatacgatatcatattcgacctgcacaataccacttctaatatgggatgtaccctcatcctggaggacagccgaaacaactttctgatccagatgtttcactacatcaagacctcacttgcaccgctcccctgttacgtctacctgatcgaacatccatcacttaagtatgccaccacgaggtccatcgcaaagtacccggtgggaattgaagtcgggcctcaacctcagggagtgcttagggcagatattctggatcaaatgagaaagatgattaaacacgccctcgactttatacatcatttcaatgaaggcaaagaatttcccccttgcgccatcgaggtgtacaaaatcatcgaaaaagtggactacccaagagacgaaaatggagagattgcagcgattatccatccaaacctgcaggatcaagattggaaacctcttcacccaggagatccaatgttcctcacgctggatggtaagactattccacttggaggtgattgtactgtgtatccagtctttgtcaatgaggcggcatactacgaaaagaaggaggcatttgccaagaccactaagttgactcttaacgcaaagtccatacgctgctgtctccac

SEQ ID NO: 294062 - DNA, 939 bp, Artificial Sequence
  derived and/or modified sequence
atgacctcctgtcacatcgctgaggaacacatccagaaggtggcgatatttggcggtactcacggcaatgaactgaccggagtgtttctggtaaaacactggctcgagaatggcgccgagatccagagaaccggacttgaagtgaagccgttcatcactaacccgcgcgccgtcaagaagtgcactcgctacatagactgcgatctgaatcgcatctttgacttggaaaacctgggaaagaaaatgtcagaggatctcccctatgaggtgcgacgggcacaagagatcaaccatctgttcggtccgaaagactcggaagattcgtacgatatcatcttcgacctgcacaacaccaccagcaacatgggctgcacccttattctcgaggattccagaaataactttctgatccaaatgttccattacatcaagacttctctggctccgctgccctgctacgtctacctgatagaacatccaagtctcaagtacgctactacccgcagcattgcgaaatacccagtgggaattgaagtgggaccacaaccacagggagtgcttagggcagatatcctcgaccagatgcggaaaatgattaagcacgcgcttgacttcatccatcatttcaatgaagggaaggagttccctccgtgcgccatcgaggtgtataagatcatcgaaaaagtcgattacccgcgggatgagaacggtgaaatcgccgccattattcacccgaatctccaggatcaggactggaaaccactccacccgggggatccgatgttcctcactctggacggaaagactatcccattgggcggagactgcacggtgtaccctgtatttgttaacgaagcagcatactacgaaaagaaggaagcgttcgctaaaacgaccaagctgacgctgaacgcaaagtcaatccggtgttgtttgcac

SEQ ID NO: 294063 - DNA, 939 bp, Artificial Sequence
  derived and/or modified sequence
atgacgagctgccacatagcagaggagcacatccagaaagtcgccatctttggcggtacccatggtaacgagctgaccggtgttttcctggtcaagcactggctcgagaacggcgctgagattcaaagaaccggtctggaggtcaagccttttatcactaatccaagagcagtgaaaaagtgcacaagatacatagactgcgatctgaatcgcatctttgacctggagaacctagggaagaaaatgtccgaagatttgccatatgaggttcgccgcgcccaggagatcaatcatttgttcggtccgaaagattccgaagacagctacgacatcattttcgatctgcataacacgacgagcaacatggggtgtactctgatcctagaggactccaggaacaatttcctgatccagatgttccattacatcaagaccagcctggcgccactgccttgttatgtgtatctgattgagcacccgagtctgaaatatgccacgactcggagtatcgccaagtacccggttggtattgaggttggcccgcaaccgcagggtgtgctgcgtgcggatatcctggaccagatgcgaaaaatgatcaagcatgctcttgatttcattcatcattttaatgaaggtaaagagtttccaccttgtgccatcgaagtctacaagatcatagagaaagtggactatcctcgtgacgaaaatggtgaaattgcggcaattatccatcctaacttacaggatcaggattggaaacctctccatccgggtgatccaatgttcctgaccctggatgggaagacaattccgctgggcggggactgtaccgtctatccggttttcgtgaatgaggcggcctattacgaaaaaaaagaggccttcgcgaagacgactaagctcaccctgaatgcaaagagcattcgctgttgcctacat

SEQ ID NO: 294064 - DNA, 939 bp, Artificial Sequence
  derived and/or modified sequence
atgactagctgtcacatcgcagaagaacatatccagaaagtcgcaattttcggcggaacccacggcaacgagctcaccggcgtttttctcgtgaaacattggctggaaaatggggctgagatccaaaggactggactggaagtgaaaccatttatcacaaatccccgagcagtcaaaaaatgcaccagatatattgactgtgacctaaatcgaattttcgatctggagaatcttggcaaaaaaatgtctgaagatctgccctacgaagtccgtagggctcaggagatcaaccatttgttcggtccaaaggactcggaggactcatatgacattatcttcgatctacataatactacctccaatatggggtgtacgttgatcttagaagactccaggaacaactttttgatccagatgttccattacattaaaacttcacttgccccgctgccgtgctacgtgtatctcattgaacacccttctctgaagtatgcaacaacccgcagcatcgccaaatatcccgtgggaatcgaggtgggcccccagcctcagggggttctgagggctgatatcctagaccagatgcggaagatgattaagcatgcactcgatttcatacatcacttcaatgaagggaaggaattcccaccgtgcgcaattgaagtgtacaagattatcgagaaagtggattatccaagggacgaaaatggcgaaatcgcagctatcatccatcccaacctgcaggaccaggattggaagccactccaccccggggacccaatgtttctcacgcttgatggtaaaactatcccattgggcggcgattgtaccgtgtatccagtgtttgtgaatgaagctgcctattatgagaagaaagaggccttcgcgaagaccacgaagctgactctgaatgccaaaagcattcgctgctgcctgcac

SEQ ID NO: 294065 - DNA, 939 bp, Artificial Sequence
  derived and/or modified sequence
atgacttcttgccacatagccgaggaacatatccaaaaagtcgcaatattcggaggaacccacggtaacgaactgactggtgtgtttctagtgaaacattggctcgaaaatggagcagaaatccagagaactggactagaagtgaagcccttcattactaatccgcgggctgtcaagaagtgcactcgttatatcgactgtgaccttaaccgtatcttcgacctggaaaatctgggcaagaaaatgtccgaggatctgccatatgaggtaagacgagcgcaagagatcaatcatctgtttggacctaaggactccgaggattcatatgacataatatttgatttgcacaatacaactagcaatatgggctgtaccttgatcctggaagattctcgaaataactttctcatacagatgtttcattacatcaaaacctctctggctcccctgccctgttacgtctatcttattgagcacccctccctgaagtacgcaaccacccgcagtatcgctaagtacccagtcggaatcgaagtggggccccagccccaaggggttctccgcgccgacatcctggaccaaatgcgcaagatgataaaacatgcccttgattttatccatcacttcaacgagggcaaggaattcccaccatgtgctattgaggtgtacaagattattgagaaggttgattatccgagagacgagaatggagagattgctgcaatcatccatccgaatctgcaggaccaggactggaagccactgcatcccggagacccaatgtttctcactctggatgggaagaccattccgctggggggggattgtacagtttatccggtcttcgtgaacgaagctgcttactacgagaaaaaggaagctttcgccaagactacaaaactgacgctgaatgcaaaatctatcaggtgctgcctccac

SEQ ID NO: 294066 - DNA, 939 bp, Artificial Sequence
  derived and/or modified sequence
atgacatcctgccacattgctgaagaacatatacagaaagtagccatctttggcggcacccatgggaatgaattaacaggcgtctttttggtgaagcattggctggagaacggagccgaaatccagcggacggggctggaagtaaagcctttcattacgaatcccagagccgtcaagaagtgcacacgttatatcgattgtgacctgaaccgcatcttcgacctggagaacctggggaagaagatgtctgaagatcttccctacgaggtgcggagagcgcaggaaatcaaccatctgtttggcccaaaggattcagaggacagttacgatattatattcgacctgcataatactaccagcaatatgggttgcaccctcatcctcgaggattcccgcaataacttcctgatccagatgttccactatatcaaaacgtcacttgcacccttgccatgctatgtctatctgattgagcaccccagcctgaaatatgctacaacgcgctccatcgccaagtaccccgttggaattgaggtgggaccccagccccagggggtcctgcgtgcagacattcttgatcagatgaggaaaatgattaagcacgctcttgattttatccatcatttcaatgagggcaaagaattcccaccatgcgcgatcgaagtatacaagattatcgaaaaggtcgactaccctagggatgagaatggtgagatcgctgccattattcatccgaacttacaagatcaagactggaaacctcttcatccaggtgaccctatgtttctgacactggacggtaaaaccatccccctgggaggtgactgcactgtttaccccgtgtttgttaacgaggccgcatattatgagaaaaaagaggccttcgccaaaaccaccaaattgaccttgaatgccaaaagcatcagatgttgtcttcac

SEQ ID NO: 294067 - DNA, 939 bp, Artificial Sequence
  derived and/or modified sequence
atgacatcctgtcacattgcggaggagcatatccagaaggtcgcgatttttggcggcacacacggtaacgagctgacaggtgttttcctggtcaaacattggctggagaacggagcagagattcaacggacgggcttggaagtgaaaccctttattactaacccgagggctgtgaaaaagtgtactcgttatatagactgcgatttgaaccgcatatttgacctcgagaacttgggcaagaaaatgtccgaagatctgccgtatgaagtccgaagagcccaggagatcaaccatctgttcgggccaaaagatagcgaagacagctacgacatcattttcgacctccataatacgacgagtaacatgggatgcaccctcatccttgaggattcgcgtaataatttccttatacagatgttccactacatcaagacctctttggctcctcttccttgctatgtctacctcatcgagcacccctccctgaaatacgccaccacccgttcaattgccaagtatcctgtgggtatagaggtgggaccccagccacagggggttctaagagctgacatccttgatcaaatgagaaagatgataaagcacgctctggacttcattcatcattttaacgagggtaaagaattccccccgtgtgcaattgaagtgtacaaaattatcgaaaaagttgattacccccgggacgagaatggtgagatcgcagccattatccaccccaatttgcaggatcaggattggaagccgttacaccccggagaccctatgtttctgacgcttgacggtaaaaccattcccctcggcggcgattgcaccgtgtaccccgtgtttgttaacgaggcggcttactatgaaaagaaggaggcttttgccaagactactaaacttacgctaaatgcgaagtctataagatgctgcctgcat

SEQ ID NO: 294068 - DNA, 939 bp, Artificial Sequence
  derived and/or modified sequence
atgaccagctgccacattgccgaggaacacatccaaaaggtcgcaattttcgggggaacgcatgggaacgaacttaccggagtgttccttgtgaaacactggctggagaacggagcagaaatccagagaactggactggaggtgaagccgttcattaccaatccccgcgcggtcaagaaatgcactcggtacatcgattgcgacctgaaccggatcttcgacctcgaaaatctggggaagaagatgtcggaggacctgccgtacgaagtcagaagagcccaagaaatcaaccacctgttcggaccaaaggactcagaagatagctacgatatcatcttcgacttgcacaacaccacctctaacatgggatgtactctgatcctggaagattcccggaacaacttcttgatccaaatgtttcactacatcaagaccagcctggctcccctcccgtgttacgtgtacctcatcgaacacccaagcctgaagtacgccactactcgctcgattgcaaagtacccggtcggaatcgaagtcggtccgcaacctcaaggggtcctgagagcggacatcttggaccagatgagaaagatgatcaaacacgcgctggacttcatccaccactttaacgagggtaaagagttccccccgtgcgctatcgaggtgtacaagatcatcgaaaaggtggactacccacgggacgaaaacggcgagattgctgccatcatccacccaaacctccaagatcaggactggaagcctctccacccgggcgatccgatgtttctgacgctggacggaaagaccatcccgcttggaggcgactgcaccgtttaccccgtgttcgtgaatgaagcagcttattacgagaagaaagaagcattcgcaaagaccaccaagctgactttgaacgcgaagtcgatcagatgctgcctccac

SEQ ID NO: 294069 - DNA, 939 bp, Artificial Sequence
  derived and/or modified sequence
atgacctcttgtcacatcgccgaagagcacatacagaaagtcgccatttttggaggtactcacgggaacgagctgacaggcgtattcttggttaagcactggctagagaatggagcagagattcagcgcacggggctagaggtgaaaccattcataaccaacccgcgagcagtgaagaagtgtactcggtacattgattgcgacctgaatcgcattttcgacctggagaatctgggtaagaagatgagtgaagatctcccatacgaagtacggagggcccaagagatcaaccatctcttcggccccaaggactctgaagatagttacgacattatattcgacctgcacaacaccaccagcaatatgggatgcacattgatcctagaggatagtagaaacaactttctcattcagatgtttcattacatcaagacttctctcgcaccccttccatgttacgtgtaccttatcgagcacccgagtctcaagtacgctaccacacgctctatcgccaagtacccagtggggatcgaggtcggcccccagccccaaggtgttctcagagcagacattctggaccagatgagaaaaatgatcaaacacgccttggatttcatacatcactttaacgagggcaaggagttccccccatgcgctatcgaagtgtacaagatcatcgaaaaggtggactaccccagggatgaaaacggtgagatagccgcaataatacatcccaacttgcaggatcaagactggaagccactgcacccaggcgacccaatgtttttgacattggatgggaaaaccatcccactgggcggggattgcacagtgtaccccgtgttcgtgaatgaggcggcatactatgagaagaaagaggcgttcgccaagaccaccaagttgacgctgaacgcgaagagtattcgctgttgcctgcac

SEQ ID NO: 294070 - DNA, 939 bp, Artificial Sequence
  derived and/or modified sequence
atgacttcatgtcatatagccgaagagcatatccagaaggtggccatttttggcggcacgcatggaaatgaactcactggagtgttccttgtcaaacactggcttgaaaacggggccgagattcaaaggaccggacttgaagtgaaaccatttatcaccaatcctcgagccgtgaagaaatgtactaggtacatagattgcgatctgaacagaatcttcgatctggaaaacctcggaaaaaagatgagcgaggacctgccttacgaggtccgccgagcacaagagattaatcatttgtttgggccaaaagatagcgaggactcctatgacatcatattcgaccttcacaacacgacttcgaacatgggttgcacccttatccttgaagattcacggaacaactttctgattcagatgttccattacatcaagacgtccctggcaccacttccgtgttacgtgtaccttattgaacatccatctctcaagtatgcaactactcgctcaattgcaaagtatccagtcggaattgaagtgggtccacaaccgcagggagtgctcagagcagatatcctcgatcagatgcgtaagatgataaagcatgccctggactttatccatcacttcaatgagggcaaagagtttcccccatgtgccatcgaggtatacaagattattgagaaagttgactacccgagagatgagaatggtgagattgcagctatcattcacccgaacctccaggaccaagactggaagccactgcaccctggcgacccgatgttccttacccttgacggtaagaccattcccctgggtggagactgtactgtgtacccagtctttgtgaacgaagctgcctactacgagaagaaggaagcatttgccaagaccaccaagttgaccctgaatgcaaaatcgatccgctgctgtctccac

SEQ ID NO: 294071 - DNA, 939 bp, Artificial Sequence
  derived and/or modified sequence
atgacgagctgtcatatcgctgaggaacacatccagaaggtggctatattcggaggcacccacggaaatgaactgacaggcgtgtttctcgttaagcactggcttgagaatggcgccgagatccagcggacaggtctggaggttaagccttttattactaatccgagggccgtgaagaagtgcactcggtacattgactgcgacctcaataggattttcgatctggagaacctcggaaaaaagatgtcggaggatctgccttatgaggtcagaagagctcaggagattaatcacctgtttggacctaaagattccgaagattcttatgacattatcttcgacctgcacaataccacatcaaatatgggctgcacattaattttggaggattcacgaaataactttcttatacagatgtttcattacataaagacctctctggcgcccctgccctgttatgtgtacctgatcgagcatcccagtctgaaatacgcaactaccagatctatcgctaaataccccgtgggtattgaggtcggcccacagcctcagggtgtgctcagggcagatatacttgatcagatgcgcaaaatgataaagcatgccctcgactttatccatcatttcaacgagggaaaagagttccccccttgtgctatagaagtatacaagattatagaaaaggtggactaccctagagatgaaaacggcgaaattgccgcgattatccaccccaacttacaggatcaggattggaaacccctccatccaggggaccccatgttcctcacccttgacgggaaaaccatccctctggggggcgactgcaccgtgtaccccgtttttgtcaatgaagcagcatattatgagaagaaagaggcgtttgcaaaaacaacaaagctgaccttaaatgcgaaatcaataagatgctgcctgcat

SEQ ID NO: 294072 - DNA, 939 bp, Artificial Sequence
  derived and/or modified sequence
atgacgtcgtgtcatatagcggaagaacatatacaaaaagttgcgatatttggtggtacgcatggtaatgaattaacgggtgtttttctagtaaaacattggctagaaaatggtgcggaaatacaacgtacgggtctagaagttaaaccgtttataacgaatccgcgtgcggttaaaaaatgtacgcgttatatagattgtgatttaaatcgtatatttgatctagaaaatttaggtaaaaaaatgtcggaagatctaccgtatgaagttcgacgagcgcaagaaataaatcatctatttggtccgaaagattcggaagattcgtatgatataatatttgatctacataatacgacgtcgaatatgggttgtacgttaatactagaagattcgcgaaataattttttaatacaaatgtttcattatataaaaacgtcgctagcgccgttaccgtgttatgtttatttaatagaacatccgtcgctaaaatatgcgacgacgcgttcgatagcgaaatatccggttggtatagaagtaggtccgcaaccgcaaggtgttttacgtgcggatatactagatcaaatgcgaaaaatgataaaacatgcgttagattttatacatcattttaatgaaggtaaagaatttccgccgtgtgcgatagaagtatataaaataatagaaaaagttgattatccgcgagatgaaaatggtgaaatagcggcgataatacatccgaatttacaagatcaagattggaaaccgttacatccgggtgatccgatgtttttaacgctagatggtaaaacgataccgctaggtggtgattgtacggtatatccggtttttgtaaatgaagcggcgtattatgaaaaaaaagaagcgtttgcgaaaacgacgaaattaacgctaaatgcgaaatcgatacgatgttgtctacat

SEQ ID NO: 294073 - DNA, 939 bp, Artificial Sequence
  derived and/or modified sequence
atgacatcgtgccacattgctgaggagcatatacagaaggtggcgatcttcggggggacacatggcaatgaactgactggcgtttttctggttaagcactggctggagaacggtgccgagattcagcggactggactcgaagtaaaacctttcattaccaacccccgagcagtcaagaagtgtacgcgatacatcgactgcgatttgaataggatatttgatctggagaacttgggcaagaagatgtctgaagatctgccctatgaggtacgccgggcacaggagatcaatcatctgtttgggccaaaggatagtgaagatagttacgatatcatctttgacctgcacaatacgacaagcaacatggggtgtaccctcatcctagaagattcacgaaacaatttcctgatccagatgttccattacatcaagacttccttggcgccactcccttgctacgtctatttgattgagcacccgagcttgaaatacgccacgacccgaagcattgctaagtaccctgtcgggatcgaggtaggtcctcagccgcagggcgtactgagagcagacattttggaccagatgcggaagatgataaaacacgccctggactttatccatcactttaacgaagggaaagagtttcctccgtgtgccatcgaagtctataaaataatcgagaaggtagattaccctcgggacgaaaatggagagatcgccgctatcattcacccgaacctgcaagaccaggactggaaacctttgcatcctggcgatccaatgtttctgacgctggacggcaaaacaattcctctgggaggggattgtaccgtatatccagtctttgtgaacgaagctgcctactatgaaaagaaggaagcattcgctaagaccacgaagctgacacttaacgcgaagtccatccggtgttgcctccac

SEQ ID NO: 294074 - DNA, 939 bp, Artificial Sequence
  derived and/or modified sequence
atgacttcatgccatatcgcagaggaacacatccagaaagtggctatcttcggtgggactcatggaaacgagctcacgggagtctttctggtgaagcattggctcgaaaacggagccgaaatccagcgcaccgggctcgaagtcaagccgtttatcaccaaccccagagcggtcaaaaagtgtacgagatacatcgactgcgacctgaaccgcatcttcgatctggaaaaccttggaaagaagatgagcgaagatctcccatacgaggtccggcgtgcgcaagaaatcaaccacttgttcggccctaaagattcggaggactcgtacgatatcatattcgacctgcacaatactacctcgaacatgggatgcaccctgatcctggaggacagccgcaataactttctcatccagatgttccattacatcaagactagcttggcgccactgccttgttacgtgtacttgatcgaacacccatcgttgaagtacgcaaccactcggagcattgctaaatacccagtgggaatcgaggtgggaccacaacctcagggagtgttgcgcgctgacatcctggatcaaatgcgcaaaatgatcaaacatgccctggatttcatccaccacttcaacgaggggaaagagtttcccccctgtgcgatcgaagtgtacaagataatcgaaaaggtggattacccacgggacgaaaacggcgaaatcgcagcaattatccatccgaatctccaagaccaggactggaaaccgctgcaccctggcgacccaatgttccttaccctcgatggaaaaacgatcccgctgggaggcgactgtaccgtctacccggtctttgtgaacgaagcggcctactacgagaaaaaggaagcattcgctaagactactaagctcaccctgaatgcgaagtccatccgctgctgcctccat

SEQ ID NO: 294075 - DNA, 939 bp, Artificial Sequence
  derived and/or modified sequence
atgactagctgccacatcgcagaggagcatatccagaaagtagctattttcggcgggacccacggcaatgagctgaccggcgtgtttctcgtcaaacactggctggagaatggagccgaaatccagaggactggcctggaggtcaaacccttcattaccaatccccgcgcagtcaagaaatgcacacgatatatcgattgcgatcttaacaggattttcgatcttgaaaatctgggaaagaagatgagcgaagaccttccctatgaggttagacgtgcacaagagattaatcacctatttgggccaaaagactctgaggatagctacgacattattttcgatctccataacaccacctctaacatggggtgcacattaatcttagaggattctaggaacaatttcctgattcaaatgttccattatattaagacctctttggcgcctctgccctgctacgtatacctgatcgagcacccttctctgaagtacgccaccaccagaagcatcgctaaatacccagtggggattgaggtaggacctcagccacagggggtattacgggctgatatcttagaccagatgcgaaagatgatcaaacatgcccttgattttattcatcattttaatgaagggaaggagttccctccttgtgctatcgaggtgtacaagatcattgagaaggtggattaccctagagatgaaaacggtgaaattgctgcgatcattcatcccaaccttcaagaccaggattggaagccactgcaccctggggatcctatgtttttgaccttagatggtaagacaattcccttgggcggagattgtacagtgtatcctgtgttcgtgaacgaagcagcttattatgagaagaaagaggcattcgctaagacgacgaagctgaccctcaatgcaaaaagcattaggtgctgtctgcat

SEQ ID NO: 294076 - DNA, 939 bp, Artificial Sequence
  derived and/or modified sequence
atgacctcctgtcacatagcagaagaacatatacagaaggtggcgatttttggcggaacgcacggtaatgaactcaccggagtctttctggtgaagcactggcttgagaacggagccgagattcaaagaaccggactcgaagtgaagccctttatcactaacccacgagccgtcaaaaagtgtacccggtacatcgactgcgacctgaataggattttcgatctggaaaatctcggaaaaaagatgtctgaggacctgccatatgaggtccgcagagcccaagaaatcaatcatctctttggccctaaagattccgaggatagttacgatatcatttttgaccttcataacaccacctccaacatgggatgtacgcttatactggaggattccaggaataactttctcattcaaatgtttcattacatcaagacctcccttgcccctcttccttgctacgtgtacttgattgaacatcctagcctgaaatacgcaaccacccggtcgatcgcgaagtacccagtgggcattgaggtcgggccacaacctcagggagtcctgcgggcagacatcctcgatcaaatgagaaagatgattaagcatgcactggactttattcatcactttaatgaaggaaaagaatttccgccttgtgccatcgaagtgtacaagatcattgagaaggtcgactacccgcgagacgaaaatggcgaaatagccgccatcattcatcctaatcttcaggaccaggattggaagccactccatccaggggatcccatgtttctcactctggatggtaaaactattcccctggggggtgattgcaccgtgtaccctgtgttcgtcaacgaagcggcatactacgagaagaaggaagcattcgcgaaaaccacgaagctgaccctgaacgcaaagagcatcaggtgttgtctgcac

SEQ ID NO: 294077 - DNA, 939 bp, Artificial Sequence
  derived and/or modified sequence
atgacctcgtgtcacatagcggaagaacatatacaaaaagttgcgatttttggagggacccacgggaacgagcttactggtgtgttcctggtgaagcactggcttgagaatggtgcagaaatccagcgcaccgggcttgaagtcaaaccattcattaccaatcctagagctgtgaagaagtgcactaggtacattgattgcgacctgaaccggatctttgaccttgagaacctgggaaagaagatgtcggaggaccttccatacgaggttagacgagcccaggagattaaccatctgtttggaccaaaggactctgaagattcttatgatatcattttcgacctccacaacaccacctccaacatgggatgtactttgatactggaggatagccgcaataacttccttattcaaatgtttcattacattaagacgtcacttgcacctctcccctgctacgtgtacctcatcgagcacccttcgctcaagtacgccaccactcggagcattgctaagtacccagtcggtatcgaggtggggcctcagcctcaaggagtgctgcgcgctgatatacttgatcaaatgcggaagatgattaagcacgcgctcgactttattcatcatttcaacgaaggtaaagaatttcctccctgtgcaatcgaagtctacaaaatcatcgagaaagtggattacccaagggacgagaacggagaaattgccgcgatcatccatcctaatctgcaggatcaagattggaagccgctgcaccctggtgaccctatgtttcttaccctcgatggaaagactatcccattgggcggtgattgtactgtctatccagtctttgtgaacgaagccgcatactatgagaagaaggaagccttcgcaaaaacgaccaagctgacccttaatgcgaagagtatcaggtgttgtctgcac

SEQ ID NO: 294078 - DNA, 939 bp, Artificial Sequence
  derived and/or modified sequence
atgacatcctgccacatcgccgaggaacatatacagaaagttgccattttcgggggaacacatgggaatgaattaactggggtgttcctagtgaagcattggttggagaacggtgcggaaatccagagaactggacttgaagtgaagcccttcattacgaacccccgcgctgtcaagaagtgtacccgctatattgactgtgatctgaaccggattttcgacctggaaaatctgggcaagaaaatgagcgaagatcttccctacgaagtccgccgtgcgcaggaaattaaccatctgttcggtcccaaggactccgaggatagctatgacattatctttgaccttcataacactacctcgaacatgggatgtaccttgatactggaggactcccgcaacaattttctcatacagatgttccattatattaagacatcccttgcgcccctcccctgctatgtctatctgatcgagcacccgtcactgaagtacgcaacaacaagatccatcgccaagtatccagtgggcattgaggtgggaccccagccacagggcgtcctacgtgccgatatcttagaccaaatgcggaaaatgatcaagcacgccctggacttcatacatcattttaacgagggaaaagagttccccccctgtgcaatcgaggtatacaagattattgaaaaggttgattacccacgcgacgaaaacggcgagatagccgcaatcatacatccaaatctccaggaccaggactggaagccccttcaccctggcgatccgatgttcctcacactggatgggaagaccatcccacttggaggtgattgcacagtataccctgtgttcgtcaacgaagccgcctactatgagaagaaggaggcgttcgccaagacaactaagcttactcttaacgccaagtctataagatgttgcctgcac

SEQ ID NO: 294079 - DNA, 939 bp, Artificial Sequence
  derived and/or modified sequence
atgacttcctgtcatatcgcagaagagcatatacagaaagtagctatctttggaggaactcatggaaatgagttgacaggggtgtttctagtaaaacactggctggaaaacggggccgaaatccagcgaacaggactcgaagtcaagcctttcataactaaccctcgcgctgtcaagaaatgtactaggtatatagattgcgaccttaacagaatatttgatcttgaaaacttggggaaaaaaatgtctgaagacctcccatacgaagtgcggcgcgcccaggaaatcaaccatctgttcggacccaaggacagtgaagatagttacgatatcatcttcgatctgcataatactacttccaacatgggatgcactcttatcctcgaagattctcgcaacaactttctaatacagatgtttcattatataaaaacttctctggccccactcccatgttatgtgtatctcatcgaacatcctagtctcaagtacgcaacaactagatctatcgccaaatatcccgttgggatcgaagttgggccacagccccaaggggtgttacgggccgatatactagatcagatgagaaagatgattaaacacgcactcgattttatccaccattttaacgaagggaaagaattccccccctgcgccatcgaagtttataagatcatcgagaaagttgattacccccgggatgagaacggagaaatagcggcaatcattcacccaaacctgcaggatcaggattggaaaccactgcatcccggggatcccatgtttctcacacttgatgggaaaactattcccttaggaggggattgtacagtataccctgtgtttgtgaacgaagcagcttactatgaaaagaaagaagcttttgccaagacgactaagctaactctgaacgccaaatcaatacgctgttgtttacac

SEQ ID NO: 294080 - DNA, 939 bp, Artificial Sequence
  derived and/or modified sequence
atgacatcttgccatatcgccgaagaacacatccagaaagttgccatcttcggtggaacccacggcaacgagttgactggcgtcttcctagtgaagcattggctggaaaacggggcagaaatacagaggaccgggctggaagtaaagccttttataacgaacccacgtgccgttaagaaatgcactagatatattgactgtgacctcaaccgtatatttgatttggagaatcttggcaagaagatgtctgaagatctaccttacgaagtacggagagcccaggagatcaatcacctgtttggccctaaagattcagaggactcatatgacatcatcttcgacttgcacaatacgacgagtaatatgggatgcaccctgatactggaggattctcgcaataacttcctgatccaaatgttccattacatcaaaacttctctcgcccccttgccgtgttatgtctacctaattgaacacccttctctgaagtatgcgaccaccagatccatcgcgaagtatcctgtgggaatcgaggttggtccgcagccccagggggtgttgcgtgcggacattctcgaccaaatgcgaaagatgatcaagcatgctttggatttcatacatcattttaatgaaggcaaggaattcccaccctgcgcaattgaagtctataaaataattgaaaaggttgattatccacgggacgagaatggtgaaatcgccgctataatccatccgaatctccaggaccaggattggaagccccttcatcccggtgatcccatgtttcttacactggatggaaagaccatccccctagggggtgattgcacggtttaccctgttttcgtgaatgaggcagcttattatgagaaaaaagaggcttttgcaaaaaccacaaaattgactctcaacgctaagtcgatacgctgttgccttcac

SEQ ID NO: 294081 - DNA, 939 bp, Artificial Sequence
  derived and/or modified sequence
atgacctcctgccacatcgcagaggagcatatccagaaggtggcaatctttggcggaactcacgggaatgaactgaccggggtattcttggtgaaacattggttagagaacggagcagagattcaaaggacaggtctggaggtcaaacctttcattaccaaccccagggctgtgaagaagtgcacgaggtatattgactgcgatctcaacaggatcttcgatctggaaaaccttggcaagaaaatgtccgaggacctgccatacgaagtgaggcgcgctcaggagatcaatcatctttttggtccaaaggactccgaggactcgtatgacatcattttcgatctgcacaacacgacatctaacatgggctgcaccctgatcctcgaggatagccgaaataactttctgatccaaatgtttcattatatcaaaacttctcttgctcctcttccctgctatgtttatctaatcgagcaccccagtctgaaatatgccaccacacgctctatagccaagtaccctgtcggaatagaggtaggcccccagcctcagggcgtcctcagggctgatatcctggaccaaatgaggaagatgatcaagcacgcattagattttattcatcatttcaacgagggcaaagaattccccccgtgcgcaatcgaggtgtataagatcatagagaaagtggactatcctcgggatgagaatggcgaaattgccgcaataatacatccaaacttgcaagatcaggattggaagcctctgcatcctggggatcccatgtttttgacccttgacggcaagacgatcccattgggaggcgactgcaccgtttacccagtttttgttaatgaagctgcatactatgaaaagaaggaggcattcgctaagaccaccaagttgactttgaacgccaaatccattcgctgctgtctgcac

SEQ ID NO: 294082 - DNA, 939 bp, Artificial Sequence
  derived and/or modified sequence
atgaccagctgccatatcgccgaagagcatattcagaaagtggctatttttggcggaacacacggaaatgagctaaccggggtcttcctggtgaaacactggctcgagaacggcgccgaaattcaacggacaggcctagaagttaaacccttcattacaaatcctcgagccgtcaaaaaatgtacccgttatatcgattgtgatctgaatcggatcttcgacctggaaaacttgggcaagaagatgtcagaggatctcccttacgaggttagaagggcacaggagattaatcacctgttcgggcctaaggacagtgaggactcttacgacattatttttgatctgcacaacactacctccaacatggggtgtacactgatcctggaggactccagaaacaacttcctgattcaaatgttccactatataaaaactagtttggcccccctaccatgctacgtctatttaatcgagcatccaagtctgaagtatgctactactcggtctattgctaagtaccctgtggggatcgaggtgggaccccagccccagggggtcttacgcgccgacattctggatcagatgcgcaaaatgatcaagcacgccttggattttatacatcactttaatgagggaaaagagtttcccccctgcgccatcgaagtttacaaaattatcgaaaaggtggattatcccagggatgagaatggcgagatagcagccattattcatcccaacttgcaggatcaggattggaaaccactgcatccaggcgaccctatgtttctgacactggacggcaaaaccatcccactgggcggcgactgtacagtgtaccctgtgttcgtgaacgaggcagcatactatgagaagaaggaggcctttgcaaaaacaaccaagttgacactgaacgccaaatcaatccgttgttgtctgcac

SEQ ID NO: 294083 - DNA, 939 bp, Artificial Sequence
  derived and/or modified sequence
atgacttcgtgccacatcgcagaagagcacatccagaaggtcgccatcttcggagggactcacggtaacgaactgactggcgtctttttggtgaagcattggttggaaaacggcgcagaaattcagcggaccggactcgaggtgaaacccttcatcaccaacccgcgggcagtcaaaaagtgtactcgctacatcgattgtgatctgaatcggatcttcgacctcgagaacctggggaaaaagatgtcggaggatctgccatatgaggtgagacgggctcaggagataaatcacctcttcggcccgaaagatagcgaggattcctacgacattatcttcgacttgcataacactacctccaatatgggctgtacccttatcctggaggattcgcgcaacaactttctcattcagatgtttcattacatcaagacctcgctggcaccactgccatgctacgtgtacctcatcgagcacccgagcctcaaatacgctaccactcgctccatcgcgaagtacccagtgggaatcgaagtcgggccacagccccagggagtgctccgggcggacatcctggaccaaatgcgcaagatgatcaaacatgcgctggacttcatccatcactttaacgagggaaaagaattcccgccctgtgccatcgaggtgtacaagatcatcgagaaggtggactacccacgggacgagaacggcgagatcgcagctatcattcacccgaacctgcaggaccaagattggaagccgctgcacccaggggaccctatgttcctgactctcgacggaaagaccatccctctgggaggagactgcactgtctacccggtgttcgtgaacgaagccgcgtactacgaaaagaaggaagcgttcgctaagaccactaaactgaccctgaacgccaagagcatcaggtgttgccttcat

SEQ ID NO: 294084 - DNA, 939 bp, Artificial Sequence
  derived and/or modified sequence
atgacttcttgccacatcgctgaggaacacattcagaaagtggccatctttggcggtactcacggtaatgagcttactggcgtgttcttggttaaacattggctagagaacggtgccgagattcagcgcacggggctggaggttaagccctttataaccaaccccagagcagttaagaagtgcactcggtacatagactgtgacttgaacaggatcttcgacttagagaatctcggtaagaagatgagcgaggatcttccctatgaggttcggagggctcaggagatcaatcacttgttcggtcctaaggatagtgaggatagttatgacataattttcgacttgcacaacactacctctaatatggggtgtactctgattctagaggacagtcgcaataacttcctgattcagatgttccactacatcaaaactagccttgcgccgctaccctgctacgtctatctcatcgaacacccaagcctaaagtacgctacgacacggtctatcgccaagtatcctgttggcatcgaggtgggacctcagccgcagggcgttctgagagccgatatcctggaccagatgagaaaaatgataaaacacgctttggactttatacaccattttaacgaaggtaaggagttcccaccctgtgccatcgaggtatacaagataatcgagaaggtcgactaccccagagatgaaaacggtgagatcgcagcgattatacaccctaatctacaggaccaggactggaagccgctgcatccaggggatcctatgttccttacattagatggcaagacaattcccctcgggggggattgcaccgtttatccggttttcgtcaacgaagcagcatactatgagaagaaggaggcctttgcgaagacaacaaaactgaccctgaacgcaaagtcaattagatgttgtttgcat

SEQ ID NO: 294085 - DNA, 939 bp, Artificial Sequence
  derived and/or modified sequence
atgacttcctgtcatattgcagaagaacatatccaaaaagtcgccatctttggcggaacccatgggaatgaactcactggagtctttctggtcaagcattggcttgagaacggagcagaaattcagcgtactggactcgaagtgaaaccttttatcactaatcctagagctgtgaaaaagtgtactcgctacattgactgtgatctcaatagaatctttgacctggaaaacctggggaagaaaatgtccgaggaccttccttacgaagtgagaagggcacaggagattaatcacctgttcggaccaaaggattcagaagatagctacgacattatctttgatctgcacaataccacgagcaatatgggctgtaccctgatcttggaagattccaggaacaactttcttatccagatgttccattacatcaaaacttccctcgcgcctctgccctgttatgtgtacctgattgaacatccatcccttaagtatgctaccaccagatcgatagcgaagtaccctgtgggaatcgaagtcggaccccagcctcaaggtgtgctgcgcgcggatattcttgatcagatgcgcaagatgattaagcatgcacttgactttatccaccactttaacgagggaaaggagttcccaccatgtgcaattgaagtgtacaagataattgagaaagtggactaccccagagacgaaaatggagagatcgcagccatcattcatcctaacctgcaagaccaggactggaagccccttcatcctggtgatccaatgtttctgacgcttgatggcaagactatcccactgggcggagattgcactgtgtacccagtgtttgtgaatgaagctgcctactacgaaaagaaggaagcgttcgcaaagaccactaaacttaccctgaacgcgaagtcgatcaggtgctgcctgcat

SEQ ID NO: 294086 - DNA, 939 bp, Artificial Sequence
  derived and/or modified sequence
atgacctcatgtcacatcgccgaggagcacattcagaaggtggctatctttggcggaacgcacgggaatgagctaaccggagtgtttctggttaagcattggctggagaacggggccgagattcagaggactggactggaagtcaaaccattcatcaccaacccacgcgccgtgaaaaagtgtacgcgctacattgactgtgaccttaatagaatttttgacctcgagaatctgggtaagaagatgtccgaagacctgccatacgaagtacgccgggcacaggaaattaaccacctgtttgggcccaaggattctgaggactcctatgatattatttttgacctccataataccacttcaaatatgggctgcaccctgattctagaggactcccgcaacaacttcttgattcagatgtttcattatatcaagacatcgctggccccactgccatgttatgtgtatctcattgagcacccctctctcaagtacgctaccacaaggtcgattgccaagtaccccgtggggatcgaagtcgggccccagccccagggagtgttaagggctgacatcctcgatcagatgaggaaaatgatcaaacacgcactggatttcatccatcacttcaatgagggcaaagaatttcccccttgtgctatagaagtctataagattattgagaaagttgactacccccgtgatgaaaacggcgaaatcgccgcaatcatacaccccaacctacaggatcaggattggaaacctcttcaccctggggatcccatgttcctgaccttagacgggaaaactatcccactcggcggagattgcacagtgtatcctgtgttcgttaatgaggcggcctactacgagaaaaaagaagcctttgccaaaaccacgaaactaaccttgaatgctaagtccatacgatgctgtctccat

SEQ ID NO: 294087 - DNA, 939 bp, Artificial Sequence
  derived and/or modified sequence
atgacgtcctgccacatcgccgaagagcacattcagaaggtcgctattttcggtgggactcatggaaatgaactcaccggcgtgttcctcgtgaaacattggctagagaatggggccgagatacagaggactggcctcgaagtgaagccctttattaccaacccgagagctgttaagaagtgtaccagatacatcgactgtgacctgaaccgcatatttgatctcgagaacctgggcaaaaaaatgagcgaggacttaccctacgaggtaagacgggctcaggaaatcaaccatttatttggccctaaagattcggaggattcatacgacatcatttttgacctgcataacaccacaagcaacatgggctgtactctgatccttgaggattcacgcaataattttctcatccagatgttccactatatcaaaaccagtcttgccccattgccctgttacgtttatctgatcgagcaccccagtctgaagtacgcaactacccgcagtatcgccaaatatccagtgggaatcgaggtcggacctcagcctcagggcgttctcagagctgatatactggaccagatgcgtaaaatgatcaagcatgcactggacttcatacaccacttcaacgaaggaaaggaattccccccctgtgcaatcgaggtgtacaaaatcattgagaaagtggattatccccgagacgaaaacggtgagattgctgcaataattcatcctaatctgcaggatcaggactggaagcctctgcacccaggagaccctatgttcttgacattagatggcaagaccattcctctagggggagattgtaccgtgtacccagtgttcgttaacgaagcagcctattatgaaaagaaagaggcctttgctaagactacgaagctgacgttgaatgcaaaatccatccgatgctgcctccac

SEQ ID NO: 294088 - DNA, 939 bp, Artificial Sequence
  derived and/or modified sequence
atgaccagttgtcatattgccgaagaacatatccaaaaagttgccatctttggagggactcacggtaacgaattgactggagtttttcttgtgaagcattggttggagaatggggcagagatccagcgtaccggcttggaagtgaagcctttcattaccaacccaagggcagtgaagaaatgcacgcgctatattgactgtgatctgaacagaatctttgatctggaaaaccttggcaaaaagatgtccgaagatcttccttacgaagtccggcgtgcccaagagataaatcatctgtttggacccaaggatagcgaggattcctatgatatcattttcgaccttcataacactacctccaacatggggtgtacgctgatcttggaagattcgcgaaacaactttctgatccagatgtttcactacattaagacttccctcgcaccattgccgtgctacgtgtacctgatcgagcatccttcgctgaaatacgctaccactaggagcattgcaaagtacccggtggggatagaggtgggccctcaaccacaaggagtcctccgcgcagacatccttgatcagatgagaaaaatgattaagcatgcgctcgactttatacatcactttaatgagggaaaagagttcccaccgtgtgccatcgaagtgtacaagattattgaaaaggtggactacccaagggatgaaaacggagaaattgcagcaatcatacacccaaatcttcaagatcaggattggaaaccgctccaccccggtgatcccatgttcctgactctggacggtaagactatcccccttggtggcgattgtactgtctaccccgtgttcgtaaacgaagctgcgtactacgagaaaaaggaggcgtttgcaaagactaccaagctgaccttgaatgcaaagtcgattagatgctgtctccat

SEQ ID NO: 294089 - DNA, 939 bp, Artificial Sequence
  derived and/or modified sequence
atgacctcatgtcacattgcagaggaacatattcagaaagtcgcaatctttggaggcacccatggtaacgagctcaccggagtctttcttgtgaagcactggcttgagaatggcgccgaaatacagcgtactggattggaggttaagccctttattaccaaccctcgcgccgtgaaaaaatgcacccgctacattgattgtgacttgaataggattttcgacctggagaacctgggtaagaagatgtctgaagatctcccttacgaagtgagaagggctcaagaaatcaatcatctgttcggccctaaggattctgaagactcttacgacataatatttgacttgcataatacaactagcaacatgggctgcactctgattctggaggactcaaggaacaacttcttgatccaaatgttccattacataaagacctctctggcccctctgccctgctacgtgtacctgatagagcatccctcactgaaatatgcaacaactagaagcattgctaaataccctgttggcattgaggtcggcccccaacctcagggcgtgcttagagcagatatcttggatcaaatgaggaaaatgattaagcatgctctggactttattcaccacttcaacgaaggtaaggagttccccccttgcgccatcgaggtctacaagataattgaaaaagtggactatcccagagatgaaaatggcgagatcgccgctatcattcatcccaaccttcaagaccaggactggaagcccctccacccaggtgaccccatgttcctgacattggatggcaaaaccatcccattgggaggtgattgcacagtgtaccctgtgttcgtgaacgaagccgcctattatgagaagaaggaagctttcgccaaaactacaaagctgaccctgaatgccaaaagcattcgctgttgcctccac

SEQ ID NO: 294090 - DNA, 939 bp, Artificial Sequence
  derived and/or modified sequence
atgacctcttgccatatcgccgaggagcatattcagaaagtggcgatttttggaggtactcacggcaatgagctgacaggggtgtttctggtcaagcattggcttgagaacggcgcggaaatccagcgcaccggactcgaggtgaagcccttcataaccaacccccgtgccgtcaaaaagtgtactagatacatcgattgcgatctgaatagaatttttgatttggagaacctcggaaagaagatgagcgaagacctcccttatgaggtgcgacgcgcacaagagataaatcatctgttcgggcccaaggattctgaggacagctacgatatcatttttgacctgcataacacaacttcaaacatggggtgtaccctgatcctcgaagactcacgcaacaacttcctcatccagatgtttcactacatcaagaccagcctcgcccccctgccgtgctacgtgtatctgattgaacacccttccctcaaatacgctacaactaggtcaattgctaagtaccccgtcggaatcgaggtgggaccacagccacagggcgtcttgcgggctgacatcttagatcaaatgcgcaagatgattaagcacgccctagattttatacaccatttcaatgaaggaaaggagtttcctccctgtgcaatagaggtgtataagattatagagaaggtggattaccctcgcgacgaaaatggagagatcgcagccattatccatcccaacctgcaggaccaggattggaagcccctacaccccggcgaccccatgttcctcacactagacggcaagacaattcccctgggcggtgactgtaccgtatatccggttttcgtgaatgaagcagcatactatgaaaaaaaagaggcattcgccaaaactacgaagttaactttaaacgcaaagtctataaggtgctgtcttcat

SEQ ID NO: 294091 - DNA, 939 bp, Artificial Sequence
  derived and/or modified sequence
atgactagctgccacatcgcggaagagcatatacaaaaggtggccatatttggtggaacgcacggcaatgagctgaccggggtgttccttgtgaagcactggctcgaaaatggggcagagattcagcgcaccggactcgaagtaaagccctttattacaaatcccagagcagttaaaaagtgcactaggtatatcgactgtgacctgaaccgcatttttgaccttgaaaacctggggaagaaaatgtctgaagatcttccctacgaggtccgccgagcacaagagatcaaccacctgtttggccccaaagactcagaagacagctacgatatcatatttgacctgcataacaccacgtccaacatgggatgcacactgattctcgaagactctaggaataattttttgatccagatgtttcactatatcaagacgagcctggcccccctcccctgttacgtctacctcatcgaacacccaagcctgaaatatgccacaaccaggtccattgcgaaataccccgtgggcattgaagtcggaccccagccccagggcgtgttgagggccgacattttggaccagatgcggaagatgataaaacatgctctcgattttatccaccacttcaatgaggggaaagagttccccccatgtgccatcgaggtttataaaatcatcgagaaggtggactaccctcgagatgagaatggcgaaatcgctgcaattatccatccaaacctgcaggatcaagactggaagccccttcatccaggcgatccaatgtttctgaccctggacggcaagacgatccccctcggcggagattgcactgtgtaccctgttttcgtaaacgaagcagcttactatgagaagaaagaggctttcgcgaagacaactaagcttaccctcaatgcgaagagtatcaggtgttgtctgcac

SEQ ID NO: 294092 - DNA, 939 bp, Artificial Sequence
  derived and/or modified sequence
atgacatcctgccatatcgcggaagaacatatccagaaggtggctatcttcggcgggacccatggaaacgaactcactggggttttcttggttaaacactggctcgaaaatggggctgaaatccagcggacaggcctagaggtgaaaccttttatcacaaacccgcgtgccgtgaaaaagtgcaccagatatattgactgcgacctaaataggatttttgacctagagaatcttggaaagaagatgagcgaggatttgccctacgaagtgcggagggcacaggagattaatcacctgtttggtcctaaggattctgaagatagctatgacataatattcgatctgcataacacaacaagtaatatggggtgtacgctcattctggaagattcaagaaataatttcctgatccagatgtttcattatatcaagacctctcttgctccgctgccctgttacgtctatctaattgaacacccatctttgaagtatgccaccactagatccatcgctaaataccctgtaggtattgaggttggcccccagcctcagggagttctgagagctgacatactggatcaaatgaggaagatgatcaagcacgccctcgacttcatacatcacttcaacgaagggaaagaatttcctccatgtgctattgaggtgtacaagattatagagaaagtagactatcctcgggacgaaaacggagagatagccgctatcattcatcctaatttgcaggatcaggattggaagcctctccacccaggggacccgatgttccttaccctggatggcaaaacaatccctttagggggagactgcactgtctatcccgtgtttgtgaatgaggcagcgtactacgagaaaaaagaagctttcgcaaaaacaacaaaacttaccctgaatgctaagtcaatccgatgttgcctgcac

SEQ ID NO: 294093 - DNA, 939 bp, Artificial Sequence
  derived and/or modified sequence
atgacttcttgtcacatcgcagaggagcatatccaaaaggttgccatattcggaggcacccatggtaatgaacttacaggtgtattcttggtcaaacattggctagagaatggggcagagattcaacggactgggctggaggtaaaaccattcatcacgaacccaagagctgtcaaaaagtgtacaagatatatcgattgtgatttgaatcggatttttgatttggagaaccttgggaaaaaaatgagcgaggatttaccatatgaagttagacgtgctcaagaaatcaatcatctcttcggtcccaaagactctgaggattcttacgatataatttttgatttacataataccacatctaacatgggttgcacacttattttggaggatagcaggaacaacttcttgatacaaatgttccattatattaaaactagtctcgcaccacttccatgctacgtttatttgatcgaacatccatctctcaaatatgctaccactagatcaatagcaaagtaccctgtgggtattgaagttggtccacaaccgcagggagttcttagagctgatatccttgatcagatgaggaaaatgatcaagcatgctttggactttatccatcactttaatgaaggaaaggagtttcctccatgcgcaattgaggtgtataagattatagagaaagtggattatcctagggatgaaaacggagagatcgctgccattattcatcctaatcttcaagatcaagattggaagccactgcatcctggcgatccaatgttccttactctggatggcaagaccatcccactgggcggtgattgtaccgtctatccggtttttgttaacgaggccgcttactatgaaaagaaagaggcttttgctaagacaaccaaattaacgcttaatgctaaatcaataagatgttgtttgcat

SEQ ID NO: 294094 - DNA, 939 bp, Artificial Sequence
  derived and/or modified sequence
atgacctcctgtcatattgccgaagagcatattcagaaggtggcaatctttggtgggactcatggaaacgaacttactggggtctttctggtgaagcattggctcgagaacggcgcagaaattcaaagaactggactggaagtgaagccgttcattacgaacccacgtgcagtgaagaagtgtaccagatacatcgactgtgacctgaacagaatctttgaccttgagaatcttggaaagaagatgtccgaagatctcccctatgaagtgcggcgggctcaagaaatcaaccaccttttcggaccaaaagactcggaagatagctacgacatcatcttcgacttgcacaatactactagcaacatgggatgcactcttatccttgaggattcccggaacaactttcttattcaaatgttccactacatcaagacctcgcttgcaccactcccatgctacgtgtacttgattgaacatcctagcttgaaatacgcaacgactagatccattgccaagtaccctgtgggtattgaggtgggcccgcagcctcaaggtgtccttcgggcagacatcctcgaccaaatgcgtaagatgataaagcatgccctcgatttcattcaccatttcaatgaaggaaaagagtttccaccatgtgccatagaggtctacaagatcattgagaaggtggattacccaagggacgagaacggagagattgcggcaattatccatcctaacctgcaggatcaggattggaagcctcttcatcccggagatcctatgtttctgactcttgatggtaagaccatccctctgggaggagactgtactgtctacccagtgttcgtgaatgaagcggcctattacgagaagaaggaagccttcgccaagaccaccaagctcacccttaacgccaaatcaatccgttgctgtctccat

SEQ ID NO: 294095 - DNA, 939 bp, Artificial Sequence
  derived and/or modified sequence
atgacttcctgtcatatcgcagaagagcacatccagaaggtcgcaattttcggcggaacccacggaaacgagctgaccggggtgttcctggtgaagcactggctggagaacggcgctgagatccaacgaaccggactcgaagtgaaaccattcatcaccaaccctcgggcggtgaagaagtgcacgcggtacatcgattgcgacctcaaccggattttcgaccttgaaaacttggggaagaaaatgagcgaagatctgccatatgaggtgaggcgcgcgcaggagatcaatcacctgttcggtccgaaagacagtgaggactcgtacgacataatcttcgacctgcacaataccacttcaaatatgggatgcacgttgatcttggaagattcaagaaataactttctgattcaaatgttccactacataaagacgtccctggcgcccctcccttgctacgtgtacctgattgaacacccgagcctgaagtacgcgactacccggtcaatcgcaaaatacccggtcggaatcgaggtcggcccgcaaccacagggggtgctgagagccgatatcttggatcaaatgcgcaagatgatcaagcatgctctggatttcatccaccatttcaacgaaggtaaggagttccctccgtgcgctatcgaagtctataagattatagaaaaggtggactaccctagagatgaaaacggagaaatcgcagctatcatccacccaaatctccaggaccaggattggaagcctctccatccgggtgaccccatgttcctgacgttggatggaaagactatcccgcttggaggcgactgtactgtgtacccagtgtttgtcaatgaagcggcctactacgagaagaaagaggcctttgccaagactactaaactcaccctgaatgccaagtctattcgctgctgccttcat

SEQ ID NO: 294096 - DNA, 939 bp, Artificial Sequence
  derived and/or modified sequence
atgacctcttgtcatattgctgaggaacatatccaaaaggtggcgatcttcggaggaacacacggtaacgaattgactggtgtctttttggtgaagcactggcttgaaaacggagctgaaatccagcgtacagggcttgaagttaaaccatttatcacaaacccaagggctgtcaaaaagtgcactcggtacatagattgtgatcttaaccgcatcttcgacctggaaaatttggggaagaaaatgagtgaggatctgccatacgaggtcaggagagcacaggagatcaaccacttgtttggacccaaagatagtgaggactcatacgacatcatatttgacctgcacaataccacctccaacatgggatgcactctaatccttgaggattctcggaacaatttcctcatccagatgttccattacatcaaaactagcttggcacctttaccttgctacgtgtacctgatagaacacccttctctgaaatatgccaccaccaggagcatagcaaaatatcctgtgggcattgaggtcggcccccagccccagggagtcttgcgcgccgacatccttgaccagatgcgcaagatgataaaacatgctctcgatttcattcatcattttaacgagggcaaggaattcccaccctgcgccattgaagtgtacaaaattatagaaaaggtggattaccccagggacgagaatggtgagatcgccgccatcatccacccaaatctgcaggatcaagattggaaacccctgcatccaggtgaccctatgttcctcacactcgacggcaagaccatcccccttgggggagactgtaccgtctaccctgtattcgtgaacgaggcggcctactacgagaagaaggaagcgttcgcaaaaactacaaaactgaccttgaacgcaaagtcgatccgatgttgccttcac

SEQ ID NO: 294097 - DNA, 939 bp, Artificial Sequence
  derived and/or modified sequence
atgacctcctgtcacattgctgaagaacacattcagaaggtggcgatctttggcggcacccatggaaatgagttaacaggagtgtttcttgtgaagcactggcttgaaaacggcgccgaaatccagcggacgggcctagaggttaaacccttcattacaaaccctcgagctgtaaaaaagtgcaccagatatatcgattgcgacctgaataggatttttgacttagagaacttaggcaaaaagatgtccgaggacttgccttacgaggtgcggcgcgcccaggaaattaatcatctttttggcccaaaagacagcgaggattcttatgacatcatcttcgatctgcacaacaccacgtccaatatgggctgcacactgattctcgaagattcaagaaataattttctcatccagatgttccactacataaagacaagtctagcccctctgccatgttacgtatacttgatcgaacaccctagcctgaagtacgcaaccactagatccattgcgaaatatcccgtgggaattgaagtcggcccacaaccccagggggtgctgagggctgatatcctcgatcagatgaggaagatgatcaagcatgcgttggacttcatccatcactttaacgaagggaaggagtttcctccatgcgccatcgaggtatacaaaatcattgagaaagtcgactaccctagggatgagaacggagagattgccgctattatacatcccaatctccaggatcaggattggaaaccattgcaccccggtgatccaatgtttctgacgctggatggtaagaccattcccctgggcggggactgcacagtctatccagtgtttgtaaacgaagctgcctattacgaaaagaaagaggccttcgccaaaacaactaagctgacgctcaatgctaaaagcatacggtgttgtttacac

SEQ ID NO: 294098 - DNA, 939 bp, Artificial Sequence
  derived and/or modified sequence
atgacttcttgccatattgccgaggaacacatccagaaagttgcaatcttcggagggacacatgggaatgagttgactggagtcttcctagtgaaacattggctcgaaaatggggcagagatccagcggactgggctcgaagtcaaacctttcataacaaatcctagagccgtaaaaaaatgcacacgatatatcgattgtgatctgaataggatattcgacctcgaaaacttgggaaagaaaatgtcagaggatttaccatatgaagtccggagagctcaggaaatcaatcatctctttgggcctaaggatagtgaagattcatatgatataatctttgatcttcataacactacttcgaatatgggatgtactctcatccttgaggattctaggaacaactttttaatccagatgtttcattatataaaaacgtccctagctcctttgccctgttatgtctacctcatagagcatccatctcttaaatacgctacaactcgcagtattgccaagtatcccgtcgggatagaagtcgggccacagccccagggggtgctgcgggctgatattcttgatcagatgaggaagatgataaagcacgctctcgattttatacatcattttaatgaaggaaaagaattccctccgtgcgccatagaagtgtacaaaataattgaaaaagtcgactacccccgggacgaaaatggagagatagctgctatcattcaccctaatctacaggatcaagattggaaacccctgcacccaggggatccgatgttccttactctagatgggaaaacgatccccctagggggggattgcactgtgtaccccgtcttcgtaaacgaggcggcctattatgaaaaaaaagaagcattcgcaaaaacaactaagcttacactcaatgctaaatccattagatgttgcctgcat

SEQ ID NO: 294099 - DNA, 939 bp, Artificial Sequence
  derived and/or modified sequence
atgacttcctgccatatcgccgaagagcatatccaaaaggtcgccatctttggaggcacccacggaaacgaactcaccggagtctttctggttaaacactggctggaaaacggcgccgaaatccagcgcactgggctcgaggtcaagccgttcatcactaacccccgcgcggtgaagaagtgcactagatacatagattgtgatctcaatcgaattttcgatctggaaaatcttggaaagaaaatgtcagaggacctgccttacgaagtaagacgcgcccaagaaatcaatcacctcttcggaccaaaagattccgaggactcatacgacatcatctttgatctgcataacactacctcgaatatgggatgcaccctcattctggaagattcacggaacaacttcctgatccagatgttccactacatcaaaactagcttggcaccgcttccgtgttacgtgtacttgattgaacacccgtctctcaagtatgcaactaccagatcgattgccaaatacccggtcggcattgaggtggggcctcagcctcaaggagtgctgcgagctgacattctggaccaaatgcgcaagatgatcaagcatgctctggactttatccaccatttcaacgagggaaaggagttcccgccatgcgcaatcgaggtgtataagatcatcgaaaaagtggattacccccgggatgaaaatggggagatagcggctatcatccatccgaacctccaggaccaagattggaagcctctgcaccccggggacccgatgttcttgaccctggatggaaagaccatcccgttgggtggagactgtaccgtgtaccccgtgtttgtcaacgaagcagcatactatgagaagaaggaagcgttcgccaagaccaccaaactcacgctgaatgcgaagtcaattaggtgttgcctccat

SEQ ID NO: 294100 - DNA, 939 bp, Artificial Sequence
  derived and/or modified sequence
atgaccagctgccacatcgcagaagaacatatccagaaggtcgccatattcggggggacacacggcaacgagctgaccggcgtgttcctggttaaacactggcttgaaaacggagcagagattcagcgcacaggtttggaggtcaaaccattcatcacaaatcccagagccgtcaagaagtgcacacggtacattgattgcgatctgaaccgcattttcgatttagaaaatttgggcaagaagatgagtgaggacctgccctatgaagtgcgtcgtgcccaggaaattaaccacctctttggcccgaaagattctgaagatagctacgatattatcttcgatctccacaataccacctccaatatgggttgtacactgattctagaggactcaagaaacaatttcctgatccagatgttccactacattaaaacaagcctagctcctctcccatgttacgtctacttgatagagcacccctcactgaaatatgccactactcgttcgattgcaaagtatccagtggggatcgaagtggggcctcagcctcagggtgtccttcgagcagatatccttgatcagatgagaaaaatgattaagcacgcccttgatttcatacaccatttcaatgaaggcaaggaattccccccctgtgcaattgaggtgtacaagatcatagaaaaagtggattacccaagagacgagaatggggagatagctgccatcatccaccctaatctacaggaccaggactggaaacctctccatcccggcgaccccatgttcctcactctggatggaaagactatccctctgggcggggactgcacagtgtatccagtcttcgtgaacgaggccgcttactacgaaaagaaagaagcgtttgccaaaacgaccaaactgacgctcaacgccaagtccatccggtgctgcctccac

SEQ ID NO: 294101 - DNA, 939 bp, Artificial Sequence
  derived and/or modified sequence
atgacatcatgccacattgccgaggaacacatccagaaggtggccatcttcgggggcactcacggcaatgagttgaccggtgttttcctcgtgaagcattggctggagaatggtgccgagatccagcgaactggccttgaggtgaagccattcatcactaacccccgggctgtcaagaagtgcacgcgctacatcgattgcgatcttaaccgcatcttcgatctcgagaacctgggcaagaagatgagcgaggatttgccgtatgaggtccgccgggcccaggagatcaaccacttattcggacccaaggactcggaggactcgtacgacatcattttcgacttacataacacaacttccaacatgggttgcacacttatccttgaagactcccgtaacaactttctcatccagatgttccactacattaagacctcgctggcgcctctcccgtgctacgtgtatctcattgagcacccctcactgaagtacgcgacaacccgcagcattgccaagtatccagtcggaatcgaggtgggccctcaacctcagggcgtattgcgggcggatatcctggaccaaatgagaaagatgatcaagcacgccctcgattttatccaccacttcaacgagggcaaagagtttcctccctgtgctatagaggtctataagatcatcgagaaagtggactacccccgtgatgagaacggcgagattgccgccatcattcatccgaacctccaggaccaggactggaaacccctccatccaggtgacccgatgttcctgaccctcgacggtaagaccattcccctgggcggggattgtaccgtttaccctgtcttcgttaacgaggccgcttactacgagaagaaggaggcctttgctaagactaccaagctgaccttgaacgctaagtcgattcgttgttgtcttcac

SEQ ID NO: 294102 - DNA, 939 bp, Artificial Sequence
  derived and/or modified sequence
atgacgagctgccatatagctgaagagcatatccagaaagtcgccatatttggaggcacccacggaaacgagttaactggcgtttttctcgtgaagcactggcttgaaaatggagctgagatccagcgaacgggcctggaagtgaaaccattcatcaccaacccaagggctgtcaagaagtgcaccaggtatatagattgcgacctgaaccgtattttcgacttagagaacctcggcaaaaaaatgagcgaggatttaccgtacgaggtgcggagagcccaggaaataaaccatttgttcggccccaaggactccgaagacagttacgatattatttttgacctgcacaacactacttccaatatgggatgcaccctgattctggaggatagtcgtaataacttcctgatccaaatgttccattacataaaaacttcccttgctcccctgccatgctacgtctatctcattgaacatccctcactcaagtacgctacgactcgcagtatcgcaaaataccccgttgggatagaggtgggacctcagccacaaggagttctcagggccgatattttggatcagatgcggaagatgatcaaacacgcgctggatttcatccatcactttaacgaaggcaaggaattcccaccctgcgctattgaggtatataaaatcatagagaaagttgattatccgcgggatgagaatggggagattgccgcgatcatccaccccaatctccaggaccaggactggaagcccttacaccctggagatcccatgtttcttaccttggatggaaagacaatccctttagggggggactgcacagtataccctgttttcgtgaacgaggctgcctattacgagaaaaaggaagccttcgctaagaccacaaaattaacactgaacgccaaaagtatcagatgttgcctccac

SEQ ID NO: 294103 - DNA, 939 bp, Artificial Sequence
  derived and/or modified sequence
atgacctcatgccacattgcagaagagcacatccaaaaggtcgccatcttcgggggcactcacgggaacgagctgaccggagtgttcttggtgaagcactggctggagaatggagccgaaatacagcggactgggctggaggtgaaaccgttcatcaccaacccgcgcgctgtcaagaagtgcacccggtacattgattgtgacctgaaccgaattttcgatctggagaatctcggcaagaagatgtctgaggacctcccttacgaagtgcggcgggcacaggaaatcaaccatctgttcggaccgaaggactccgaggactcgtatgatatcatcttcgacctgcacaataccactagcaacatgggatgcaccctcatcctggaggactcccggaacaactttctgattcagatgttccactatatcaagacctcactcgctccactgccgtgttacgtgtacctgatcgaacatccgtcgctcaaatatgccactactcgctcgatcgcgaaatacccagttggaatcgaagtcggaccgcagccgcagggtgtgctgcgagccgacatccttgatcaaatgcgcaagatgataaagcatgcactggatttcatccatcactttaacgagggaaaggagtttccaccatgcgcgattgaagtctacaaaatcattgagaaggtagactaccctagagatgaaaacggtgagatcgctgccattatccatccaaatcttcaagatcaggattggaagccgctccaccccggtgaccccatgtttctgacccttgacggcaagactattcctctcggcggcgactgcaccgtgtacccggttttcgtcaatgaggccgcatactacgaaaagaaagaagcatttgcaaaaaccaccaaactcactctcaacgctaagtccatccgctgctgtctccat

SEQ ID NO: 294104 - DNA, 939 bp, Artificial Sequence
  derived and/or modified sequence
atgacaagctgccatatcgccgaggagcatatccagaaggttgcgatctttggcggaacccacggcaacgaattgacgggcgtatttctggtcaagcactggctggaaaacggagcggagattcagcggaccggactggaagtgaaaccatttatcacgaatccacgcgcggtgaaaaagtgtacgaggtacattgattgcgatctgaaccggatattcgacctggagaatctaggaaagaaaatgtcggaggatttgccctatgaagtccggcgggcccaggagatcaatcatctgtttggcccgaaagatagcgaagactcatacgatatcatattcgatctgcacaacaccacgtcgaatatgggctgcaccctgattctcgaggatagccgcaacaactttctaattcagatgttccactacattaaaacatccttggcgcccctgccctgctatgtgtatttgatcgagcacccatctcttaaatacgccactacgcgttcgatcgccaagtacccagtcggaattgaggtgggcccgcagccccaaggtgttctgcgagcggatatccttgatcaaatgaggaaaatgatcaagcacgcgttggacttcatacaccactttaatgagggaaaggaattccccccgtgcgctatagaggtctacaagatcatagagaaagtcgattatccacgtgatgaaaacggcgaaatcgctgctattattcaccccaatcttcaggatcaagactggaagcccctgcatccgggagaccccatgttcctcaccctcgatgggaagaccataccgttgggcggcgactgtaccgtgtacccagtgtttgttaacgaagccgcctactacgagaagaaggaggcctttgccaaaacgacaaagcttaccctgaacgccaaatcgatccgatgttgtctgcac

SEQ ID NO: 294105 - DNA, 939 bp, Artificial Sequence
  derived and/or modified sequence
atgacttcgtgccatatcgccgaggaacatatccagaaggtggcaattttcggcggcacccacgggaacgagctgaccggagtgttcctggtgaaacactggctcgaaaacggggccgaaatccaacgaacgggtctggaagtgaagccctttatcactaatcctagggcggttaagaagtgcactagatacatcgactgtgacctcaataggatttttgaccttgaaaatctcggcaagaagatgagcgaggacctgccgtatgaagtgcggcgcgcacaggagatcaaccaccttttcggaccgaaggattctgaggactcctacgacatcatattcgatctgcacaataccacttcaaacatgggttgtaccctcatattggaggattcccggaataacttcctgattcagatgttccattacatcaaaacctccctcgcaccacttccttgctacgtgtacttgatcgaacatccgagcttgaagtacgccactacgcgctcgatcgctaaatacccagtgggcatcgaagtgggaccccagccacaaggtgttctgcgcgcggatatcctggatcagatgcgcaagatgatcaagcatgcgctggactttatccaccatttcaacgagggaaaggagttcccgccatgcgccattgaagtgtacaagattatcgaaaaagtcgactacccgcgggatgagaacggagaaatagcggctatcatccatccaaatctccaagaccaggattggaaacctttgcacccgggcgacccaatgtttctgaccctcgacggtaaaactatcccgctcgggggagattgcaccgtgtacccagtgttcgtgaacgaggccgcctactacgagaaaaaagaagcgtttgccaagacgactaagctgaccctcaacgcaaagtcgatcagatgctgtctccac

SEQ ID NO: 294106 - DNA, 939 bp, Artificial Sequence
  derived and/or modified sequence
atgacttcctgtcatatcgcagaagaacatattcaaaaggtagccatctttggaggcacacacggtaatgagctgaccggcgtgtttctggtaaagcactggttggagaacggggccgagatacagcgcactgggctggaggttaagccatttatcaccaaccctagagctgtcaagaaatgcacaagatacatagattgtgatctgaaccggatcttcgacctggagaacctgggaaaaaagatgagtgaggatctcccctatgaggtgaggcgtgcccaggagataaatcatctatttgggccaaaagattctgaggactcgtacgatattatctttgaccttcataacacaacgtcaaatatgggctgcacactgattctggaggattcacgcaataactttctgatacagatgtttcattacatcaaaacttcactagccccactcccgtgctatgtgtacctgatcgaacatccgtctttgaaatatgccactacccgcagcatcgctaaatatccagtgggaattgaagtcgggcctcagccacaaggagtcttgcgggccgatattctggaccaaatgaggaagatgattaaacacgccctggatttcatacatcatttcaatgaggggaaggagtttcccccttgcgccatcgaggtgtacaagatcatagagaaggtggattaccctcgggacgagaatggcgagatcgctgccataatccaccctaatttgcaagaccaggattggaagccacttcaccccggagatccgatgtttctgaccctcgacggtaagacgatacctctgggcggagattgcacagtttatccagtttttgtaaatgaggccgcatactacgagaagaaagaggcatttgccaagacaaccaaactgaccctgaacgcaaagtcgataaggtgctgtcttcat

SEQ ID NO: 294107 - DNA, 939 bp, Artificial Sequence
  derived and/or modified sequence
atgacttcgtgtcatattgctgaagaacatatccaaaaggtcgcgatttttggaggcactcacggaaacgaattaactggtgtttttctagtaaaacactggctggaaaacggagccgagatccagcgtaccggtctggaagtcaaaccttttattacaaatcctcgcgccgtcaagaaatgtacaaggtacattgactgcgatctgaaccgtatttttgatctggaaaacctgggaaagaagatgtctgaggacctcccttacgaagtccgtcgggcccaggagatcaaccatctgtttgggcctaaggattctgaagacagctacgatattatctttgacctgcataataccactagcaatatgggttgcactcttatcctcgaagactctcgcaacaattttctaatccagatgtttcattacattaagacatctcttgcccccttgccttgttatgtatacttgattgagcatcctagtttaaagtatgccaccacccggtctatagccaagtatccggtgggaattgaagttggtcctcaaccccaaggcgttttacgggcggatatactcgaccaaatgcggaagatgatcaaacacgctctcgacttcatccaccactttaatgagggaaaggaatttcctccctgtgctattgaagtgtataagataatcgagaaggtggactatcctagggatgagaacggggagatcgcagcaataatccaccccaatctccaggatcaggattggaaacccctccaccccggagatcctatgttcctgacactcgatgggaagactatacctctggggggggattgcaccgtgtaccctgtgtttgttaacgaggccgcatattatgagaagaaagaagccttcgccaaaaccaccaaactgactctcaacgcgaaaagcatccggtgttgcttgcac

SEQ ID NO: 294108 - DNA, 939 bp, Artificial Sequence
  derived and/or modified sequence
atgactagctgtcacatcgcggaagagcacattcagaaagtcgcaatcttcgggggcactcatggtaacgaactgaccggcgtgttcctggtcaaacactggctggagaacggagccgagatccaaagaaccggactggaggtgaagccgttcataactaacccacgggccgtcaagaagtgcaccaggtacatcgactgtgatctgaacagaattttcgacctggagaacttgggaaaaaagatgtccgaggacctcccgtacgaggtgaggcgagcccaagaaattaaccacctcttcggccctaaagattccgaagactcctacgacatcatcttcgatctgcacaacactacttctaatatgggatgcaccttgatccttgaggactcgagaaacaattttctgatccaaatgttccattacattaagacgtcactcgctccactcccctgttacgtctacctgatcgaacacccctccctgaagtacgccactacgcggtctatcgccaagtatccggtcggaatcgaggtgggaccccagccacaaggtgtgttgcgcgcggatatcctggaccagatgcgcaagatgatcaaacacgctctcgatttcatccaccatttcaatgagggcaaagaattccctccgtgcgcaatcgaagtctacaaaatcatcgagaaggtggattacccgcgtgacgaaaacggagaaattgcagcgatcatccacccaaatctgcaggaccaggattggaagccgcttcaccctggggacccaatgttcctgaccttggacggaaaaactatcccgttgggcggagactgcactgtgtacccagtgttcgtgaacgaagcggcgtactacgagaaaaaggaggcgttcgcaaaaactaccaagctgactctgaatgcgaagtcgatccggtgctgtctccac

SEQ ID NO: 294109 - protein, 292 aa, Artificial Sequence
  derived and/or modified sequence
MLLDRSGQGKVYGLIGRRRFQQMDVLEGLNLLITISGKRNKLRVYYLSWLRNKILHNDPEVEKKQGWTTVGDMEGCGHYRVVKYERIKFLVIALKSSVEVYAWAPKPYHKFMAFKSFADLPHRPLLVDLTVEEGQRLKVIYGSSAGFHAVDVDSGNSYDIYIPVHIQSQITPHAIIFLPNTDGMEMLLCYEDEGVYVNTYGRIIKDVVLQWGEMPTSVAYICSNQIMGWGEKAIEIRSVETGHLDGVFMHKRAQRLKFLCERNDKVFFASVRSGGSSQVYFMTLNRNCIMNW

SEQ ID NO: 294110 - protein, 135 aa, Artificial Sequence
  derived and/or modified sequence
MTPTPTAAWTPPPPLRPSAAAAGAQCRSCPFRGGCAPSTARTPPACMRPAGPCAPPTWPAPSTTTSTCTSRRAGCTASSASYSTLAAACSLRRSGVRWPPSSAYSTWAFASCCASSASCRCCCCCWAAGAWTSAW

SEQ ID NO: 294111 - protein, 289 aa, Artificial Sequence
  derived and/or modified sequence
MRNLKKAAKLPVMGMIPCFLKSPLGSDYTRITEDSFSKPYDGKWSKTMVGFGPEDDHFVAELTYNYGVGDYKLGNDFMGITLASSQAVSNARKLEWPLTEVAEGVFETEAPGGYKFYLQNRSLPQSDPVLKVTLAVSDLQKSLNYWCNLLGMKIYEKDEEKQRALLGYADNQCKLELQGVKGGVDHAAAFGRIAFSCPQKELPDLEDLMKRENQKILTPLVSLDTPGKATVQVVILADPDGHEICFVGDEAFRELSKMDPEGSKLLDDAMAADKSDEWFAKHNKPKASG

SEQ ID NO: 294112 - DNA, 870 bp, Artificial Sequence
  derived and/or modified sequence
atgagaaacctgaagaaggccgccaagctgcccgtgatgggcatgatcccctgcttcctgaagagccccctgggcagcgactacaccagaatcaccgaggacagcttcagcaagccctacgacggcaagtggagcaagaccatggtgggcttcggccccgaggacgaccacttcgtggccgagctgacctacaactacggcgtgggcgactacaagctgggcaacgacttcatgggcatcaccctggccagcagccaggccgtgagcaacgccagaaagctggagtggcccctgaccgaggtggccgagggcgtgttcgagaccgaggcccccggcggctacaagttctacctgcagaacagaagcctgccccagagcgaccccgtgctgaaggtgaccctggccgtgagcgacctgcagaagagcctgaactactggtgcaacctgctgggcatgaagatctacgagaaggacgaggagaagcagagagccctgctgggctacgccgacaaccagtgcaagctggagctgcagggcgtgaagggcggcgtggaccacgccgccgccttcggcagaatcgccttcagctgcccccagaaggagctgcccgacctggaggacctgatgaagagagagaaccagaagatcctgacccccctggtgagcctggacacccccggcaaggccaccgtgcaggtggtgatcctggccgaccccgacggccacgagatctgcttcgtgggcgacgaggccttcagagagctgagcaagatggaccccgagggcagcaagctgctggacgacgccatggccgccgacaagagcgacgagtggttcgccaagcacaacaagcccaaggccagcggctag

SEQ ID NO: 294113 - DNA, 870 bp, Artificial Sequence
  derived and/or modified sequence
atgcggaatctcaaaaaagccgctaagttgccagtgatgggcatgatcccatgtttcctgaaaagcccacttgggagtgactatacaagaatcacagaggattcattcagcaagccctacgatggaaagtggtccaagacaatggttgggtttggacctgaagatgaccattttgttgcagagttgacatataactacggtgttggcgattataaactgggaaatgatttcatggggattacattggcttcaagtcaggccgttagcaacgcccggaagcttgaatggcccctcaccgaggtggctgaaggagtgttcgagaccgaagcacctggcggatacaagttttacctccagaataggtctctgccccagagcgatcccgttcttaaggttacactggcggtctcagatctgcagaaatctctcaactattggtgcaatcttttgggcatgaagatctatgaaaaggacgaggaaaaacagagggctctgctgggatatgcagataatcagtgtaagctcgagctgcagggtgtgaagggcggggtagatcacgctgctgccttcggcaggatcgctttttcatgtccgcagaaagagctccctgatttggaggatttaatgaaacgagagaaccagaagatattaacccccctcgtgtctctcgatacaccgggcaaagccactgtacaggttgtcatcctcgccgaccctgatggacatgaaatctgcttcgtgggagacgaggccttcagggagctgagcaagatggaccccgaggggtcaaagttgttagatgacgccatggccgctgacaaaagcgacgaatggtttgcaaagcataataaacctaaggctagcgggtag

SEQ ID NO: 294114 - DNA, 1314 bp, Artificial Sequence
  derived and/or modified sequence
gcggcgggaatcatggctgctcgcagagctctgcacttcgtattcaaagtgggaaaccgcttccagacggcgcgtttctatcgggacgtcctggggatgaaggccctgcgcggtgttcagcttcaggagcgtggcgagttgccgttggggatcataggccttggagaagggcctaacacgattagtccccgcggtgtgcccacgcacgtcctttcatttaagccactcgtaaacgtttattgagccccgcccttgtggagcttaccgtctaccggaaaagacggttctgcggcatgaggaatttgaagaaggctgcaaagctgcctgtaatgggtatgataccttgtttcttaaaatctcctttaggctctgactacacccggataacagaagacagtttctcaaagccttatgatgggaaatggagtaaaacaatggtgggatttgggcctgaggatgatcattttgtcgcagaactgacttacaattatggcgtcggagactacaagcttggcaatgactttatgggaatcacgctcgcttctagccaggctgtcagcaacgccaggaagctggagtggccactgacggaagttgcagaaggtgtttttgaaaccgaggccccgggaggatataagttctatttgcagaatcgcagtctgcctcagtcagatcctgtattaaaagtaactctagcagtgtctgatcttcaaaagtccttgaactactggtgtaatctactgggaatgaaaatttatgaaaaagatgaagaaaagcaaagggctttgctgggctatgctgataaccagtgtaagctggagctacagggcgtcaagggtggggtggaccatgcagcagcttttggaagaattgccttctcttgcccccagaaagagttgccagacttagaagacttgatgaaaagggagaaccagaagattctgactcccctggtgagcctggacaccccagggaaagcaacagtacaggtggtcattctggccgaccctgacggacatgaaatttgctttgtcggggatgaagcatttcgagaactttctaagatggatccagagggaagcaaattgttggatgatgcaatggcagcagataaaagtgacgagtggtttgccaaacacaataaacccaaagcttcaggttaacggaagacatgatgcagagcaagcctctgtgattcctgcccagcacctgtgaggcctgacgtgtcagttcccaataaatgctcttctgatttgtttcccgtacaggcaaggaggcttgggtagtgcagatttgtgtatttcaatctttgaa

SEQ ID NO: 294115 - DNA, 870 bp, Artificial Sequence
  derived and/or modified sequence
atgaggaacctgaagaaggccgccaagctgcctgtgatgggcatgatcccctgcttcctgaagagccccctgggcagtgactacacccgcatcacagaagattccttcagcaagccctatgatggcaagtggagcaagaccatggtgggctttggaccagaagatgaccactttgtggccgagctgacctacaactacggcgtgggggactacaagctgggcaatgacttcatgggcatcaccctggccagcagccaggccgtgtccaatgccaggaagctggagtggcccctgacagaggtggccgagggcgtgtttgaaacagaggcccctgggggctacaagttctacctgcagaacagaagcctgccccagagcgaccctgtgctgaaggtgaccctggccgtgtctgacctgcagaagagcctgaactactggtgcaacctgctgggcatgaagatctatgagaaggatgaggagaagcagagggccctgctgggctatgctgacaaccagtgcaagctggagctgcagggcgtgaagggcggcgtggaccatgctgctgccttcggcagaattgccttcagctgcccccagaaggagctgcctgacctggaggacctgatgaagcgggagaaccagaagatcctgacccccctggtgtccctggacacccctgggaaggccaccgtgcaggtggtgatcctggccgaccctgatggccacgagatctgctttgtgggagatgaggccttccgggagctgagcaagatggaccctgagggcagcaagctgctggatgatgccatggctgctgacaagagtgatgagtggtttgccaagcacaacaagcccaaggccagcggctag

SEQ ID NO: 294116 - DNA, 870 bp, Artificial Sequence
  derived and/or modified sequence
atgcggaacctgaagaaggccgccaagctgcccgtgatgggcatgattccttgctttttgaagtccccgctcggatctgactacactagaataacggaagacagcttctctaagccctatgacggcaaatggtctaaaacaatggtcggcttcggacctgaagatgatcacttcgtggctgagctgacatacaattatggagtcggggattacaagctggggaacgatttcatgggaatcactctcgcctccagccaagccgtatcaaacgcccgcaagttggaatggccccttactgaagttgctgagggagtgttcgagactgaggccccgggaggatataagttttatttacaaaataggagcctgcctcagagcgacccagttttgaaggtcacgttggccgtgagcgacttgcaaaaatccctgaactattggtgcaacttactgggcatgaagatctatgagaaagatgaggagaagcagagagcactgttgggctatgccgacaatcagtgtaagttggagttacagggagttaaagggggagtagaccatgcagctgcatttggcagaattgctttctcgtgtcctcagaaagaactgccggatcttgaggatttgatgaaaagggagaaccaaaaaatcctgacccctctagtcagcctcgacacacccggaaaggcaaccgtgcaggtagttatccttgctgatcccgacggccacgagatatgtttcgtgggcgacgaagcattccgagagcttagcaaaatggatcctgaaggttccaaactgctcgacgacgctatggccgcggacaagagcgatgagtggtttgcaaaacataacaagcctaaagcgtcggggtag

SEQ ID NO: 294117 - DNA, 870 bp, Artificial Sequence
  derived and/or modified sequence
atgcgcaacctaaagaaagcagcgaagctgcccgtcatgggcatgataccctgctttctgaaatcccccctgggctcggactataccaggataacagaggatagcttttcaaaaccatatgacggaaagtggagtaaaacgatggtgggcttcggccctgaagatgaccactttgtggcagaactgacatacaactatggcgtcggcgactataaactgggcaacgatttcatgggcattaccttagcttcctcacaggccgtttccaatgctagaaaacttgagtggcccttgaccgaagtcgccgagggagtgtttgaaacggaggcccctgggggatacaagttctacctccagaatagaagcctgccccagagtgatccagttttaaaagtcacgttggcagtgtccgacctccagaagtctctcaattactggtgcaacttactcggtatgaaaatatatgagaaggatgaggaaaagcagcgggctctgttaggttatgcagacaaccaatgtaagttagaactgcagggcgtgaagggaggcgtggaccatgcagccgctttcggcaggatcgccttttcatgtccacagaaagagctgcctgacttggaggatctgatgaagagagagaatcagaaaatcctgaccccacttgtgagcttagacactcctggcaaggccactgttcaggtggtgattctggctgaccctgatggccacgaaatctgcttcgttggcgacgaagctttccgcgaactgagtaaaatggacccggaagggtcaaaactgcttgacgatgctatggccgcagacaagtctgatgaatggtttgccaagcataacaagcctaaggcttcaggatag

SEQ ID NO: 294118 - protein, 266 aa, Artificial Sequence
  derived and/or modified sequence
  misc_feature (1)..(1): Xaa can be any naturally occurring amino acid
XDFSLGVPSWWCLICFNIGPSVGPSQPDPNRFDRDRLFNAVSRGVPEDLAGLPEYLSKTSKYLTDSEYTEGSTGKTCLMKAVLNLKDGVNACILPLLQIDRDSGNPQPLVNAQCTDDYYRGHSALHIAIEKRSLQCVKLLVENGANVHARACGRFFQKGQGTCFYFGELPLSLAACTKQWDVVSYLLENPHQPASLQATDSQGNTVLHALVMISDNSAENIALVTSMYDGLLQAGARLCPTVQLEDIRNLQDLTPLKLAAKEGKIE

SEQ ID NO: 294119 - DNA, 2746 bp, Artificial Sequence
  derived and/or modified sequence
acagctcggttccagcgagggctccgcccacccgcgggctccgcagaggagcagaggttgggcggccgcctcggttaactccgctgcagcccaaagcacgggaatcgcgggacagacaaacgagcggagggaagatacctagaagccaggaaaccgcgagctgcagtccaacttggccggaagctgcggagaggctcagccaccggaagtcagtggagggttcggccggacgctctagaatcccggaggaccgggatctctgtggttggccgtgacgggcaccctctaccggggatgacacattcccagagctcctgggaccaagcaaatggcggacacaattccctgggcggaaggggacttcgggagccagtagccaagctacgtggtcctggacctgatggaaagcgacctgcaccagatcatccactcctcacagcccctcacactggaacacgtgcgctacttcctgtaccaactgctgcggggcctgaagtacatgcactcggctcaggtcatccaccgtgacctgaagccctccaacctattggtgaatgagaactgtgagctcaagattggtgactttggtatggctcgtggcctgtgcacctcgcccgctgaacatcagtacttcatgactgagtatgtggccacgcgctggtaccgtgcgcccgagctcatgctctctttgcatgagtatacacaggctattgacctctggtctgtgggctgcatctttggtgagatgctggcccggcgccagctcttcccaggcaaaaactatgtacaccagctacagctcatcatgatggtgctgggtaccccatcaccagccgtgattcaggctgtgggggctgagagggtgcgggcctatatccagagcttgccaccacgccagcctgtgccctgggagacagtgtacccaggtgccgaccgccaggccctatcactgctgggtcgcatgctgcgttttgagcccagcgctcgcatctcagcagctgctgcccttcgccaccctttcctggccaagtaccatgatcctgatgatgagcctgactgtgccccgccctttgactttgcctttgaccgcgaagccctcactcgggagcgcattaaggaggccattgtggctgaaattgaggacttccatgcaaggcgtgagggcatccgccaacagatccgcttccagccttctctacagcctgtggctagtgagcctggctgtccagatgttgaaatgcccagtccctgggctcccagtggggactgtgccatggagtctccaccaccagccccgccaccatgccccggccctgcacctgacaccattgatctgaccctgcagccacctccaccagtcagtgagcctgccccaccaaagaaagatggtgccatctcagacaatactaaggctgcccttaaagctgccctgctcaagtctttgaggagccggctcagagatggccccagcgcacccctggaggctcctgagcctcggaagccggtgacagcccaggagcgccagcgggagcgggaggagaagcggcggaggcggcaagaacgagccaaggagcgggagaaacggcggcaggagcgggagcgaaaggaacggggggctggggcctctgggggcccctccactgaccccttggctggactagtgctcagtgacaatgacagaagcctgttggaacgctggactcgaatggcccggcccgcagccccagccctcacctctgtgccggcccctgccccagcgccaacgccaaccccaaccccagtccaacctaccagtcctcctcctggccctgtagcccagcccactggcccgcaaccacaatctgcgggctctacctctggccctgtaccccagcctgcctgcccaccccctggccctgcaccccaccccactggccctcctgggcccatccctgtccccgcgccaccccagattgccacctccaccagcctcctggctgcccagtcacttgtgccaccccctgggctgcctggctccagcaccccaggagttttgccttacttcccacctggcctgccgcccccagacgccgggggagcccctcagtcttccatgtcagagtcacctgatgtcaaccttgtgacccagcagctatctaagtcacaggtggaggaccccctgccccctgtgttctcaggcacaccaaagggcagtggggctggctacggtgttggctttgacctggaggaattcttaaaccagtctttcgacatgggcgtggctgatgggccacaggatggccaggcagattcagcctctctctcagcctccctgcttgctgactggctcgaaggccatggcatgaaccctgccgatattgagtccctgcagcgtgagatccagatggactccccaatgctgctggctgacctgcctgacctccaggacccctgaggcccccagcctgtgccttgctgccacagtagacctagttccaggatccatgggagcattctcaaaggctttagccctggacccagcaggtgaggctcggcttggattattctgcaggttcatctcagacccacctttcagccttaagcagccacctgagccaccaccgagccatggcaggatcgggagaccccaactccccctgaacaatccttttcagtattatatttttattattattatgttattattacactgtctttttgccatcaaaatgaggcctgtgaaatacaaggttcccttctgcacctg

SEQ ID NO: 294120 - protein, 214 aa, Artificial Sequence
  derived and/or modified sequence
LMPACLPGKHTGGHLTATNLALSALNLAECAGDAVSVATLAEIYVAAALRVKTSLPRALHFLTRFFLSSARQACLAQSGSVPPAMQWLCHPVGHRFFVDGDWSVLSTPWESLYSLAGNPVDPLAQVTQLFREHLLERALNCVTQPNPSPGSADGDKEFSDALGYLQLLNSCSDAAGAPAYSFSISSSMATTTGDPCPGQLCTPSRLPGPCWAVP

SEQ ID NO: 294121 - DNA, 2682 bp, Artificial Sequence
  derived and/or modified sequence
atgaagaccgacggcgccaccgtgaaggccgccggcctgagccccctggtgagcggcaccaccgtgcagaccggccccctgcccaccctggtgagcggcggcaccatcctggccaccgtgcccctggtggtggacgccgagaagctgcccatcaacagactggccgccggcagcaaggcccccgccagcgcccagagcagaggcgagaagagaaccgcccacaacgccatcgagaagagatacagaagcagcatcaacgacaagatcatcgagctgaaggacctggtggtgggcaccgaggccaagctgaacaagagcgccgtgctgagaaaggccatcgactacatcagattcctgcagcacagcaaccagaagctgaagcaggagaacctgagcctgagaaccgccgtgcacaagagcaagagcctgaaggacctggtgagcgcctgcggcagcggcggcaacaccgacgtgctgatggagggcgtgaagaccgaggtggaggacaccctgacccccccccccagcgacgccggcagccccttccagagcagccccctgagcctgggcagcagaggcagcggcagcggcggcagcggcagcgacagcgagcccgacagccccgtgttcgaggacagcaaggccaagcccgagcagagacccagcctgcacagcagaggcatgctggacagaagcagactggccctgtgcaccctggtgttcctgtgcctgagctgcaaccccctggccagcctgctgggcgccagaggcctgcccagccccagcgacaccaccagcgtgtaccacagccccggcagaaacgtgctgggcaccgagagcagagacggccccggctgggcccagtggctgctgccccccgtggtgtggctgctgaacggcctgctggtgctggtgagcctggtgctgctgttcgtgtacggcgagcccgtgaccagaccccacagcggccccgccgtgtacttctggagacacagaaagcaggccgacctggacctggccagaggcgacttcgcccaggccgcccagcagctgtggctggccctgagagccctgggcagacccctgcccaccagccacctggacctggcctgcagcctgctgtggaacctgatcagacacctgctgcagagactgtgggtgggcagatggctggccggcagagccggcggcctgcagcaggactgcgccctgagagtggacgccagcgccagcgccagagacgccgccctggtgtaccacaagctgcaccagctgcacaccatgggcaagcacaccggcggccacctgaccgccaccaacctggccctgagcgccctgaacctggccgagtgcgccggcgacgccgtgagcgtggccaccctggccgagatctacgtggccgccgccctgagagtgaagaccagcctgcccagagccctgcacttcctgaccagattcttcctgagcagcgccagacaggcctgcctggcccagagcggcagcgtgccccccgccatgcagtggctgtgccaccccgtgggccacagattcttcgtggacggcgactggagcgtgctgagcaccccctgggagagcctgtacagcctggccggcaaccccgtggaccccctggcccaggtgacccagctgttcagagagcacctgctggagagagccctgaactgcgtgacccagcccaaccccagccccggcagcgccgacggcgacaaggagttcagcgacgccctgggctacctgcagctgctgaacagctgcagcgacgccgccggcgcccccgcctacagcttcagcatcagcagcagcatggccaccaccaccggcgtggaccccgtggccaagtggtgggccagcctgaccgccgtggtgatccactggctgagaagagacgaggaggccgccgagagactgtgccccctggtggagcacctgcccagagtgctgcaggagagcgagagacccctgcccagagccgccctgcacagcttcaaggccgccagagccctgctgggctgcgccaaggccgagagcggccccgccagcctgaccatctgcgagaaggccagcggctacctgcaggacagcctggccaccacccccgccagcagcagcatcgacaaggccgtgcagctgttcctgtgcgacctgctgctggtggtgagaaccagcctgtggagacagcagcagccccccgcccccgcccccgccgcccagggcaccagcagcagaccccaggccagcgccctggagctgagaggcttccagagagacctgagcagcctgagaagactggcccagagcttcagacccgccatgagaagagtgttcctgcacgaggccaccgccagactgatggccggcgccagccccaccagaacccaccagctgctggacagaagcctgagaagaagagccggccccggcggcaagggcggcgccgtggccgagctggagcccagacccaccagaagagagcacgccgaggccctgctgctggccagctgctacctgccccccggcttcctgagcgcccccggccagagagtgggcatgctggccgaggccgccagaaccctggagaagctgggcgacagaagactgctgcacgactgccagcagatgctgatgagactgggcggcggcaccaccgtgaccagcagctag

SEQ ID NO: 294122 - DNA, 2955 bp, Artificial Sequence
  derived and/or modified sequence
atggactgcaccttcgaggacatgctgcagctgatcaacaaccaggacagcgacttccccggcctgttcgaccccccctacgccggcagcggcgccggcggcaccgaccccgccagccccgacaccagcagccccggcagcctgagccccccccccgccaccctgagcagcagcctggaggccttcctgagcggcccccaggccgcccccagccccctgagccccccccagcccgcccccacccccctgaagatgtaccccagcatgcccgccttcagccccggccccggcatcaaggaggagagcgtgcccctgagcatcctgcagacccccaccccccagcccctgcccgtgcccaccctggtgagcggcggcaccatcctggccaccgtgcccctggtggtggacgccgagaagctgcccatcaacagactggccgccggcagcaaggcccccgccagcgcccagagcagaggcgagaagagaaccgcccacaacgccatcgagaagagatacagaagcagcatcaacgacaagatcatcgagctgaaggacctggtggtgggcaccgaggccaagctgaacaagagcgccgtgctgagaaaggccatcgactacatcagattcctgcagcacagcaaccagaagctgaagcaggagaacctgagcctgagaaccgccgtgcacaagagcaagagcctgaaggacctggtgagcgcctgcggcagcggcggcaacaccgacgtgctgatggagggcgtgaagaccgaggtggaggacaccctgacccccccccccagcgacgccggcagccccttccagagcagccccctgagcctgggcagcagaggcagcggcagcggcggcagcggcagcgacagcgagcccgacagccccgtgttcgaggacagcaaggccaagcccgagcagagacccagcctgcacagcagaggcatgctggacagaagcagactggccctgtgcaccctggtgttcctgtgcctgagctgcaaccccctggccagcctgctgggcgccagaggcctgcccagccccagcgacaccaccagcgtgtaccacagccccggcagaaacgtgctgggcaccgagagcagagacggccccggctgggcccagtggctgctgccccccgtggtgtggctgctgaacggcctgctggtgctggtgagcctggtgctgctgttcgtgtacggcgagcccgtgaccagaccccacagcggccccgccgtgtacttctggagacacagaaagcaggccgacctggacctggccagaggcgacttcgcccaggccgcccagcagctgtggctggccctgagagccctgggcagacccctgcccaccagccacctggacctggcctgcagcctgctgtggaacctgatcagacacctgctgcagagactgtgggtgggcagatggctggccggcagagccggcggcctgcagcaggactgcgccctgagagtggacgccagcgccagcgccagagacgccgccctggtgtaccacaagctgcaccagctgcacaccatgggcaagcacaccggcggccacctgaccgccaccaacctggccctgagcgccctgaacctggccgagtgcgccggcgacgccgtgagcgtggccaccctggccgagatctacgtggccgccgccctgagagtgaagaccagcctgcccagagccctgcacttcctgaccagattcttcctgagcagcgccagacaggcctgcctggcccagagcggcagcgtgccccccgccatgcagtggctgtgccaccccgtgggccacagattcttcgtggacggcgactggagcgtgctgagcaccccctgggagagcctgtacagcctggccggcaaccccgtggaccccctggcccaggtgacccagctgttcagagagcacctgctggagagagccctgaactgcgtgacccagcccaaccccagccccggcagcgccgacggcgacaaggagttcagcgacgccctgggctacctgcagctgctgaacagctgcagcgacgccgccggcgcccccgcctacagcttcagcatcagcagcagcatggccaccaccaccggcgtggaccccgtggccaagtggtgggccagcctgaccgccgtggtgatccactggctgagaagagacgaggaggccgccgagagactgtgccccctggtggagcacctgcccagagtgctgcaggagagcgagagacccctgcccagagccgccctgcacagcttcaaggccgccagagccctgctgggctgcgccaaggccgagagcggccccgccagcctgaccatctgcgagaaggccagcggctacctgcaggacagcctggccaccacccccgccagcagcagcatcgacaaggccgtgcagctgttcctgtgcgacctgctgctggtggtgagaaccagcctgtggagacagcagcagccccccgcccccgcccccgccgcccagggcaccagcagcagaccccaggccagcgccctggagctgagaggcttccagagagacctgagcagcctgagaagactggcccagagcttcagacccgccatgagaagagtgttcctgcacgaggccaccgccagactgatggccggcgccagccccaccagaacccaccagctgctggacagaagcctgagaagaagagccggccccggcggcaagggcggcgccgtggccgagctggagcccagacccaccagaagagagcacgccgaggccctgctgctggccagctgctacctgccccccggcttcctgagcgcccccggccagagagtgggcatgctggccgaggccgccagaaccctggagaagctgggcgacagaagactgctgcacgactgccagcagatgctgatgagactgggcggcggcaccaccgtgaccagcagctag

SEQ ID NO: 294123 - DNA, 3222 bp, Artificial Sequence
  derived and/or modified sequence
atggactgcaccttcgaggacatgctgcagctgatcaacaaccaggacagcgacttccccggcctgttcgaccccccccagcccgcccccacccccctgaagatgtaccccagcatgcccgccttcagccccggccccggcatcaaggaggagagcgtgcccctgagcatcctgcagacccccaccccccagcccctgcccggcgccctgctgccccagagcttccccgcccccgcccccccccagttcagcagcacccccgtgctgggctaccccagcccccccggcggcttcagcaccggcagcccccccggcaacacccagcagcccctgcccggcctgcccctggccagcccccccggcgtgccccccgtgagcctgcacacccaggtgcagagcgtggtgccccagcagctgctgaccgtgaccgccgcccccaccgccgcccccgtgaccaccaccgtgaccagccagatccagcaggtgcccgtgctgctgcagccccacttcatcaaggccgacagcctgctgctgaccgccatgaagaccgacggcgccaccgtgaaggccgccggcctgagccccctggtgagcggcaccaccgtgcagaccggccccctgcccaccctggtgagcggcggcaccatcctggccaccgtgcccctggtggtggacgccgagaagctgcccatcaacagactggccgccggcagcaaggcccccgccagcgcccagagcagaggcgagaagagaaccgcccacaacgccatcgagaagagatacagaagcagcatcaacgacaagatcatcgagctgaaggacctggtggtgggcaccgaggccaagctgaacaagagcgccgtgctgagaaaggccatcgactacatcagattcctgcagcacagcaaccagaagctgaagcaggagaacctgagcctgagaaccgccgtgcacaagagcaagagcctgaaggacctggtgagcgcctgcggcagcggcggcaacaccgacgtgctgatggagggcgtgaagaccgaggtggaggacaccctgacccccccccccagcgacgccggcagccccttccagagcagccccctgagcctgggcagcagaggcagcggcagcggcggcagcggcagcgacagcgagcccgacagccccgtgttcgaggacagcaaggccaagcccgagcagagacccagcctgcacagcagaggcatgctggacagaagcagactggccctgtgcaccctggtgttcctgtgcctgagctgcaaccccctggccagcctgctgggcgccagaggcctgcccagccccagcgacaccaccagcgtgtaccacagccccggcagaaacgtgctgggcaccgagagcagagacggccccggctgggcccagtggctgctgccccccgtggtgtggctgctgaacggcctgctggtgctggtgagcctggtgctgctgttcgtgtacggcgagcccgtgaccagaccccacagcggccccgccgtgtacttctggagacacagaaagcaggccgacctggacctggccagaggcgacttcgcccaggccgcccagcagctgtggctggccctgagagccctgggcagacccctgcccaccagccacctggacctggcctgcagcctgctgtggaacctgatcagacacctgctgcagagactgtgggtgggcagatggctggccggcagagccggcggcctgcagcaggactgcgccctgagagtggacgccagcgccagcgccagagacgccgccctggtgtaccacaagctgcaccagctgcacaccatgggcaagcacaccggcggccacctgaccgccaccaacctggccctgagcgccctgaacctggccgagtgcgccggcgacgccgtgagcgtggccaccctggccgagatctacgtggccgccgccctgagagtgaagaccagcctgcccagagccctgcacttcctgaccagattcttcctgagcagcgccagacaggcctgcctggcccagagcggcagcgtgccccccgccatgcagtggctgtgccaccccgtgggccacagattcttcgtggacggcgactggagcgtgctgagcaccccctgggagagcctgtacagcctggccggcaaccccgtggaccccctggcccaggtgacccagctgttcagagagcacctgctggagagagccctgaactgcgtgacccagcccaaccccagccccggcagcgccgacggcgacaaggagttcagcgacgccctgggctacctgcagctgctgaacagctgcagcgacgccgccggcgcccccgcctacagcttcagcatcagcagcagcatggccaccaccaccggcgtggaccccgtggccaagtggtgggccagcctgaccgccgtggtgatccactggctgagaagagacgaggaggccgccgagagactgtgccccctggtggagcacctgcccagagtgctgcaggagagcgagagacccctgcccagagccgccctgcacagcttcaaggccgccagagccctgctgggctgcgccaaggccgagagcggccccgccagcctgaccatctgcgagaaggccagcggctacctgcaggacagcctggccaccacccccgccagcagcagcatcgacaaggccgtgcagctgttcctgtgcgacctgctgctggtggtgagaaccagcctgtggagacagcagcagccccccgcccccgcccccgccgcccagggcaccagcagcagaccccaggccagcgccctggagctgagaggcttccagagagacctgagcagcctgagaagactggcccagagcttcagacccgccatgagaagagtgttcctgcacgaggccaccgccagactgatggccggcgccagccccaccagaacccaccagctgctggacagaagcctgagaagaagagccggccccggcggcaagggcggcgccgtggccgagctggagcccagacccaccagaagagagcacgccgaggccctgctgctggccagctgctacctgccccccggcttcctgagcgcccccggccagagagtgggcatgctggccgaggccgccagaaccctggagaagctgggcgacagaagactgctgcacgactgccagcagatgctgatgagactgggcggcggcaccaccgtgaccagcagctag

SEQ ID NO: 294124 - DNA, 2682 bp, Artificial Sequence
  derived and/or modified sequence
atgaaaacagatggagccacagtcaaggccgcgggcttatcacctctagtttccgggaccacagttcagactggacccctccctactttggtgagcggagggactatcctggctacagtccccttagtggtggacgcggagaagttaccaatcaataggctcgcagcaggaagtaaagctcctgcctccgctcagagccgaggcgaaaaaaggacagcacacaacgcaatcgagaagcggtatcggtcttctatcaatgacaagatcatcgagcttaaagatttggtggtgggtacagaagccaaactcaataaatcggcggtgctccgaaaagctatagattacattcggttcctccagcacagcaatcagaaactcaagcaagaaaatctgtccctgagaacagctgttcataagagcaaatccttaaaggatctggtgtcggcgtgtggttctgggggtaataccgatgtgttaatggagggagtgaagacagaggtcgaggacacacttaccccgccaccatctgacgccggatctcccttccaatcctctcccttgtcacttggctcccgggggagcggtagtggagggagcggctctgactcagagcccgactcccccgtttttgaagacagtaaggctaaacctgagcagagacctagtcttcattcgcgtggtatgttggaccgcagccgcttagcgctctgtactttagtttttctctgcctttcttgcaatccgctggcctctctcctgggtgccaggggcctgcccagcccatccgatacgacttccgtctaccactctccaggaagaaatgtgttaggcactgagagtagagacggcccagggtgggctcagtggctgcttcccccagttgtctggctgctaaatggcttgcttgtcctcgtctccctggtgctcctctttgtctacggcgaacctgtcactcgtcctcattccgggccggctgtttacttctggcggcaccgtaagcaagctgaccttgacctagctcggggtgacttcgcccaggctgcccagcagttgtggctggcccttcgcgccctaggacgacctctcccgacatcccacttggacttagcgtgttcactgctgtggaatcttatccgtcatctgcttcagcgcttatgggtgggccgctggctggctggccgagcgggcggcctgcaacaggattgcgcccttagagttgacgcctcggccagtgcccgagatgccgccctggtctaccacaagctgcatcaattgcacacaatgggtaagcacacaggtggacatctgacggccacgaatctggctctctctgcactgaacctcgccgagtgcgcaggagatgccgtttctgtggccacactcgccgagatctatgttgcagccgccctgagagtaaagaccagcctgccacgcgccctgcactttctgacccggttctttctgagtagtgctagacaggcatgtctggctcagagcggatcagtaccaccggcaatgcagtggttatgtcaccccgtggggcatcgctttttcgtcgacggcgattggagcgtgctcagcacgccctgggaaagcttatatagcctggcgggaaaccccgtggatcctctggcacaggtgacccagctctttagagagcacctgctggaaagagcgttaaattgtgtgactcagcctaacccatcccctggatcagctgacggcgataaggagtttagcgatgcactcggatacctgcagcttctgaattcatgctccgatgctgccggggcccccgcctacagcttctctatctcttcctctatggctacaactaccggcgtggaccccgtcgctaaatggtgggcctcacttacagccgtcgttatacattggctcagacgggatgaggaagccgctgagaggttatgtccactggtggagcatctgccccgagtgctccaggagtcagagagaccactgccaagagccgctctgcactctttcaaggcggcaagggccctcctgggatgtgctaaagctgaatccggtccagcgagtctgaccatttgtgaaaaggcttctggttatctacaggactcactagctaccacacctgcttcttcatctattgacaaggcagtgcaattgtttctatgtgacttgctgctggtggtcagaacaagtctttggcgccagcaacagccccctgcccccgctccagctgcccaggggacaagtagccggccacaagctagtgcactggagctgagaggctttcagagggacctgtcttccctgcggaggctcgcacagtcctttcgacccgccatgcgtagagtgttcctccacgaggctactgcccgcctcatggccggcgcaagcccaacacgcacccaccagctgctagacagaagtttacggcgccgcgccgggcccggaggcaagggaggggcggtggcagaacttgagcccaggcctacccgccgggagcatgctgaagccctcctgctagccagttgctatcttcctcctgggttcctgtcagcccccggccagcgcgtgggaatgttggctgaggcagcgcgtactcttgagaagctgggggaccgcagactgctgcacgactgtcagcagatgcttatgcgtctgggaggaggtaccacggtgacttcctcttag

SEQ ID NO: 294125 - DNA, 2955 bp, Artificial Sequence
  derived and/or modified sequence
atggattgtacgtttgaagacatgctgcagctgataaataaccaagatagcgattttcccggtttattcgatcccccctacgctggaagtggagcaggtgggacagacccggctagcccagatacttcttctcccgggtctctgtcgcccccgccggccactctgagctcaagcctcgaggctttcttgtctggcccacaggccgcaccctcccccttatcccctccacagcccgcccccactcccttgaaaatgtacccatccatgccagcgttctctcctggtcccggaattaaagaagaaagtgttcctcttagtattctgcagacaccaaccccccagcctctgccagtgcctactctggtgtctggcgggactattctggctactgttcccctggtcgtggacgcagaaaaactgcctattaataggctggctgccgggtccaaagcacccgcctcagctcagtctagaggtgaaaaacgaaccgctcacaacgccatagaaaagcgctatcgcagcagcatcaatgacaagattatcgaattgaaagatctggtggtgggcactgaagccaaattgaacaagtcagctgttctacgcaaggccatcgactatatcaggttcctgcaacactccaaccagaaactgaagcaagaaaatctttctctgcgcacagctgtccataaaagcaaatctctgaaagatttagttagcgcctgtggcagtgggggcaacaccgacgtactgatggagggggtcaaaactgaggtcgaggacaccttaacccctcccccgagcgacgctggttcaccgtttcagtcctctccgctctctcttgggtccaggggaagcggatctggagggagcggatcagattcagagcctgatagtcccgtgtttgaagacagcaaagccaagcccgaacagaggccgtcgctacactcaagggggatgctggacagatctaggctcgcgttatgcacactggtgttcctctgcttgtcgtgtaatccccttgcctcgctcttgggagcaaggggtctcccttcgccctccgatacaacaagcgtttaccactctccagggcggaacgtgcttggcactgaatctagggacgggccaggttgggcccagtggttactccctccagtggtatggttattgaatggcctgctcgtcctggtgagccttgttctgctgttcgtgtacggcgagcctgtcacccgccctcacagtgggccggcagtgtacttctggagacacagaaaacaggcagacttggatctggcacgaggtgatttcgcacaggccgctcaacagctgtggttggcactgcgcgcactcggaagacccctgcccacaagccatttggacctggcctgttccctgctctggaatctgatccgacatcttctgcagaggctatgggtcggacgttggctagctggcagagcaggagggttgcagcaagattgcgcgttgagggtggatgcctctgcaagtgcacgggacgccgccctagtgtatcataaattgcatcaactgcacacgatgggcaaacacacgggagggcatctaacagcaactaacctggctttatccgcgttgaacctcgctgagtgtgccggagatgccgtgagtgtggctaccctcgcggagatttacgtggccgcagccctgcgagtgaagacttccctacctcgggcgctgcatttcctgactcgcttcttcctcagttcagcccggcaggcctgcctggctcagtctgggagcgttcccccagcaatgcagtggctgtgccacccggtgggacacagattcttcgtcgacggggactggtctgtactgtctaccccatgggagagcctctacagtttagctggaaatcctgtggatccactggcacaagtcacccaactctttagggagcatttactcgaacgggccctgaattgtgtgacacagcccaacccatcgcctggctctgcggacggagacaaggaattttctgacgcgctcggatatctacagttattgaacagttgttctgatgccgcaggcgccccagcctatagttttagcatctcctccagcatggcaaccacgactggtgtggatccggttgccaagtggtgggcctctctaaccgccgttgtgatccattggttaaggcgggatgaggaggcagccgaaagactttgcccattggtcgagcatctcccccgtgtcttacaggagtccgagaggccactgccgagagctgccctgcacagcttcaaggccgctagggctttgcttggctgcgccaaggccgaaagcgggcctgcatctctgaccatttgtgagaaagcatcagggtacctccaggactcgcttgcaaccaccccagcttcctcatcaattgacaaggccgtgcagctcttcttatgcgacctgctgctggtggtgcggacgagcctgtggcgtcaacagcagccacctgcccccgcccccgcagcccagggcacatctagccggccccaggcaagcgctttggagctgcggggcttccagcgggatcttagcagcctccggcggcttgcccagagcttcagaccagccatgcgaagagtgtttctgcatgaagccaccgctaggctgatggccggggcgtctcctactcgaactcaccagctgctggatcgatctctgcggcgtagggcaggacctgggggcaaaggtggcgcagtggccgaactggagcctcggccaacacgccgcgagcacgccgaggctctgttgctcgcctcctgttatctgccgcccggtttcctgagtgcccccggccagagagtgggcatgttggccgaggcagccaggaccctcgagaaactgggcgaccggaggctactgcatgactgccaacaaatgctgatgaggttgggagggggaaccactgtcacttcctcctag

SEQ ID NO: 294126 - DNA, 3222 bp, Artificial Sequence
  derived and/or modified sequence
atggactgcactttcgaagatatgcttcagcttattaacaaccaggatagcgacttcccaggcctttttgatccgccacagcctgctccaacacccttgaagatgtacccctcgatgccagccttctctcctgggcctggcatcaaggaagagtccgtgcccctgagcatactccagactcctacaccccagcccctgcccggggccctcctgccccaaagcttccctgcaccagcaccacctcaatttagtagtacccccgtgctggggtatccatcaccgcctggaggtttcagcacaggttccccccccggtaacactcagcaacctctacccgggctgccacttgcttcccctcccggggttcctcctgtgtcacttcatactcaggtgcagtcagtggtgccgcaacagttgctgacagtcaccgcagcgccgacggctgctcccgtgacgaccaccgtgaccagtcaaatccagcaggttcccgttctcctgcagccccacttcattaaagccgattccctcctactgactgctatgaaaacagacggggccaccgtaaaagctgccgggttgagtccactggtcagcgggactaccgtgcagactgggcccctgccgacacttgtctcggggggaactatcttggctacagtccctttggtggttgatgctgaaaagctgccaattaatagactcgccgccggatctaaggccccagccagcgcacaaagccgcggagaaaaacggacggctcacaacgccatcgagaaacggtacaggtcttccatcaacgataagatcattgagctaaaggatcttgtggttggcactgaagccaaacttaataagagtgctgtgcttcgtaaggctattgactatatccggtttctgcaacactcaaatcagaagctgaagcaggaaaacctgagtctaaggaccgcggtgcataagtccaaatccctgaaagatctggtgtcggcgtgcggttctggaggcaataccgacgtgctcatggagggggtgaagacagaggtcgaagatacgctgacacctccaccaagcgacgcaggatcgccctttcagtctagcccgctttctctgggctccaggggctctggcagcgggggttccggaagcgactccgagccagatagtccagtctttgaggattccaaggcaaaacccgagcagcgcccgtctctacattcacggggtatgctcgaccgttcacgacttgccttatgcaccctagtgttcctgtgcctgagttgtaatcctctagcgtcactcctcggggcacgtggcctgccatctccaagtgacaccacctctgtctatcattcgcctgggcgcaatgttctcggcacagagagccgggatgggcccggatgggcacagtggctgttacccccggttgtttggttgctaaacggattattagtcctggtgtctctggtcctcctatttgtgtatggagaacccgttacaaggccccattccgggcccgctgtctacttttggcggcataggaagcaagccgacctcgacctggcccggggtgattttgcacaggctgcgcaacagctgtggctggcactgcgggcgctaggccgccctcttccaacaagccatttggacctggcatgctccctcctgtggaacctgatcagacacttattacagaggctctgggtgggaaggtggctggctgggagggccggaggtctgcagcaagactgcgccctgcgggtggacgcgtccgcatccgctcgggacgctgcattggtctaccataagctgcaccagcttcacactatgggaaagcacaccggcggccacctgacagctactaacctagccctgtcagccctgaacctggccgagtgtgcaggagatgccgttagtgtggcaacgctcgcagaaatatacgtggcagcagccctgcgtgtgaaaacttcccttccaagggcgctgcacttcctgactagatttttcctttcatccgcgaggcaggcctgtcttgcacagagcggctccgttcctcctgcaatgcagtggttgtgtcatccagtgggccataggtttttcgtggatggggactggagcgtgctgagcacaccctgggagagcctgtattctctggccggcaatccagtcgacccactggctcaagtgacgcagctatttcgggagcaccttctggagcgggcactgaattgtgtcacgcaaccgaatccaagtccaggatccgcggatggcgataaagagttttcggatgccttaggctacctacagctcctaaacagctgctctgatgcagccggtgctcctgcttacagcttctccatctcttcttccatggcaacgaccaccggagtggatccggtcgctaaatggtgggcctcactgaccgccgtagtgatccattggcttagaagggatgaggaggccgctgaacgtctgtgcccccttgtggagcacctgccccgcgtgctgcaggagagcgagagacctcttccaagagccgcattgcattctttcaaggccgctagagccctgcttggatgcgccaaagccgaatctgggcccgctagcctgacaatctgcgagaaggcatccgggtacctgcaagactccctagcaaccaccccggccagttcatccattgacaaggctgtccagctcttcctctgtgacctcctgctggttgtgagaacatccctatggaggcaacagcaaccacctgccccagcccccgctgcacaggggacctcatcccggccacaggcgtcagcgcttgagctgcgcggttttcagagggacctgtcctctctgcgccggcttgcacagtcctttagacctgcgatgagaagggtgttcctgcacgaagccacagcaagactgatggccggtgcctccccaacacggacccaccagttgttagatcgcagtctgcggagaagggccggacccggaggaaaaggcggcgcagtggctgagcttgagccgagacctacacggcgcgaacatgctgaggctttgcttctcgctagctgttatctaccccctggcttcctgtcagcccccgggcagagagtgggcatgctggccgaagcggccagaaccctggaaaaactcggcgaccgcaggctcctccacgactgtcagcagatgctgatgcggttaggcggggggaccacagttaccagctcctag

SEQ ID NO: 294127 - DNA, 2682 bp, Artificial Sequence
  derived and/or modified sequence
atgaagacagatggagccaccgtgaaggctgctggcctgagccccctggtgtctggcaccaccgtgcagacaggccccctgcccaccctggtgtctgggggcaccatcctggccaccgtgcccctggtggtggatgctgagaagctgcccatcaaccggctggccgccggcagcaaggccccagccagcgcccagagcagaggagagaagaggacagcccacaatgccatcgagaagcgctaccgcagcagcatcaatgacaagatcatcgagctgaaggacctggtggtgggcacagaggccaagctgaacaagtctgctgtgctgaggaaggccatcgactacatccgcttcctgcagcacagcaaccagaagctgaagcaggagaacctgagcctgaggacagctgtgcacaagagcaagagcctgaaggacctggtgtctgcctgtggcagcggcggcaacacagatgtgctgatggagggcgtgaagacagaggtggaggacaccctgaccccaccacccagtgatgctggcagccccttccagagcagccccctgagcctgggcagccggggcagcggcagcggcggcagcggcagtgacagcgagccagacagccctgtgtttgaggacagcaaggccaagccagagcagaggcccagcctgcacagccggggcatgctggacaggagccggctggccctgtgcaccctggtgttcctgtgcctgagctgcaaccccctggccagcctgctgggcgcccggggcctgcccagccccagcgacaccacctctgtgtaccacagccctggaagaaatgtgctgggcacagagagcagagatggccctggctgggcccagtggctgctgccccctgtggtgtggctgctgaatggcctgctggtgctggtgtccctggtgctgctgtttgtgtatggagagcctgtgacccggccccacagcggccctgctgtgtacttctggaggcacaggaagcaggccgacctggacctggcccggggggactttgcccaggccgcccagcagctgtggctggccctgcgggccctgggccggcccctgcccaccagccacctggacctggcctgcagcctgctgtggaacctgatccgccacctgctgcagaggctgtgggtgggccgctggctggccggccgggccggcggcctgcagcaggactgtgccctgcgggtggatgccagcgccagcgccagagatgctgccctggtgtaccacaagctgcaccagctgcacaccatgggcaagcacactggaggccacctgacagccaccaacctggccctgagcgccctgaacctggccgagtgtgctggagatgctgtgtctgtggccaccctggccgagatctacgtggccgccgccctgcgggtgaagaccagcctgccccgggccctgcacttcctgacccgcttcttcctgagcagcgcccggcaggcctgcctggcccagagcggctctgtgcccccagccatgcagtggctgtgccaccctgtgggccaccgcttctttgtggatggagactggagcgtgctgagcaccccctgggagagcctgtacagcctggccggcaaccctgtggaccccctggcccaggtgacccagctgttccgggagcacctgctggagcgggccctgaactgtgtgacccagcccaaccccagccctggcagcgcagatggagacaaggagttcagtgatgccctgggctacctgcagctgctgaacagctgcagtgatgctgctggggccccagcctacagcttcagcatcagcagctccatggccaccaccactggagtggaccctgtggccaagtggtgggccagcctgacagctgtggtgatccactggctgcggagagatgaggaggccgctgagcggctgtgccccctggtggagcacctgccccgggtgctgcaggagagcgagcggcccctgccccgggccgccctgcacagcttcaaggccgcccgggccctgctgggctgtgccaaggccgagagcggccctgccagcctgaccatctgtgagaaggccagcggctacctgcaggacagcctggccaccaccccagccagcagcagcattgacaaggctgtgcagctgttcctgtgtgacctgctgctggtggtgaggaccagcctgtggaggcagcagcagcccccagccccagccccagctgcccagggcaccagcagccggccccaggccagcgccctggagctgcggggcttccagagggacctgagcagcctgcggcggctggcccagagcttccggcctgccatgagaagagtcttcctgcacgaggccacagcccggctgatggccggggccagccccaccaggacccaccagctgctggacaggagcctgcggaggagagctggccctgggggcaagggcggcgctgtggccgagctggagccccggcccacccggcgggagcacgccgaggccctgctgctggccagctgctacctgcccccaggcttcctgagcgcccctggccagagggtgggcatgctggccgaggccgcccggaccctggagaagctgggggaccggcggctgctgcatgactgccagcagatgctgatgaggctgggcggcggcaccaccgtgaccagcagctag

SEQ ID NO: 294128 - DNA, 2955 bp, Artificial Sequence
  derived and/or modified sequence
atggactgcacctttgaggacatgctgcagctgatcaacaaccaggacagcgacttccctggcctgtttgatcctccctatgccggcagcggggccggcggcacagatcctgccagcccagacaccagcagccctggcagcctgagccccccaccagccaccctgagcagcagcctggaggccttcctgagcggcccccaggccgcccccagccccctgagccccccccagcctgcccccacccccctgaagatgtaccccagcatgcctgccttcagccctggccctggcatcaaggaggagagcgtgcccctgagcatcctgcagacccccaccccccagcccctgcctgtgcccaccctggtgtctgggggcaccatcctggccaccgtgcccctggtggtggatgctgagaagctgcccatcaaccggctggccgccggcagcaaggccccagccagcgcccagagcagaggagagaagaggacagcccacaatgccatcgagaagcgctaccgcagcagcatcaatgacaagatcatcgagctgaaggacctggtggtgggcacagaggccaagctgaacaagtctgctgtgctgaggaaggccatcgactacatccgcttcctgcagcacagcaaccagaagctgaagcaggagaacctgagcctgaggacagctgtgcacaagagcaagagcctgaaggacctggtgtctgcctgtggcagcggcggcaacacagatgtgctgatggagggcgtgaagacagaggtggaggacaccctgaccccacctccttctgatgctggcagccccttccagagcagccccctgagcctgggcagccggggcagcggcagcggcggcagcggcagtgacagcgagccagacagccctgtgtttgaggacagcaaggccaagccagagcagaggcccagcctgcacagccggggcatgctggacaggagccggctggccctgtgcaccctggtgttcctgtgcctgagctgcaaccccctggccagcctgctgggcgcccggggcctgcccagccccagcgacaccacctctgtgtaccacagccctggaagaaatgtgctgggcacagagagcagagatggccctggctgggcccagtggctgctgccccctgtggtgtggctgctgaatggcctgctggtgctggtgtccctggtgctgctgtttgtgtatggagagcctgtgacccggccccacagcggccctgctgtgtacttctggaggcacaggaagcaggccgacctggacctggcccggggggactttgcccaggccgcccagcagctgtggctggccctgcgggccctgggccggcccctgcccaccagccacctggacctggcctgcagcctgctgtggaacctgatccgccacctgctgcagaggctgtgggtgggccgctggctggccggccgggccggcggcctgcagcaggactgtgccctgcgggtggatgccagcgccagcgccagagatgctgccctggtgtaccacaagctgcaccagctgcacaccatgggcaagcacactggaggccacctgacagccaccaacctggccctgagcgccctgaacctggctgaatgtgctggagatgctgtgtctgtggccaccctggccgagatctacgtggccgccgccctgcgggtgaagaccagcctgccccgggccctgcacttcctgacccgcttcttcctgagcagcgcccggcaggcctgcctggcccagagcggctctgtgcccccagccatgcagtggctgtgccaccctgtgggccaccgcttctttgtggatggagactggagcgtgctgagcaccccctgggagagcctgtacagcctggccggcaaccctgtggaccccctggcccaggtgacccagctgttccgggagcacctgctggagcgggccctgaactgtgtgacccagcccaaccccagccctggcagcgcagatggagacaaggagttcagtgatgccctgggctacctgcagctgctgaacagctgcagtgatgctgctggggccccagcctacagcttcagcatcagcagctccatggccaccaccaccggggtggaccctgtggccaagtggtgggccagcctgacagctgtggtgatccactggctgcggagagatgaggaggccgctgagcggctgtgccccctggtggagcacctgccccgggtgctgcaggagagcgagcggcccctgcccagggctgccctgcacagcttcaaggccgcccgggccctgctgggctgtgccaaggccgagagcggccctgccagcctgaccatctgtgagaaggccagcggctacctgcaggacagcctggccaccaccccagccagcagcagcattgacaaggctgtgcagctgttcctgtgtgacctgctgctggtggtgaggaccagcctgtggaggcagcagcagcccccagccccagccccagctgcccagggcaccagcagccggccccaggccagcgccctggagctgcggggcttccagagggacctgagcagcctgcggcggctggcccagagcttccggcctgccatgagaagagtcttcctgcacgaggccacagcccggctgatggccggggccagccccaccaggacccaccagctgctggacaggagcctgcggcggcgggccggccctgggggcaaaggaggagctgtggccgagctggagccccggcccacccggcgggagcacgccgaggccctgctgctggccagctgctacctgcccccaggcttcctgagcgcccctggccagagggtgggcatgctggccgaggccgcccggaccctggagaagctgggggaccggcggctgctgcatgactgccagcagatgctgatgaggctgggcggcggcaccaccgtgaccagcagctag

SEQ ID NO: 294129 - DNA, 3222 bp, Artificial Sequence
  derived and/or modified sequence
atggactgcacctttgaggacatgctgcagctgatcaacaaccaggacagcgacttccctggcctgtttgatcctccccagcctgcccccacccccctgaagatgtaccccagcatgcctgccttcagccctggccctggcatcaaggaggagagcgtgcccctgagcatcctgcagacccccaccccccagcccctgcccggggccctgctgccccagagcttccctgccccagccccaccccagttcagcagcacccctgtgctgggctaccccagccccccaggcggcttcagcacaggcagccccccaggcaacacccagcagcccctgcccggcctgcccctggccagccccccaggagtgccccctgtgtccctgcacacccaggtgcagagcgtggtgccccagcagctgctgactgtgacagctgcccccacagctgcccctgtgaccaccaccgtgaccagccagatccagcaggtgcctgtgctgctgcagccccacttcatcaaggctgacagcctgctgctgacagccatgaagacagatggagccaccgtgaaggctgctggcctgagccccctggtgtctggcaccaccgtgcagacaggccccctgcccaccctggtgtctgggggcaccatcctggccaccgtgcccctggtggtggatgctgagaagctgcccatcaaccggctggccgccggcagcaaggccccagccagcgcccagagcagaggagagaagaggacagcccacaatgccatcgagaagcgctaccgcagcagcatcaatgacaagatcatcgagctgaaggacctggtggtgggcacagaggccaagctgaacaagtctgctgtgctgaggaaggccatcgactacatccgcttcctgcagcacagcaaccagaagctgaagcaggagaacctgagcctgaggacagctgtgcacaagagcaagagcctgaaggacctggtgtctgcctgtggcagcggcggcaacacagatgtgctgatggagggcgtgaagacagaggtggaggacaccctgaccccaccacccagtgatgctggcagccccttccagagcagccccctgagcctgggcagccggggcagcggcagcggcggcagcggcagtgacagcgagccagacagccctgtgtttgaggacagcaaggccaagccagagcagaggcccagcctgcacagccggggcatgctggacaggagccggctggccctgtgcaccctggtgttcctgtgcctgagctgcaaccccctggccagcctgctgggcgcccggggcctgcccagccccagcgacaccacctctgtgtaccacagccctggaagaaatgtgctgggcacagagagcagagatggccctggctgggcccagtggctgctgccccctgtggtgtggctgctgaatggcctgctggtgctggtgtccctggtgctgctgtttgtgtatggagagcctgtgacccggccccacagcggccctgctgtgtacttctggaggcacaggaagcaggccgacctggacctggcccggggggactttgcccaggccgcccagcagctgtggctggccctgcgggccctgggccggcccctgcccaccagccacctggacctggcctgcagcctgctgtggaacctgatccgccacctgctgcagaggctgtgggtgggccgctggctggccggccgggccggcggcctgcagcaggactgtgccctgcgggtggatgccagcgccagcgccagagatgctgccctggtgtaccacaagctgcaccagctgcacaccatgggcaagcacactggaggccacctgacagccaccaacctggccctgagcgccctgaacctggccgagtgtgctggagatgctgtgtctgtggccaccctggccgagatctacgtggccgccgccctgcgggtgaagaccagcctgccccgggccctgcacttcctgacccgcttcttcctgagcagcgcccggcaggcctgcctggcccagagcggctctgtgcccccagccatgcagtggctgtgccaccctgtgggccaccgcttctttgtggatggagactggagcgtgctgagcaccccctgggagagcctgtacagcctggccggcaaccctgtggaccccctggcccaggtgacccagctgttccgggagcacctgctggagcgggccctgaactgtgtgacccagcccaaccccagccctggcagcgcagatggagacaaggagttcagtgatgccctgggctacctgcagctgctgaacagctgcagtgatgctgctggggccccagcctacagcttcagcatcagcagctccatggccaccaccactggagtggaccctgtggccaagtggtgggccagcctgacagctgtggtgatccactggctgcggagagatgaggaggccgctgagcggctgtgccccctggtggagcacctgccccgggtgctgcaggagagcgagcggcccctgccccgggccgccctgcacagcttcaaggccgcccgggccctgctgggctgtgccaaggccgagagcggccctgccagcctgaccatctgtgagaaggccagcggctacctgcaggacagcctggccaccaccccagccagcagcagcattgacaaggctgtgcagctgttcctgtgtgacctgctgctggtggtgaggaccagcctgtggaggcagcagcagcccccagccccagccccagctgcccagggcaccagcagccggccccaggccagcgccctggagctgcggggcttccagagggacctgagcagcctgcggcggctggcccagagcttccggcctgccatgagaagagtcttcctgcacgaggccacagcccggctgatggccggggccagccccaccaggacccaccagctgctggacaggagcctgcggaggagagctggccctgggggcaagggcggcgctgtggccgagctggagccccggcccacccggcgggagcacgccgaggccctgctgctggccagctgctacctgcccccaggcttcctgagcgcccctggccagagggtgggcatgctggccgaggccgcccggaccctggagaagctgggggaccggcggctgctgcatgactgccagcagatgctgatgaggctgggcggcggcaccaccgtgaccagcagctag

SEQ ID NO: 294130 - DNA, 2682 bp, Artificial Sequence
  derived and/or modified sequence
atgaagaccgacggcgccaccgtgaaggccgccggcctgagccccctggtcagcggcactaccgtccagactggccctctgcctactctggtaagtggggggactatcctggccactgtccctctggtggtggacgcagagaagctgccaatcaacaggctagccgccggcagtaaagcgccagctagcgcgcagagccggggcgagaagcggacagcgcataacgcaatagaaaagcgttaccgcagcagcatcaacgataagatcattgaattgaaggatctggttgtgggtactgaagctaagctgaataaaagcgccgtcctcagaaaggcaatagattatattcgattcctgcagcactccaaccagaagcttaagcaggagaacctgagtcttaggaccgccgtgcacaagtcgaagtctctgaaagatctcgtgagcgcatgtggcagtggcggcaacactgacgttctgatggagggagtgaagacagaggtcgaagacacactgaccccacctccgagcgacgcaggctccccttttcagtcaagtcccctctccctcggatctcgcggatccggttcaggtggatcagggtcagattccgagccggacagcccggtgttcgaagactcaaaggcgaagccagaacagcgcccatcattgcacagtagagggatgctggacaggtcccggttagcactgtgtactctcgtcttcctgtgcttatcatgcaatcccctggcttccctcctgggggccagagggttgccgagccccagcgatacaacaagtgtctaccactctcccggacggaacgtgctaggaacagaaagccgggacggtcccggatgggctcaatggctgctgcctcctgttgtctggctgcttaacgggctgttagtgctggttagccttgtgttactgttcgtttatggggagccggtgacacggccacactctggtccggccgtgtatttttggcgacatcgaaagcaagctgatcttgatttagcccgtggcgactttgcccaagcagcccaacagttgtggctcgccctccgggcattggggcgacccctacccacctcccacttggatctggcctgctccctgctctggaatctcattcgacacctgctgcagaggctctgggtggggcgctggctggcggggagagccggaggtttacagcaagactgcgctctacgcgtcgacgccagcgcctcagctcgcgacgcagctctggtgtaccacaaattacaccagcttcatacaatgggcaagcatactgggggccatctgactgccactaacctcgcactcagtgcgctgaaccttgcggagtgtgctggcgatgccgtttccgtggcgactcttgctgagatctacgtggcagcagcactgagagtgaagactagcttgccaagagccttgcatttcctcacaagattcttcctgagttccgcccgccaggcctgccttgcccaaagcgggagcgtgcctccagctatgcagtggctttgccatccggttgggcataggttttttgtcgatggcgactggtctgtgctttccacaccctgggagtccctctattccctagctggaaatccagtggaccccctggcccaggtgacacagctgttccgtgaacatctccttgaaagagctctgaattgcgtgactcaacccaatccatcacctggatccgctgatggtgataaggagttcagcgatgccttaggatatctgcagcttctgaactcctgctcagatgcggccggtgcacccgcttatagctttagtatttcctccagtatggcaacgacaacaggtgtggatcccgtcgctaagtggtgggcctctctgacagctgtggtgatccattggctccggagggatgaggaagcggctgaacgcctctgccctctagtggaacacttgccgcgcgttttgcaagagtcagagagacctctcccacgagctgcactccactcttttaaggctgccagggcactgctgggctgtgcaaaggctgaatcgggccctgcgtccctcaccatctgtgaaaaggctagcggttacctccaggatagcctggccactacccccgcaagttcctcaattgacaaggctgtccagctgttcctttgcgatcttctgctggtggtgagaacgtccttgtggagacagcagcagccacccgctcctgcccctgctgcacagggaacaagcagtaggccgcaagccagtgctctcgaacttcgcgggtttcagcgagatctgtcctctttgagaagactcgcgcagtcattccggcccgcaatgcggcgagtttttctccatgaggccactgccaggctgatggcaggcgcctccccaactagaacccaccagctgctggatcggtctctccggaggcgcgccggacccggtggtaaaggaggtgccgtcgccgaattagagcctcgacctacccgcagggaacacgccgaagccctgctattagctagttgctacctgccccccggattcctctcagctcccggccaacgggttggcatgttagccgaggccgcacggaccctggagaaactgggggaccgccgcttgcttcacgactgtcagcaaatgctgatgcggctcggcggagggacaactgtgacatccagctag

SEQ ID NO: 294131 - DNA, 2955 bp, Artificial Sequence
  derived and/or modified sequence
atggactgcaccttcgaggacatgctgcagctgatcaacaaccaggatagtgacttccctgggctgttcgacccaccgtacgccggcagtggagcaggtggtacagaccctgcttccccggatactagctctccaggctccttgtcaccccctcccgccaccttgtcgtccagtctggaagcttttctgtccggtccacaagcagctccaagtccccttagtcctccacagcccgctcccacccctctgaagatgtatccctccatgcccgctttctcaccaggacccggaattaaggaagagtctgtccctctttcaatcctccagacacccacaccccagcccctgccagtacctaccctggtttcgggcgggacaatcctagccacagtgcccctggtggttgacgcagagaagctgccaattaatcggctcgccgctgggtctaaggccccagcatctgcacagtctaggggagaaaagcgcacagctcataacgcgatagagaaaagatatcgtagttccataaatgataagattattgaattgaaggatctcgtcgtcggaaccgaagctaaactgaataagagcgcggtgctccgcaaggcaattgactacatccgatttctgcaacatagcaaccaaaagctgaagcaagagaatttgtctctgcggactgcggtacataagtctaagagtctcaaagatctggtgtcagcttgcgggtcaggcggcaacactgacgtgcttatggagggtgtcaaaaccgaggtagaggatactctgaccccgcccccttccgacgccggatcgccttttcagtcctccccactgagcttgggatctcggggatctggatcaggcggctcgggctcagattcggagcctgacagtcccgtattcgaagactccaaagcgaagccggagcagagaccaagcctgcactcaaggggaatgctagataggtcaaggcttgccctctgcactttggtctttctgtgcctgtcatgtaacccgttggcctccctcctgggagcacggggcctgcccagtccctctgacaccacaagtgtttatcactccccaggcaggaatgtgctcggcaccgaaagcagggacggtcccgggtgggcccaatggctactgcccccagtggtctggctactcaatggcctgttagttttagtaagcctagtgcttctgtttgtctacggggaacccgtgaccaggccccattcgggccccgcagtgtacttttggcgccataggaagcaggccgacctggacctcgcacgaggagacttcgcccaggcggctcaacagctctggttagctctacgagccctgggacggccgcttcctacatcacatctagacctcgcgtgttccctcctctggaacctgatcagacatctgctccagcgattgtgggtggggagatggttggccggccgagccgggggactgcaacaggactgtgccctccgtgtggacgcatcagcttcagctagagacgctgctctggtatatcacaagctacaccagctgcatactatgggtaaacacaccgggggtcaccttaccgccaccaaccttgccctcagtgcactcaacctcgctgagtgtgcgggtgacgctgtgtcagtcgctacacttgcagaaatttacgtggccgctgccctgagggtcaaaacaagcttgccccgcgcgctgcatttcctaactcggtttttcttgtccagcgctagacaggcctgcctcgctcaaagcggatccgtgcctcctgcaatgcagtggttgtgccaccctgtaggccacagatttttcgtggacggagactggagcgtgctaagcacaccctgggaatctctgtacagcctggcgggaaacccggtcgatccactcgcccaggttacacagctgttcagagaacacctactggagcgagctctgaattgcgtgacccagcctaacccctcccctggcagcgcggatggcgacaaggaattctcagacgccttgggctaccttcagctgttaaatagctgttcagatgcggcgggcgccccagcctacagcttttcaatcagctcctccatggcaaccactactggggttgatcctgttgccaagtggtgggcatctctgacggcagtcgtgatccactggttacgtcgtgatgaagaggctgcagagcgcttgtgcccattggttgagcacttacccagagttctccaggaatctgagaggcctctcccccgggccgcattgcattctttcaaagctgctagggccttacttggctgtgccaaagcagaaagcgggcctgcttcacttacgatttgcgagaaggcctcgggttacttacaggacagcttggctacaacgccagcgagttcttcaattgacaaggctgtgcagctattcctgtgcgacttactgctggtcgttagaacttccctctggcgacagcaacagcctcccgcccccgctccggctgcccaagggacatcgagtcggccgcaggcaagtgctctagaacttaggggcttccaaagggatctttccagtctccgcaggctggcccagtcatttcggcctgcaatgcggcgcgtgtttctccacgaggccactgcccgcctcatggctggggccagtcctacacgaacccaccagctgcttgatcgcagcctccgacggagagccggtcccgggggtaaaggaggcgctgtggctgagcttgagcctagaccaacccgcagggagcacgccgaggcattgctcctggcaagttgttacctcccccccggcttcctgtcagcacccgggcagagagtgggcatgctcgcggaagctgcccgcacgctcgaaaagcttggcgacagacgactactgcatgactgtcagcagatgttgatgcgccttggcggaggtaccaccgtgaccagctcctag

SEQ ID NO: 294132 - DNA, 3222 bp, Artificial Sequence
  derived and/or modified sequence
atggactgcaccttcgaggacatgctgcagctgatcaacaaccaggacagcgactttcccggcctctttgaccccccccagccagctcccactcccctgaagatgtatccatccatgcctgctttctccccgggccccggtattaaggaagagtccgtgcctctgagcatattacagacccccacaccccaaccactgcctggagccctgcttccccagtcattcccagcgccagccccccctcagttcagtagcacacccgttctggggtatccatcgcccccaggaggattttccactgggagcccgcccggtaacacacagcaacccttgcccggcctccccctcgccagcccgccaggcgttcctccagtgtctctacacacccaggtgcagagtgtcgtaccacagcagctgctgaccgtgactgccgccccaaccgccgccccagtcaccacaaccgtgacttcccagattcagcaagtccctgtcctactgcagccccacttcatcaaggcagattcattgcttttgaccgctatgaagacagacggagcgacggtaaaagccgccggcttgtccccacttgtcagcgggaccacggtgcagactgggccgctgcccaccttggtgtctggagggacaatcctggctactgtgcctctggttgtcgacgcagaaaagctgcctattaaccggctggccgctggatcgaaggcgcctgccagcgctcaaagccggggagaaaaaaggacagctcacaatgctattgagaaaagatacaggtcctcaattaatgataagattattgaactcaaggatctggtcgtgggtacggaggccaagctcaacaaatctgcggtgctgcgtaaagcgatcgactacattcgattcctgcagcattcaaatcaaaagctgaagcaggagaatctaagcctccgcactgcagtacacaaatctaaatctctgaaagatctagtgagtgcatgcggctccggcgggaacacggatgtcttgatggagggagttaaaactgaagttgaggatactcttaccccaccgccgtcagacgccgggtccccttttcagtccagcccacttagccttggctcccgcggtagtggatctggcggctctggtagcgactcagagcccgatagccccgtgttcgaggactctaaggccaagcccgagcagcgaccctcgctccattcaagagggatgctcgatcgctcccgcttggccctgtgcacattagtatttctctgcctgagctgtaatccactcgcttccctgttaggagctcgcggactgcccagtccaagcgatactacttctgtctatcactcgcctggccgcaatgttctgggtaccgagtcccgcgacggccctggctgggctcagtggttgctcccgccagtggtttggctgctgaacggactgctggtcttagtcagtttggtgctgctgttcgtgtatggcgagcccgtgacgaggccccacagcggtcctgcagtttacttctggcgtcacaggaagcaggcagatcttgacctcgcaagaggcgacttcgcccaagccgcccagcagctgtggctggcgctccgcgcacttggcaggcctctgcccaccagtcatctggacctagcctgctcacttctctggaatctgatacggcacttgctccagagactctgggtgggaagatggctggccgggagggctggcggattgcagcaggattgcgctctccgtgtcgacgcgtctgcttccgcacgggacgccgccctcgtataccataaattacaccagctgcacacgatgggcaagcacaccggcgggcaccttacagcaaccaatctcgccctttctgccctcaaccttgctgaatgcgcaggagatgctgtgtctgttgcaacattggccgaaatttacgtcgccgctgctctccgcgtgaagacaagcctacctcgagccctacactttctaacccgcttcttcctgtctagcgccaggcaggcgtgcctggcccaatccggctccgtgccccccgccatgcagtggctgtgccatcctgtgggccacagattcttcgttgacggagactggagtgtcctttccacaccatgggaatctctgtacagcctggccgggaatcctgtggatccattggcacaggtgacgcaactgttccgagaacatctgctagaaagggctcttaactgtgtcacgcagccaaacccaagtccagggagcgcggacggcgacaaagagtttagcgacgctctgggctatttgcagctcctaaactcctgctcagatgccgccggcgccccagcctattcgttctcaatttcgagtagtatggccaccacaaccggggtagacccagtcgccaaatggtgggccagcctcaccgccgtcgtgatacactggctaaggcgtgacgaggaggcagctgaaagactgtgtcccctggtggaacacctcccacgcgttctgcaggagtctgaacgcccacttcctagggctgctctccactcttttaaggcagctcgggcgttgctgggatgcgccaaggctgaatcgggaccagcaagtctgacaatatgcgagaaagccagcgggtatcttcaggatagccttgcaactacccccgcatccagttcaatcgacaaagctgttcagctcttcctgtgtgatctcctgttggtcgtcagaacaagtttgtggcggcagcagcaaccgccagcgcctgcccctgcagctcaaggaaccagctcgcgaccccaggccagtgcactagagttgaggggtttccagagagatctgtcttcactgaggcgtctggcacagagctttcgtcctgccatgcggagagtcttcctccacgaggcgactgcccggttgatggctggtgcctcaccgactcggacccaccagttgttggacagatccctgcggcgcagagcgggaccaggggggaaaggcggcgcggtagcagagctggagccacggccaactcggagagagcacgcagaagccttactcctcgcttcttgctatctcccaccgggctttctaagcgctccagggcagcgagtcgggatgctggctgaggccgctaggacccttgaaaaacttggagatagaaggctgcttcacgactgccagcaaatgttaatgagactgggggggggtaccactgtcacctccagttag

SEQ ID NO: 294133 - DNA, 2682 bp, Artificial Sequence
  derived and/or modified sequence
atgaagacagatggagctaccgtaaaagccgctggattaagcccgttggtaagcgggaccacagtgcagacaggacccctgccaacgctggttagcggaggcaccatactggccactgttccactggtcgtggatgcagagaagctcccaattaacagactagcagcaggttcaaaggccccagcctcagcccagtcacgaggcgagaagcggaccgcccacaacgcaattgaaaagaggtaccggagtagtattaacgacaaaatcattgaattaaaggacctcgtcgtgggaacagaggcaaagctcaataagtctgcagttctacgcaaagctatagactacatccgttttctacagcacagtaaccagaaactgaaacaagagaatctgagccttcgaacggctgtgcacaaatcaaaatctctgaaggatttggtttccgcctgtggcagcggaggaaacactgatgtgttgatggaaggagtgaaaacagaggtggaagacaccctaacaccccctccttctgacgctggctccccctttcagagctcaccattgagccttggcagccgcggtagcggatccggcggtagcggatctgattccgagcctgattcacccgtgttcgaggatagcaaggcgaagccggagcagaggccatcgttacatagccggggaatgctcgacaggtcgcgcttggccctgtgcactctagtgttcctgtgtcttagctgcaacccactcgcctccctgctgggagcccgagggcttccgagccccagcgacaccacatccgtctatcacagccctggaaggaacgtgttgggaaccgaatcaagggacggaccagggtgggcacaatggttgctgcccccagtggtctggcttctgaacggacttctcgtcctggtgagcctggttctgctcttcgtctacggagaaccggtgacccgacctcattcaggacccgctgtctacttctggcgacacagaaagcaggccgatctagatttggcacgtggcgactttgctcaggccgctcagcaactgtggctcgctctccgggctctgggccgtccacttcccaccagtcacctggacctggcttgtagcctactgtggaacctcatccgacacctacttcagcgactctgggtcggtcggtggttggccggacgggcaggcggactgcaacaggactgcgcccttcgcgtggacgcatccgccagcgcacgggacgccgcactcgtatatcacaaactacatcagcttcataccatgggaaaacatactggaggccacctgacagcgaccaatttggctctgagcgcgctgaatttagctgaatgcgcaggggatgctgtgtctgtagcgacactggcagaaatctatgttgcggctgccctgcgcgtgaagacttcgctgccccgagcactgcacttccttactcgcttttttctgagttccgcgaggcaggcgtgcttggcacagtcaggatccgtgcccccagctatgcagtggttgtgtcacccagtgggacatcgatttttcgtggacggggattggtcagttctgtctaccccctgggagagcctttactcactggccggaaacccagtggatcctcttgctcaagtgactcagctgttcagggaacatctcttggaacgagcccttaactgcgtaactcaacctaatccctcgcctggatccgccgatggcgataaggagttttcggacgccctaggttacttacagctcttgaactcttgctccgacgccgcaggcgcacccgcatacagcttctcaatcagctccagtatggcaaccaccacgggtgtagatcctgtcgctaagtggtgggcgagcctgacagctgtcgtgattcattggttacgaagggacgaggaggccgcagaaaggctgtgcccgctggtggagcacctccccagggtgctgcaagagagcgagaggccccttccaagggctgcgcttcacagttttaaagccgctagggcgctgctaggttgcgctaaggcagaatccgggccagcgtcactcactatctgcgagaaagcgagtggctacctgcaggactccctggctacaactccagccagctcgtccatcgataaagccgtgcaattatttttgtgcgacctcttactcgtagtgcggacgtctctctggcggcaacagcagcccccagccccagcccctgctgctcagggaacctcctctcgaccacaggcttctgcactcgaactcagagggttccagagagatctgagctctctccggagactcgcacaaagtttccggcctgccatgcgtcgggttttcctacacgaagccactgcacgccttatggctggagcttcacccacccggacacatcagctgctcgataggtctctacggagaagggctggccctggcggaaagggaggagccgtggccgaactggagccacgcccaacccgcagggagcacgccgaagctctactgctcgcttcctgctacctgccgccaggattcctctctgcacccggacagcgagtggggatgttagctgaggccgcaagaaccctcgaaaagctcggagatagacgccttttgcatgactgccagcaaatgctgatgcgccttggcggaggaactaccgtgactagtagctag

SEQ ID NO: 294134 - DNA, 2955 bp, Artificial Sequence
  derived and/or modified sequence
atggactgcaccttcgaggatatgttgcagctcatcaataatcaggactcggattttccaggcctcttcgacccaccttacgcaggctccggcgcaggcggtaccgacccagctagccccgacacgtcaagtcctgggtctctttccccccctcccgcaaccctaagctctagcttagaggccttcctgagcgggcctcaggcggcaccctcaccccttagcccaccacagcctgcacctacccccctcaagatgtacccttccatgccggcattctcacccggacctggcataaaagaggaatccgttccactcagcatactgcagacacccaccccacaaccattgcccgtgcccacccttgtctccggcggaactattctggccaccgtgcccctcgtggttgacgctgagaaactgccaatcaatcgcctggccgctggatccaaagccccagcgtcagcgcaaagtaggggcgagaagcgaaccgcacacaatgcaatcgagaagaggtaccgctcctctataaacgataaaatcattgaactaaaagatctggtagtgggcactgaagctaaactaaacaagagtgccgtgctgcgcaaagcaattgattatatccgcttcctgcagcatagcaatcagaagctaaagcaggagaacctgagcctgagaacagctgtccataagtccaagagcctgaaggacttggtctctgcctgcggctctggtgggaacactgatgtcctgatggagggtgtgaagacagaagtggaggatacccttactcccccaccatcggatgccggttccccttttcagtcttcaccactctctcttggatctcgaggatcaggatccgggggatccggctcagatagcgagcccgacagcccagtctttgaggattcaaaggcgaagcctgagcaaaggcctagtctacacagtagaggcatgctggatcggtccagactcgctctttgcactttagtttttctatgcctgagttgtaacccacttgctagcctgttgggcgctcgcggattgccctccccctccgacaccacctcagtgtatcacagtcccggaaggaatgtgctgggtacagaaagcagggacggcccaggctgggcccagtggcttctgcccccagtggtctggctcctgaacggcctgctggtcctcgtatccctcgtgctccttttcgtctacggtgagcctgtgactcggccacatagtggccctgcagtgtacttttggcgccaccggaaacaagctgacctggatctggcaagaggcgactttgcacaggcggctcagcaattgtggctggcattgcgggcattgggcaggccccttcctacttcgcacctcgacctggcatgtagtctgctgtggaatcttatcaggcacttattgcagaggctgtgggtgggcaggtggctagccggacgcgcaggagggctccagcaggactgcgccctccgggtggacgcatccgcctccgccagggatgcagccctggtttaccacaaattgcaccagctccatactatgggcaaacacaccggaggacaccttaccgccaccaacctcgcactcagcgcactcaacctcgcagagtgtgcaggcgacgccgtgagtgtagctacattagccgagatctatgtggccgctgctctgcgcgtgaaaacttccctgcccagagctctgcactttttgacacgtttttttctgtcctccgctaggcaggcttgcctagcccagagcggctccgtgccgcctgctatgcagtggctatgccaccccgtgggacatagatttttcgtggatggcgattggtcagtgctcagtactccctgggagtccttgtattccctggctggaaaccctgttgacccactggcccaggtcacacaacttttccgcgaacacttgctggagcgcgctctgaactgtgtaacccaacctaatccctccccagggtccgcagacggcgacaaagagttctcagatgcactcggttaccttcagctgctaaattcctgttcagatgcggcaggcgcacctgcatactcattttccatcagcagttcaatggccacaaccactggggtggaccctgtcgccaagtggtgggcgagtcttactgcggtagttatccactggctccgaagggatgaggaggccgcagagcgactttgcccacttgtggaacatctgcctcgagtgctccaggagagcgaaaggcccctccccagggctgccctgcacagttttaaggcagccagggctctgctgggctgtgcgaaagctgaatcaggtccggcatctctgacaatctgcgaaaaggcctcaggctacttgcaggatagcttagcaaccactcccgcatcatcatctatcgataaggccgttcagctctttttgtgtgacttactcctggtggtgcgtacgtccctgtggcggcagcaacagcccccagcccctgccccagccgctcaggggacaagcagtcggcctcaggcaagcgcacttgaactgcggggatttcaaagggacctaagcagtctgcgcaggttagctcagtccttccgtccagccatgcggcgagtcttcctgcacgaagccacagccagactgatggcaggcgcttccccaaccagaacacatcaactcttggatcggtctcttaggcgacgggcagggcctggaggcaaaggcggagcagtggccgaactcgagcctcggcctaccaggagagaacacgccgaggccctcctgcttgctagctgttacttgccccctggattcctgtccgccccagggcagcgtgtcgggatgctcgccgaggctgcccgaaccctggagaagctgggggatcgcagattgctgcacgattgtcagcagatgttgatgcgcctcgggggaggaactacagtgactagctcttag

SEQ ID NO: 294135 - DNA, 3222 bp, Artificial Sequence
  derived and/or modified sequence
atggattgcaccttcgaggatatgctgcagttgattaataatcaagactcagatttccccggattgttcgaccctccccagcctgcccctacccccttgaagatgtaccccagcatgcccgctttcagtcctggaccaggtatcaaggaagaatccgtgcctctctccatcttacagacccccaccccacaacctctgccaggcgcactcttaccacaatctttccccgcacctgcacccccacagttctcgagcacacccgtgttgggctatccttcacccccaggtggatttagtactggcagcccgccaggcaatacccagcaaccgctacccggactgccacttgcttcccctcctggcgtgccacctgtgtccttgcatacccaggtccaaagcgtggtcccacagcagctgcttacagtgactgcggcacccacagccgctcccgtcacgaccacggtaacttcccaaatccagcaggtgcctgtgctgctgcaacctcattttattaaagctgattcattgttgctcaccgccatgaagaccgatggcgctaccgtgaaggccgctggcttgtctcccttggtgtccggcacgacagtgcaaacaggaccccttcccacactggtttcagggggtaccatcttggctacggtacctctggttgtggatgctgaaaaactgccgatcaatagactcgccgcaggaagcaaagcaccggcttctgcccagagtcgcggagaaaaaaggacagcacacaacgctattgaaaagaggtaccgctcgtcaattaacgacaaaatcattgagctgaaggatctcgttgtgggtacagaagccaagttgaacaagtccgccgtgcttagaaaggctattgattatatcaggtttctgcagcattcaaaccaaaaactaaaacaagaaaatctttctttgaggactgccgtgcacaagtccaaatcattgaaggatctcgtaagcgcctgtggaagcggcggtaatacagatgtactcatggaaggggtgaagaccgaagttgaggacactctaactcctccgccatctgacgccggatctccatttcaaagctcgccactctctttgggcagccgaggcagcggcagcggtgggagcggttcagacagtgagccagactcaccggtttttgaagattctaaagcaaagccagaacaaagacctagtctgcacagccgaggaatgttggatcgctccaggctagccctttgcactctcgtattcttgtgcctaagctgtaatcccctcgcttccctgctgggagccaggggactcccaagcccatccgacaccacgtccgtgtaccatagccctggaagaaacgtgttgggtactgaatcacgagacggtccaggttgggcacaatggctcctgcccccagtcgtatggcttctgaacgggcttctagtgctcgtgagcctagttcttctgttcgtatatggggagcctgtcaccaggccccattctggccctgccgtgtatttctggcgccaccgcaaacaggctgatcttgacctggcgagaggagacttcgcacaagccgctcagcagctatggttggccctgcgggctctgggaaggccacttccgaccagtcacctggatctagcatgcagcctgctgtggaatcttatacggcacctcctccaaagactctgggtgggacggtggctggccggtcgggcaggagggttacagcaggactgcgcccttcgcgttgacgcctctgctagcgctcgtgacgctgccttagtctatcacaaattacaccagctgcatacaatggggaaacatacggggggtcacctgaccgcaactaatctggcactctcggccctgaacctggccgagtgcgccggagacgctgtaagcgtggccactctggccgaaatctacgtggccgctgctcttcgggttaagacatcccttcctagggccctgcatttcctcacaaggttctttctctcttctgctagacaggcctgtctggctcagtcagggagtgtgccacctgccatgcaatggctttgccacccagtgggccatcgcttcttcgtggacggagattggagcgtccttagtactccttgggaatctctgtactcactggcgggtaacccagtcgatccactcgcccaggtcacccaattatttcgcgaacacctactcgagagagccctgaattgcgtgacacagccgaacccgtccccgggtagcgcagacggggacaaagagttctccgatgccctcggatatctgcagctactgaacagctgcagcgatgctgccggagcccctgcctacagcttttctatttccagctctatggcaacaaccaccggcgtggatccagtcgcaaagtggtgggcctcactgacagccgtggtgatacactggctacgtagagacgaagaggccgctgagagactgtgtccactggtggagcatttacccagagtcctgcaggagagcgagcgtcccttgcccagagccgcactccacagcttcaaagcagccagagccctactgggatgcgcaaaagcagaaagtgggccagccagcctaacaatctgcgagaaggcctccgggtacttgcaggactcccttgccacaacccctgcctcctcaagtatcgataaggccgtccagctgttcctgtgtgaccttttactggtggtaagaaccagtttgtggcgccagcaacaacctccggcaccagccccagccgctcagggcactagctctaggcctcaggcgtccgcactggaactgcgtggcttccagagggatctgagttcactccgtcgcctcgctcagagctttcgcccagctatgcgcagggtgttcttgcatgaggcgactgcacggctaatggccggagcttctcctaccagaacccatcagctattagaccgcagtctccgacgacgggcaggccctggcggtaaaggtggcgcagtagccgagctggaacccagaccgaccaggagggaacacgcagaagctttgctcctggccagctgttacttgcctccaggctttctgagcgccccaggacagagagtcggcatgttggcggaagccgctcgaaccttggaaaaactgggggatcggcgacttctacacgactgccagcaaatgctcatgcgacttggcggaggcacaacagtcacaagtagttag

SEQ ID NO: 294136 - DNA, 3696 bp, Artificial Sequence
  derived and/or modified sequence
gttactagcagtcctggtgtgcttgttgccggggtaggcgcaacctcgcactggaggcctggcttgaagccagtgcatttgcatcagagcccaggcagggactgtccataggaagccacatggggcaatgactcatccaaggccagtcggtgatagagacctgaagagcaggttgaaagtgggagagggaggtctgtgtctgcagccccatgctttatttctgcaggaagccctcccgggaacacccagcagccgctgcctggcctgccactggcttccccgccaggggtcccgcccgtctccttgcacacccaggtccagagtgtggtcccccagcagctactgacagtcacagctgcccccacggcagcccctgtaacgaccactgtgacctcgcagatccagcaggtcccggtcctgctgcagccccacttcatcaaggcagactcgctgcttctgacagccatgaagacagacggagccactgtgaaggcggcaggtctcagtcccctggtctctggcaccactgtgcagacagggcctttgccgaccctggtgagtggcggaaccatcttggcaacagtcccactggtcgtagatgcggagaagctgcctatcaaccggctcgcagctggcagcaaggccccggcctctgcccagagccgtggagagaagcgcacagcccacaacgccattgagaagcgctaccgctcctccatcaatgacaaaatcattgagctcaaggatctggtggtgggcactgaggcaaagctgaataaatctgctgtcttgcgcaaggccatcgactacattcgctttctgcaacacagcaaccagaaactcaagcaggagaacctaagtctgcgcactgctgtccacaaaagcaaatctctgaaggatctggtgtcggcctgtggcagtggagggaacacagacgtgctcatggagggcgtgaagactgaggtggaggacacactgaccccacccccctcggatgctggctcacctttccagagcagccccttgtcccttggcagcaggggcagtggcagcggtggcagtggcagtgactcggagcctgacagcccagtctttgaggacagcaaggcaaagccagagcagcggccgtctctgcacagccggggcatgctggaccgctcccgcctggccctgtgcacgctcgtcttcctctgcctgtcctgcaaccccttggcctccttgctgggggcccgggggcttcccagcccctcagataccaccagcgtctaccatagccctgggcgcaacgtgctgggcaccgagagcagagatggccctggctgggcccagtggctgctgcccccagtggtctggctgctcaatgggctgttggtgctcgtctccttggtgcttctctttgtctacggtgagccagtcacacggccccactcaggccccgccgtgtacttctggaggcatcgcaagcaggctgacctggacctggcccggggagactttgcccaggctgcccagcagctgtggctggccctgcgggcactgggccggcccctgcccacctcccacctggacctggcttgtagcctcctctggaacctcatccgtcacctgctgcagcgtctctgggtgggccgctggctggcaggccgggcagggggcctgcagcaggactgtgctctgcgagtggatgctagcgccagcgcccgagacgcagccctggtctaccataagctgcaccagctgcacaccatggggaagcacacaggcgggcacctcactgccaccaacctggcgctgagtgccctgaacctggcagagtgtgcaggggatgccgtgtctgtggcgacgctggccgagatctatgtggcggctgcattgagagtgaagaccagtctcccacgggccttgcattttctgacacgcttcttcctgagcagtgcccgccaggcctgcctggcacagagtggctcagtgcctcctgccatgcagtggctctgccaccccgtgggccaccgtttcttcgtggatggggactggtccgtgctcagtaccccatgggagagcctgtacagcttggccgggaacccagtggaccccctggcccaggtgactcagctattccgggaacatctcttagagcgagcactgaactgtgtgacccagcccaaccccagccctgggtcagctgatggggacaaggaattctcggatgccctcgggtacctgcagctgctgaacagctgttctgatgctgcgggggctcctgcctacagcttctccatcagttccagcatggccaccaccaccggcgtagacccggtggccaagtggtgggcctctctgacagctgtggtgatccactggctgcggcgggatgaggaggcggctgagcggctgtgcccgctggtggagcacctgccccgggtgctgcaggagtctgagagacccctgcccagggcagctctgcactccttcaaggctgcccgggccctgctgggctgtgccaaggcagagtctggtccagccagcctgaccatctgtgagaaggccagtgggtacctgcaggacagcctggctaccacaccagccagcagctccattgacaaggccgtgcagctgttcctgtgtgacctgcttcttgtggtgcgcaccagcctgtggcggcagcagcagcccccggccccggccccagcagcccagggcaccagcagcaggccccaggcttccgcccttgagctgcgtggcttccaacgggacctgagcagcctgaggcggctggcacagagcttccggcccgccatgcggagggtgttcctacatgaggccacggcccggctgatggcgggggccagccccacacggacacaccagctcctcgaccgcagtctgaggcggcgggcaggccccggtggcaaaggaggcgcggtggcggagctggagccgcggcccacgcggcgggagcacgcggaggccttgctgctggcctcctgctacctgccccccggcttcctgtcggcgcccgggcagcgcgtgggcatgctggctgaggcggcgcgcacactcgagaagcttggcgatcgccggctgctgcacgactgtcagcagatgctcatgcgcctgggcggtgggaccactgtcacttccagctagaccccgtgtccccggcctcagcacccctgtctctagccactttggtcccgtgcagcttctgtcctgcgtcgaagctttgaaggccgaaggcagtgcaagagactctggcctccacagttcgacctgcggctgctgtgtgccttcgcggtggaaggcccgaggggcgcgatcttgaccctaagaccggcggccatgatggtgctgacctctggtggccgatcggggcactgcaggggccgagccattttggggggcccccctccttgctctgcaggcaccttagtggcttttttcctcctgtgtacagggaagagaggggtacatttccctgtgctgacggaagccaacttggctttcccggactgcaagcagggctctgccccagaggcctctctctccgtcgtgggagagagacgtgtacatagtgtaggtcagcgtgcttagcctcctgacctgaggctcctgtgctactttgccttttgcaaactttattttcatagattgagaagttttgtacagagaattaaaaatgaaattatttataatctg

SEQ ID NO: 294137 - DNA, 3598 bp, Artificial Sequence
  derived and/or modified sequence
aaaaatccgccgcgccttgacaggtgaagtcggcgcggggaggggtagggccaacggcctggacgccccaagggcgggcgcagatcgcggagccatggattgcactttcgaagacatgcttcagcttatcaacaaccaagacagtgacttccctggcctatttgacccaccctatgctgggagtggggcagggggcacagaccctgccagccccgataccagctccccaggcagcttgtctccacctcctgccacattgagctcctctcttgaagccttcctgagcgggccgcaggcagcgccctcacccctgtcccctccccagcctgcacccactccattgaagatgtacccgtccatgcccgctttctcccctgggcctggtatcaaggaagagtcagtgccactgagcatcctgcagacccccaccccacagcccctgccagtcccgaccctggtgagtggcggaaccatcttggcaacagtcccactggtcgtagatgcggagaagctgcctatcaaccggctcgcagctggcagcaaggccccggcctctgcccagagccgtggagagaagcgcacagcccacaacgccattgagaagcgctaccgctcctccatcaatgacaaaatcattgagctcaaggatctggtggtgggcactgaggcaaagctgaataaatctgctgtcttgcgcaaggccatcgactacattcgctttctgcaacacagcaaccagaaactcaagcaggagaacctaagtctgcgcactgctgtccacaaaagcaaatctctgaaggatctggtgtcggcctgtggcagtggagggaacacagacgtgctcatggagggcgtgaagactgaggtggaggacacactgaccccacccccctcggatgctggctcacctttccagagcagccccttgtcccttggcagcaggggcagtggcagcggtggcagtggcagtgactcggagcctgacagcccagtctttgaggacagcaaggcaaagccagagcagcggccgtctctgcacagccggggcatgctggaccgctcccgcctggccctgtgcacgctcgtcttcctctgcctgtcctgcaaccccttggcctccttgctgggggcccgggggcttcccagcccctcagataccaccagcgtctaccatagccctgggcgcaacgtgctgggcaccgagagcagagatggccctggctgggcccagtggctgctgcccccagtggtctggctgctcaatgggctgttggtgctcgtctccttggtgcttctctttgtctacggtgagccagtcacacggccccactcaggccccgccgtgtacttctggaggcatcgcaagcaggctgacctggacctggcccggggagactttgcccaggctgcccagcagctgtggctggccctgcgggcactgggccggcccctgcccacctcccacctggacctggcttgtagcctcctctggaacctcatccgtcacctgctgcagcgtctctgggtgggccgctggctggcaggccgggcagggggcctgcagcaggactgtgctctgcgagtggatgctagcgccagcgcccgagacgcagccctggtctaccataagctgcaccagctgcacaccatggggaagcacacaggcgggcacctcactgccaccaacctggcgctgagtgccctgaacctggcagagtgtgcaggggatgccgtgtctgtggcgacgctggccgagatctatgtggcggctgcattgagagtgaagaccagtctcccacgggccttgcattttctgacacgcttcttcctgagcagtgcccgccaggcctgcctggcacagagtggctcagtgcctcctgccatgcagtggctctgccaccccgtgggccaccgtttcttcgtggatggggactggtccgtgctcagtaccccatgggagagcctgtacagcttggccgggaacccagtggaccccctggcccaggtgactcagctattccgggaacatctcttagagcgagcactgaactgtgtgacccagcccaaccccagccctgggtcagctgatggggacaaggaattctcggatgccctcgggtacctgcagctgctgaacagctgttctgatgctgcgggggctcctgcctacagcttctccatcagttccagcatggccaccaccaccggcgtagacccggtggccaagtggtgggcctctctgacagctgtggtgatccactggctgcggcgggatgaggaggcggctgagcggctgtgcccgctggtggagcacctgccccgggtgctgcaggagtctgagagacccctgcccagggcagctctgcactccttcaaggctgcccgggccctgctgggctgtgccaaggcagagtctggtccagccagcctgaccatctgtgagaaggccagtgggtacctgcaggacagcctggctaccacaccagccagcagctccattgacaaggccgtgcagctgttcctgtgtgacctgcttcttgtggtgcgcaccagcctgtggcggcagcagcagcccccggccccggccccagcagcccagggcaccagcagcaggccccaggcttccgcccttgagctgcgtggcttccaacgggacctgagcagcctgaggcggctggcacagagcttccggcccgccatgcggagggtgttcctacatgaggccacggcccggctgatggcgggggccagccccacacggacacaccagctcctcgaccgcagtctgaggcggcgggcaggccccggtggcaaaggaggcgcggtggcggagctggagccgcggcccacgcggcgggagcacgcggaggccttgctgctggcctcctgctacctgccccccggcttcctgtcggcgcccgggcagcgcgtgggcatgctggctgaggcggcgcgcacactcgagaagcttggcgatcgccggctgctgcacgactgtcagcagatgctcatgcgcctgggcggtgggaccactgtcacttccagctagaccccgtgtccccggcctcagcacccctgtctctagccactttggtcccgtgcagcttctgtcctgcgtcgaagctttgaaggccgaaggcagtgcaagagactctggcctccacagttcgacctgcggctgctgtgtgccttcgcggtggaaggcccgaggggcgcgatcttgaccctaagaccggcggccatgatggtgctgacctctggtggccgatcggggcactgcaggggccgagccattttggggggcccccctccttgctctgcaggcaccttagtggcttttttcctcctgtgtacagggaagagaggggtacatttccctgtgctgacggaagccaacttggctttcccggactgcaagcagggctctgccccagaggcctctctctccgtcgtgggagagagacgtgtacatagtgtaggtcagcgtgcttagcctcctgacctgaggctcctgtgctactttgccttttgcaaactttattttcatagattgagaagttttgtacagagaattaaaaatgaaattatttataatctg

SEQ ID NO: 294138 - DNA, 97 bp, Artificial Sequence
  derived and/or modified sequence
aaataagccaacggtcataaattgcaaagccttttacaatccaaacatgatggaaacgatatgccattttgaaggtgatttgaaaagcacatggttt

SEQ ID NO: 294139 - protein, 367 aa, Artificial Sequence
  derived and/or modified sequence
MDGEDIPDFSSLKEETAYWKELSLKYKQSFQEARDELVEFQEGSRELEAELEAQLVQAEQRNRDLQADNQRLKYEVEALKEKLEHQYAQSYKQVSVLEDDLSQTRAIKEQLHKYVRELEQANDDLERAKRATIVSLEDFEQRLNQAIERNAFLESELDEKESLLVSVQRLKDEARDLRQELAVRERQQEVTRKSAPSSPTLDCEKMDSAVQASLSLPATPVGKGTENTFPSPKAIPNGFGTSPLTPSARISALNIVGDLLRKVGALESKLAACRNFAKDQASRKSYISGNVNCGVLNGNGTKFSRSGHTSFFDKGSSSSCAIRASRRRFSSSSADLAGRGGGDGSIPAQHSTGASGKAPPPTLLLET

SEQ ID NO: 294140 - protein, 543 aa, Artificial Sequence
  derived and/or modified sequence
MEGGPAVCCQDPRAELVERVAAIDVTHLEEADGGPEPTRNGVDPPPRARAASVIPGSTSRLLPARPSLSARKLSLQERPAGSYLEAQAGPYATGPASHISPRAWRRPTIESHHVAISDAEDCVQLNQYKLQSEIGKGAYGVVRLAYNESEDRHYAMKVLSKKKLLKQYGFPRRPPPRGSQAAQGGPAKQLLPLERVYQEIAILKKLDHVNVVKLIEVLDDPAEDNLYLALQNQAQNIQLDSTNIAKPHSLLPSEQQDSGSTWAARSVFDLLRKGPVMEVPCDKPFSEEQARLYLRDVILGLEYLHCQKIVHRDIKPSNLLLGDDGHVKIADFGVSNQFEGNDAQLSSTAGTPAFMAPEAISDSGQSFSGKALDVWATGVTLYCFVYGKCPFIDDFILALHRKIKNEPVVFPEEPEISEELKDLILKMLDKNPETRIGVPDIKLHPWVTKNGEEPLPSEEEHCSVVEVTEEEVKNSVRLIPSWTTVILVKSMLRKRSFGNPFEPQARREERSMSAPGNLLVKEGFGEGGKSPELPGVQEDEAAS

SEQ ID NO: 294141 - DNA, 1563 bp, Artificial Sequence
  derived and/or modified sequence
atggagggtggacccgccgtgtgctgtcaggacccgcgagccgagctagtcgaaagggtggctgcaatcgatgtgacccatttggaagaggctgacggggggcctgaacctaccagaaatggtgtagacccaccaccccgggcccgagctgcatcagtaatccctggctccacttcacggctgttgccagcccgaccgagcctgtccgcacggaaactgtcactccaggagcgacctgccggatcttacctggaggcgcaggctggtccctacgctaccgggcctgcaagtcatatctctccacgcgcatggcggcggcctaccatagagtcccaccacgtggccatctctgatgccgaagattgcgtgcaattgaaccagtataagctgcagagcgaaattggaaaaggagcgtacggcgtagtgcggttggcctataatgaatccgaagaccgccactacgcaatgaaggtgctgtctaaaaagaagctgctaaagcaatatggttttcctaggcggccaccaccgcggggcagccaagccgctcagggcggaccagccaagcaattattgccactggagcgtgtgtaccaagaaatcgccattctgaaaaagctcgaccatgttaacgtcgtcaagctgatcgaagttcttgatgaccctgccgaagataatttgtacctagccttacagaaccaggctcagaacatccagttggacagcactaacatagccaagccccatagcctgcttccctctgaacagcaggattccgggtcaacatgggccgcacgcagtgtcttcgacctgctgcgaaaaggacctgtgatggaggtgccctgtgataaaccttttagcgaagaacaggcccgactgtatcttagggacgtgatccttggcctggagtacctgcattgccagaagatcgtccacagggatattaaacctagcaacctgttactcggcgacgacggccacgttaagatagcagactttggtgtttccaaccaattcgagggaaacgatgctcagttgagctccacagccggcacgcccgctttcatggcacctgaagcaattagcgattctggacagtcattcagtggaaaagccctagatgtgtgggccaccggcgtgacactttattgttttgtgtacgggaaatgcccattcattgacgatttcatacttgcacttcatagaaagatcaagaacgaacccgtggtattccctgaggagcctgagatttctgaggagttgaaggatttaatcctgaaaatgttagataagaatcccgagactcgaattggcgtgcccgatatcaagctacacccctgggttaccaaaaatggagaggaaccactgccaagcgaggaggagcactgctctgtcgtggaagttactgaagaggaggtgaaaaatagcgttaggcttatccccagctggaccactgtcatcctggtcaagtctatgctaagaaaacgctcttttgggaatcctttcgagcctcaggctaggagagaggaacggagcatgtccgccccaggtaacctgttagtgtag

SEQ ID NO: 294142 - DNA, 1632 bp, Artificial Sequence
  derived and/or modified sequence
atggaggggggccccgccgtttgctgccaggatcccagggcagagctcgtggaacgggtggccgctatagacgtgacccaccttgaagaagctgacggcggacctgaaccgacacggaacggggtcgacccccctccgagggcgagggccgcgtcggtgatacccgggtccacctctcggctcctgcccgcgaggccatccctgtccgcacgaaaactctctctgcaggagaggcctgctgggagttatcttgaagcccaggctggcccatatgcgacgggcccggcctctcatatcagccctagggcctggcgccgcccaactattgagagccaccacgtggctatttcggatgcggaggactgtgtgcaactgaatcagtacaagctgcaatccgaaatcggaaaaggcgcatacggagtggtgcggctggcgtacaatgagagcgaggatcgtcattacgctatgaaagtcctgagcaagaagaaactgttgaaacagtatgggttcccaaggcggccccccccccgtggttcccaggctgcccagggcggacctgctaagcagcttcttcctctggaacgtgtgtatcaagagattgccatcttgaaaaagctcgaccacgtcaacgtggtaaagctcattgaggttttggatgaccctgcagaagacaatctgtatctggccctgcagaatcaggcccaaaacattcagctcgattcaacaaacatagcgaagccccatagtctgttaccttccgaacaacaggactctggatctacatgggccgccagaagcgtattcgacctgctgcgtaaaggtcccgtgatggaagtgccttgtgacaagcccttttccgaagaacaagccaggctctatctgagagacgtgattttgggactcgagtatctgcattgccagaagattgtgcatcgggacatcaagccttcgaacttactgcttggggatgatggccacgtgaaaatcgcagattttggggtgtcaaaccagtttgaaggcaatgatgcacagctgtctagcactgccggcacacccgccttcatggcacccgaagctatctctgactcaggtcagagtttttctgggaaggcattggatgtatgggccaccggggttactttgtattgctttgtttatgggaagtgcccctttattgatgacttcatcctggcacttcacaggaaaatcaagaacgagcctgtggtgttccctgaggaaccggaaatctccgaggagctgaaagatcttattctcaaaatgctcgataagaacccagagactcgcattggggtgccagatattaaactgcatccgtgggtaaccaaaaatggagaggagcctctccctagcgaggaggagcattgctcggtagtggaagttacggaagaggaagtaaagaacagtgtccgcctaattccctcctggactacagtgatcttggtgaaatccatgttgcggaagcgtagtttcggtaatccctttgagccacaggccaggcgtgaagaacggagcatgtccgccccaggcaacctgctggtgaaagagggtttcggagagggaggcaaatcccccgagttacccggcgttcaagaagatgaagctgcgtcttag

SEQ ID NO: 294143 - DNA, 1563 bp, Artificial Sequence
  derived and/or modified sequence
atggagggcggccctgctgtgtgctgccaggaccccagggctgagctggtggagcgggtggccgccattgatgtgacccacctggaggaggctgatggcggccctgagcccaccagaaatggagtggaccccccaccccgggcccgggccgccagcgtcatccctggcagcaccagccggctgctgcctgcccggcccagcctgagcgccaggaagctgagcctgcaggagaggcctgctggcagctacctggaggcccaggccggcccctatgccactggacctgccagccacatcagcccccgggcctggaggcggcccaccatcgagagccaccacgtggccatcagtgatgctgaggactgtgtgcagctgaaccagtacaagctgcagagcgagatcggcaagggggcctatggagtggtgcggctggcctacaatgaaagtgaggacagacactacgccatgaaggtgctgagcaagaagaagctgctgaagcagtatggcttcccccggcggcccccaccccggggcagccaggccgcccagggcggccctgccaagcagctgctgcccctggagcgggtgtaccaggagatcgccatcctgaagaagctggaccacgtgaatgtggtgaagctgattgaggtgctggatgatcctgctgaggacaacctgtacctggccctgcagaaccaggcccagaacatccagctggacagcaccaacatcgccaagccccacagcctgctgcccagcgagcagcaggacagcggcagcacctgggccgcccggtctgtgtttgacctgctgaggaaaggacctgtgatggaggtgccctgtgacaagcccttcagcgaggagcaggcccggctgtacctgagagatgtgatcctgggcctggagtacctgcactgccagaagatcgtgcaccgggacatcaagcccagcaacctgctgctgggagatgatggccacgtgaagattgctgactttggagtgagcaaccagtttgagggcaatgatgcccagctgagcagcacagctggcaccccagccttcatggcccctgaggccatcagtgacagcggccagagcttcagcggcaaggccctggatgtgtgggccactggagtgaccctgtactgctttgtgtatggcaagtgccccttcattgatgacttcatcctggccctgcacaggaagatcaagaatgaacctgtggtgtttcctgaggagcctgagatcagcgaggagctgaaggacctgatcctgaagatgctggacaagaaccctgagacccgcatcggcgtgcctgacatcaagctgcacccctgggtgaccaagaatggagaggagcccctgcccagcgaggaggagcactgcagcgtggtggaggtgacagaggaggaggtgaagaacagcgtgcggctcatccccagctggaccaccgtcatcctggtgaagtccatgctgaggaagaggagctttggaaacccctttgagccccaggcccggcgggaggagaggtccatgtctgcccctggcaacctgctggtgtag

SEQ ID NO: 294144 - DNA, 1632 bp, Artificial Sequence
  derived and/or modified sequence
atggagggcggccctgctgtgtgctgccaggaccccagggctgagctggtggagcgggtggccgccattgatgtgacccacctggaggaggctgatggcggccctgagcccaccagaaatggagtggaccccccaccccgggcccgggccgccagcgtcatccctggcagcaccagccggctgctgcctgcccggcccagcctgagcgccaggaagctgagcctgcaggagaggcctgctggcagctacctggaggcccaggccggcccctatgccactggacctgccagccacatcagcccccgggcctggaggcggcccaccatcgagagccaccacgtggccatcagtgatgctgaggactgtgtgcagctgaaccagtacaagctgcagagcgagatcggcaagggggcctatggagtggtgcggctggcctacaatgaaagtgaggacagacactacgccatgaaggtgctgagcaagaagaagctgctgaagcagtatggcttcccccggcggcccccaccccggggcagccaggccgcccagggcggccctgccaagcagctgctgcccctggagcgggtgtaccaggagatcgccatcctgaagaagctggaccacgtgaatgtggtgaagctgattgaggtgctggatgatcctgctgaggacaacctgtacctggccctgcagaaccaggcccagaacatccagctggacagcaccaacatcgccaagccccacagcctgctgcccagcgagcagcaggacagcggcagcacctgggccgcccggtctgtgtttgacctgctgaggaaaggacctgtgatggaggtgccctgtgacaagcccttcagcgaggagcaggcccggctgtacctgagagatgtgatcctgggcctggagtacctgcactgccagaagatcgtgcaccgggacatcaagcccagcaacctgctgctgggagatgatggccacgtgaagattgctgactttggagtgagcaaccagtttgagggcaatgatgcccagctgagcagcacagctggcaccccagccttcatggcccctgaggccatcagtgacagcggccagagcttcagcggcaaggccctggatgtgtgggccactggagtgaccctgtactgctttgtgtatggcaagtgccccttcattgatgacttcatcctggccctgcacaggaagatcaagaatgaacctgtggtgtttcctgaggagcctgagatcagcgaggagctgaaggacctgatcctgaagatgctggacaagaaccctgagacccgcatcggcgtgcctgacatcaagctgcacccctgggtgaccaagaatggagaggagcccctgcccagcgaggaggagcactgcagcgtggtggaggtgacagaggaggaggtgaagaacagcgtgcggctcatccccagctggaccaccgtcatcctggtgaagtccatgctgaggaagaggagctttggaaacccctttgagccccaggcccggcgggaggagaggtccatgtctgcccctggcaacctgctggtgaaggagggctttggagagggcggcaagagccctgagctgcccggggtgcaggaggatgaagctgccagctag

SEQ ID NO: 294145 - DNA, 1563 bp, Artificial Sequence
  derived and/or modified sequence
atggagggcggccccgccgtgtgctgccaggacccccgggccgagctggtggaaagggtcgcggcaattgatgttacacacctggaagaggcggatggtggacctgagcctacgaggaatggtgtcgacccaccacctcgggcacgggccgcgtcagtgatccccggctccacgtctaggttgctgcctgccaggcccagcctttccgccaggaaactgtccctgcaggagcggccggccggaagttacctggaggcccaggccgggccgtatgccacagggccggcctctcacatcagtccccgtgcatggaggcgacctaccatcgaatcacaccacgtcgccatatccgacgctgaagactgtgtgcagctcaatcagtataaactgcagtctgaaattgggaagggggcctacggcgtagtgcgcctggcatataatgagtccgaggaccggcactatgcgatgaaagtgctctctaagaaaaaattgcttaagcagtacggattcccccgtaggccaccaccaaggggcagccaggctgcccagggcgggcccgcaaaacagcttctgcccctcgaacgagtgtaccaggaaatcgctattctcaaaaaattggatcacgtcaatgtagtcaagttgatagaagtactggacgaccccgctgaggataatctgtacttagcccttcagaatcaggcacagaatatacagctggactccaccaacatcgcaaaacctcacagcctgctgcccagtgaacagcaggattcgggctccacatgggcggccaggagcgtgttcgatctactgagaaagggaccagtgatggaggtgccctgtgacaaaccattttcagaagagcaggccagactctaccttagggatgtgatactaggtctcgagtacctccattgccagaagattgtccatcgagacatcaaaccgtcgaatcttctcctgggagacgacgggcacgtgaaaattgctgatttcggtgtgagcaaccaattcgaaggcaacgatgctcagctgtcatctaccgcgggcactcccgcatttatggcccctgaggctatttctgatagtgggcagtcatttagtgggaaggccctggacgtgtgggccaccggggtgacgctgtattgtttcgtgtacggaaaatgccctttcatcgacgacttcatcctggccctacatcggaagattaagaacgaacctgtggtatttcccgaggaacccgagatatcagaggagctgaaagatttaattttgaagatgctggataaaaaccctgaaaccaggattggggtgccagatattaagctacacccctgggttactaaaaatggtgaagaaccgctgccatcagaagaagagcactgctcagtagttgaggttaccgaggaagaggtcaagaatagtgtccgcctcatcccttcatggactaccgtcatcctggtaaaatctatgctcaggaagcgatctttcggcaacccctttgagccacaggctcgacgcgaggaacgcagtatgagcgcaccaggaaacctcttagtctag

SEQ ID NO: 294146 - DNA, 1632 bp, Artificial Sequence
  derived and/or modified sequence
atggagggcggccccgccgtgtgctgccaggacccccgggccgagctcgtggagagggtcgccgcgatcgacgtgacacatctggaggaagcggacggaggccccgagcctacccgcaatggcgtggaccctcctcctcgggcgcgtgcagcatctgtgatccctggttccaccagccgattacttcctgcccggcccagcctgtctgcacggaagctgagcctacaggaacgacctgccggctcgtacctggaagcacaggccggtccctacgcaacaggtcccgccagccacatctccccgagagcatggcgccggcccacaatcgaatcccatcacgtggccattagcgatgccgaggactgcgtgcagctgaatcagtacaagctccagagcgaaatcggcaaaggagcatacggcgtcgtacgcctggcctacaacgagtcggaggaccgccattacgccatgaaagttctaagcaaaaagaaactgctgaaacaatatgggttcccgcgacgtccaccgccccgaggatctcaggctgcccagggcggccccgcgaaacagttattacccctcgagcgggtataccaggagatcgcaattctcaagaagctcgaccacgtcaacgttgttaagcttatcgaggtgctggacgatcctgctgaagacaacctctacctcgcactccagaaccaggctcagaacattcagttggattctactaacatcgctaaaccgcatagtctcttgccctcggagcaacaggattctggttctacgtgggccgcgcggtctgtttttgatctgctgagaaaaggcccagtaatggaggtaccatgtgataaaccctttagcgaggagcaggcacgactgtacctgcgggatgtcatcctggggctggaataccttcattgccagaagatcgtgcatagggatattaaaccttcaaatttactgctgggggatgacgggcacgtgaaaatcgctgacttcggagtgagcaaccagttcgaggggaatgacgctcagctgagcagtactgcaggcacacctgcgtttatggctccagaagccatatcagactctggacaatcatttagcggcaaggcactggatgtgtgggcaaccggcgtgaccttatattgctttgtttacggaaagtgcccgttcatcgatgacttcatccttgcattgcatagaaaaatcaaaaatgagcccgtggtgtttccggaagagccagagatctcggaagaattaaaagaccttattctaaaaatgctggataaaaaccccgagaccaggattggcgtgccagatattaagcttcacccatgggttaccaagaacggcgaggagcccctacccagcgaggaggaacattgcagcgtggtcgaggttactgaggaggaggttaagaactctgtccggcttataccaagctggaccaccgtgattctggtgaaaagcatgttacggaagcggtcctttggaaatccctttgagcctcaggcgagacgggaggagcgctctatgagcgcaccgggaaacttactggtcaaggaaggctttggcgaagggggcaagtcacccgagttacccggcgttcaggaagatgaggcggcatcatag

SEQ ID NO: 294147 - DNA, 1563 bp, Artificial Sequence
  derived and/or modified sequence
atggagggcggacccgcagtgtgctgtcaagaccccagagccgaactagtggaacgagtggccgcaattgatgtaacccatttggaagaagctgacggaggcccagaacccacacggaatggggtggatccccctccacgagccagagccgcaagtgtcataccaggcagtacttcacgactcctccctgccagaccttccttgtccgctcggaagctgagtctgcaggaacggccagccggttcctacctcgaggcacaggcaggcccatacgctacgggacccgcttctcatataagccccagagcctggcggagacctacaatcgaatcccatcacgtagcaatcagcgatgccgaggactgcgtacaacttaatcaatacaagttgcagagcgagatagggaaaggcgcttacggcgttgtgcgcctggcttacaacgaaagtgaggatagacactacgccatgaaggtcctttcaaaaaagaagttactcaagcagtatgggtttccgagacgaccccctccaaggggaagtcaggctgcccagggcggaccagcaaaacagctgctgccattggagcgagtgtatcaagagattgcaatcttgaaaaagctagaccacgtaaatgtggtgaaactcatcgaggtgctggacgacccagccgaggacaacctctacctcgcactccagaatcaagctcagaacatccagttggatagcacaaacatcgccaaaccccacagcttgctgccatccgaacaacaggacagtggctctacctgggccgcacggtctgtgtttgatctgttgcgtaagggaccagtaatggaggtgccttgtgacaagccattctccgaagaacaggctcgcctgtaccttcgggatgtcatcctcggactggagtatctgcactgccaaaagatcgtacatagggacatcaagccctcaaatctattgcttggcgacgacggccacgtgaagatcgccgactttggggtgagcaatcagtttgaaggaaatgacgcccagctgtcctccaccgcaggaacgcctgctttcatggcgcctgaagcgatcagtgattctggccaatctttttccgggaaggcgcttgatgtttgggccacaggcgtcaccctatactgtttcgtgtatggaaagtgtccgttcattgacgatttcattctggctctacaccgtaagatcaagaacgaacccgttgtttttccggaagagcctgagatctcagaggaactaaaggatctcatcctcaaaatgttggataaaaaccctgagacccgtatcggggttcccgacatcaagctgcatccttgggtcacaaaaaatggagaggaacctctgccctctgaggaagaacactgcagtgttgtggaggtgaccgaggaagaggtaaagaacagtgtgagactgattccaagctggactacagtgatcctggtgaagtcaatgctcaggaaaagaagcttcggtaatccatttgaaccacaagccaggagggaagagaggagcatgagtgcacccggaaatctgctcgtgtag

SEQ ID NO: 294148 - DNA, 1632 bp, Artificial Sequence
  derived and/or modified sequence
atggaggggggacctgccgtgtgctgccaagacccccgagcagagctggtggagagggtggctgccattgacgtgacccatctggaggaagctgacggaggtccggagccaacccgcaacggagtggatcctccccctagggctcgcgctgcaagcgtgatccccggatcaacctcgcgcctgctgcctgctcggccatcattgtccgctaggaagttatctttgcaagaacggcctgccggttcatacttagaggcccaggccggaccttacgcgacaggaccagcctctcacataagtcccagagcctggcgcaggccgaccatcgagagccaccacgtggccatcagtgatgccgaggactgcgtccagctgaatcaatacaagctccaatcagagattggaaagggggcatacggagtggtacgcttggcctacaacgaatccgaggaccgccactacgcaatgaaagttctttccaagaagaaactgctgaagcagtacgggttccctcgtcgccctcctccgagaggatcccaggccgcacaaggaggtcctgcaaaacagcttctgcctctggagagagtctatcaggaaatcgcgattctgaaaaaactcgatcatgtgaacgtggttaagctaattgaagtactcgatgaccccgcagaagacaatttgtacttggcactgcaaaaccaagcgcagaatattcagttagacagcactaatattgcaaaaccacatagtctgctgccgagcgaacaacaagattcagggtctacatgggccgctagatctgttttcgacctgctgcgcaaaggacccgttatggaggtaccatgcgataagccattcagcgaggaacaggcccgactttacctgcgcgacgtgatcttggggctggaatatttgcactgtcagaaaatcgttcaccgagacatcaagccgtcaaacctgctgcttggcgacgatggccacgtgaagattgccgattttggtgtcagcaaccagttcgagggaaatgatgcacagttgtccagtactgcgggaactccagctttcatggctccagaggctatcagcgacagtggacagtctttttcaggtaaggcgctcgacgtgtgggcaaccggggtgactctgtattgcttcgtttacgggaagtgcccctttatcgatgatttcatactcgcccttcataggaagatcaagaatgaaccagtagtgttcccagaggagcctgaaatctcagaagagctgaaggacttgattttgaaaatgctagataaaaatccggagacccgtattggagtcccggatatcaaactgcacccttgggtgacgaaaaacggcgaagagccgctgccgagcgaggaagagcactgttccgtggtggaagtcactgaggaggaagtcaagaacagcgtccgcctcatccctagctggaccaccgtaatccttgtaaagtccatgcttcgaaagcgctcctttgggaatccgttcgaacctcaggcacgcagggaggagcgaagcatgtccgcccctggaaacctgcttgtaaaggagggctttggcgagggcggtaaaagtccagagctccccggagtccaggaagatgaggccgcttcatag

SEQ ID NO: 294149 - DNA, 1563 bp, Artificial Sequence
  derived and/or modified sequence
atggaaggagggcccgccgtatgttgtcaggacccccgcgccgagctggtggaaagggttgccgcaatagatgtgacccatttggaggaggcggacggtggccccgagccaacccgaaatggtgttgatcctcccccccgagcccgggctgccagcgtgatccctgggagtacctcaaggcttttgccggctagaccaagtctgtctgccaggaagctgagcctgcaggagcgtccagctggaagttacctcgaggcacaggccggcccttatgcaactggcccagctagccacatttcacctcgcgcgtggagacggcccaccatcgaatctcatcatgtggctattagcgacgcagaagactgtgtgcagcttaatcagtacaagcttcagagcgagattgggaaaggcgcctatggcgtggttcgactcgcctataacgaatctgaggacagacattacgcaatgaaagttctatctaaaaagaaactacttaagcaatatggattcccccgccgcccgcccccacgtggctcccaggctgcccaggggggacctgctaagcagctcctaccgctggagagggtgtatcaggaaatcgccatccttaaaaaactcgatcatgtgaatgtcgtgaagctcatcgaagtgctggacgacccagctgaagacaacctgtatttggctctgcagaaccaggctcagaatatacagctggactccacgaatatcgcaaagcctcatagtcttttaccttcggagcagcaggactcaggtagcacctgggcagcacgcagtgtgttcgacctacttagaaaaggacctgttatggaggtgccttgcgacaagcctttcagcgaggagcaggctaggctttatctcagggacgtgatactcgggcttgagtacctacactgtcagaaaattgttcaccgagatattaagccaagtaacctcctcctcggggatgatgggcacgtaaaaattgcagatttcggcgtctcaaatcaattcgaaggtaacgatgctcagctctcctcaacagccggtactcctgctttcatggcgcctgaggccatatcagacagtggacaatcattctccggaaaagctctggatgtctgggctaccggcgtgaccttgtattgtttcgtgtacggaaaatgcccctttatagacgacttcatactggctttgcaccgaaagatcaagaatgagcctgtggtgtttccagaagaacctgagattagcgaggaattgaaggacctgatcctgaagatgctggataaaaaccctgagactagaatcggcgtgcccgacatcaagctccacccctgggtgactaaaaacggtgaggaaccactcccaagtgaggaagagcattgcagtgtggtcgaagtgacggaagaggaggtcaagaatagtgtccggcttataccaagctggactacggtgattctggtaaaaagcatgcttagaaagcgcagcttcggcaatccatttgagcctcaggcgcgaagagaagaacggtcgatgagcgcccccgggaatctacttgtatag

SEQ ID NO: 294150 - DNA, 1563 bp, Artificial Sequence
  derived and/or modified sequence
atggaaggcggacctgccgtgtgttgtcaagatcctagggcggaactggtggagagggtagcggcgattgacgtgacacacctagaagaggctgacggtggtccagaaccaacacgtaatggcgtagatccaccacctagggcacgggctgctagtgtgattccgggctcaacttcaagattgctgcccgctaggcccagccttagtgctcgcaagttaagtctacaggaaagacccgcaggctcatacctggaagctcaagcggggccttacgctacaggaccggcctcgcatatttccccccgcgcatggagaagacctaccatagaaagccaccatgttgcgatatccgatgccgaggactgcgtccagttgaatcaatacaagctccagagtgaaattgggaaaggcgcctacggtgtggtgagactggcttataacgagagcgaagataggcactacgctatgaaagttctctctaaaaagaagctgctcaaacagtatggattccccagaagacctccgccacggggttcccaggccgcccagggagggcccgctaagcaactcctgccgctggaaagggtttatcaggagatcgccatacttaagaaactcgatcacgtaaatgtggtgaaacttattgaagtccttgatgatcctgcggaagataacctgtacctcgccttgcaaaatcaggcccaaaacatccagttggactcaaccaatatagctaaaccccattccctgcttccctccgagcagcaggacagcggatcgacttgggctgccagatctgtcttcgatctcctgaggaagggaccagtcatggaagtaccatgcgacaagccatttagcgaagagcaggcccgtctgtacctgagagatgtcatattggggcttgagtacctacactgtcagaaaattgttcaccgagatattaagccaagtaacctcctcctcggggatgatgggcacgtaaaaattgcagatttcggcgtctcaaatcaattcgaaggtaacgatgctcagctctcctcaacagccggtactcctgctttcatggcgcctgaggccatatcagacagtggacaatcattctccggaaaagctctggatgtctgggctaccggcgtgaccttgtattgtttcgtgtacggaaaatgcccctttatagacgacttcatactggctttgcacagaaaaataaaaaatgaacccgtggtattccctgaagaacccgaaatcagcgaagaacttaaagatttgatccttaaaatgctggataagaaccctgagactaggatcggtgtccctgatatcaagttgcatccttgggtcaccaaaaacggagaagagccactgcccagtgaagaggagcactgctctgtcgtggaggtaacggaagaggaggttaaaaattcagtgagattaatcccatcctggaccacagtcattctagtcaagtccatgctgcgaaagaggtctttcggtaatcccttcgaaccacaggctcgaagggaagaaagatctatgtctgcacctggcaatctgctcgtatag

SEQ ID NO: 294151 - DNA, 2459 bp, Artificial Sequence
  derived and/or modified sequence
tctgggccccagcgaggcggtggggcggggcggggcggggcggggcgcgcagcaggagcgagtggggccgcccgccgggccgcggacactgtcgcccggcgcccaggttcccaacaaggctacgcagaagaacccccttgactgaagcaatggaggggggtccagctgtctgctgccaggatcctcgggcagagctggtagaacgggtggcagccatcgatgtgactcacttggaggaggcagatggtggcccagagcctactagaaacggtgtggaccccccaccacgggccagagctgcctctgtgatccctggcagtacttcaagactgctcccagcccggcctagcctctcagccaggaagctttccctacaggagcggccagcaggaagctatctggaggcgcaggctgggccttatgccacggggcctgccagccacatctccccccgggcctggcggaggcccaccatcgagtcccaccacgtggccatctcagatgcagaggactgcgtgcagctgaaccagtacaagctgcagagtgagattggcaagggtgcctacggtgtggtgaggctggcctacaacgaaagtgaagacagacactatgcaatgaaagtcctttccaaaaagaagttactgaagcagtatggctttccacgtcgccctcccccgagagggtcccaggctgcccagggaggaccagccaagcagctgctgcccctggagcgggtgtaccaggagattgccatcctgaagaagctggaccacgtgaatgtggtcaaactgatcgaggtcctggatgacccagctgaggacaacctctatttggccctgcagaaccaggcccagaatatccagttagattcaacaaatatcgccaagccccactccctgcttccctctgagcagcaagacagtggatccacgtgggctgcgcgctcagtgtttgacctcctgagaaaggggcccgtcatggaagtgccctgtgacaagcccttctcggaggagcaagctcgcctctacctgcgggacgtcatcctgggcctcgagtacttgcactgccagaagatcgtccacagggacatcaagccatccaacctgctcctgggggatgatgggcacgtgaagatcgccgactttggcgtcagcaaccagtttgaggggaacgacgctcagctgtccagcacggcgggaaccccagcattcatggcccccgaggccatttctgattccggccagagcttcagtgggaaggccttggatgtatgggccactggcgtcacgttgtactgctttgtctatgggaagtgcccattcatcgacgatttcatcctggccctccacaggaagatcaagaatgagcccgtggtgtttcctgaggagccagaaatcagcgaggagctcaaggacctgatcctgaagatgttagacaagaatcccgagacgagaattggggtgccagacatcaagttgcacccttgggtgaccaagaacggggaggagccccttccttcggaggaggagcactgcagcgtggtggaggtgacagaggaggaggttaagaactcagtcaggctcatccccagctggaccacggtgatcctggtgaagtccatgctgaggaagcgttcctttgggaacccgtttgagccccaagcacggagggaagagcgatccatgtctgctccaggaaacctactggtgtaagtactggtgggccagggactgccgggcactccctggagttgggtggggaggtctgaggcccatcctcccactctcactgtcgttgggccaaggccagagcctggggacttggccaggtctcggtgttggccccatttgcatctctgtccccaaggttagtcggggctagaagggaccttttgggcccagctcttgcttcattcctggggccagcatccctcacacacacacttccagggatgaggagctcacgcagcccctccatgggacaggaagacccttcttccatgcagcttgatgtcactctctcactgggtccagcccctctggggcttcaaatctgtggccccctcagcccttggcagcctggcagaggtttgcagacaggctgatgttggcttcctgtaggaggctggcgggctgtagaggaggggtgctggcccctctgcctggccctggggactgttggctgctctcccaagtggcccaggctgcctgcagccattgctggggctctgtgcccagtcagcactttgtgagtgcttgttcagtgagtaagcagggacaggctggccggtggaccacgggagaggaacccgcattggccgagggctccctatggtgagccacgcctgtgggttcaccacctcctaggagggtccagaaaagcagctccccaagcctgtgcgcctcgtcctcagcagatccaccttcttcactataataaaagccagtctgggatgctaa

SEQ ID NO: 294152 - DNA, 3660 bp, Artificial Sequence
  derived and/or modified sequence
ctgggccccagcgaggcggtggggcggggcggggcggggcggggcgcgcagcaggagcgagtggggccgcccgccgggccgcggacactgtcgcccggcgcccaggttcccaacaaggctacgcagaagaacccccttgactgaagcaatggaggggggtccagctgtctgctgccaggatcctcgggcagagctggtagaacgggtggcagccatcgatgtgactcacttggaggaggcagatggtggcccagagcctactagaaacggtgtggaccccccaccacgggccagagctgcctctgtgatccctggcagtacttcaagactgctcccagcccggcctagcctctcagccaggaagctttccctacaggagcggccagcaggaagctatctggaggcgcaggctgggccttatgccacggggcctgccagccacatctccccccgggcctggcggaggcccaccatcgagtcccaccacgtggccatctcagatgcagaggactgcgtgcagctgaaccagtacaagctgcagagtgagattggcaagggtgcctacggtgtggtgaggctggcctacaacgaaagtgaagacagacactatgcaatgaaagtcctttccaaaaagaagttactgaagcagtatggctttccacgtcgccctcccccgagagggtcccaggctgcccagggaggaccagccaagcagctgctgcccctggagcgggtgtaccaggagattgccatcctgaagaagctggaccacgtgaatgtggtcaaactgatcgaggtcctggatgacccagctgaggacaacctctatttggccctgcagaaccaggcccagaatatccagttagattcaacaaatatcgccaagccccactccctgcttccctctgagcagcaagacagtggatccacgtgggctgcgcgctcagtgtttgacctcctgagaaaggggcccgtcatggaagtgccctgtgacaagcccttctcggaggagcaagctcgcctctacctgcgggacgtcatcctgggcctcgagtacttgcactgccagaagatcgtccacagggacatcaagccatccaacctgctcctgggggatgatgggcacgtgaagatcgccgactttggcgtcagcaaccagtttgaggggaacgacgctcagctgtccagcacggcgggaaccccagcattcatggcccccgaggccatttctgattccggccagagcttcagtgggaaggccttggatgtatgggccactggcgtcacgttgtactgctttgtctatgggaagtgcccattcatcgacgatttcatcctggccctccacaggaagatcaagaatgagcccgtggtgtttcctgaggagccagaaatcagcgaggagctcaaggacctgatcctgaagatgttagacaagaatcccgagacgagaattggggtgccagacatcaagttgcacccttgggtgaccaagaacggggaggagccccttccttcggaggaggagcactgcagcgtggtggaggtgacagaggaggaggttaagaactcagtcaggctcatccccagctggaccacggtgatcctggtgaagtccatgctgaggaagcgttcctttgggaacccgtttgagccccaagcacggagggaagagcgatccatgtctgctccaggaaacctactggtgaaagaagggtttggtgaagggggcaagagcccagagctccccggcgtccaggaagacgaggctgcatcctgagcccctgcatgcacccagggccacccggcagcacactcatcccgcgcctccagaggcccacccctcatgcaacagccgcccccgcaggcagggggctggggactgcagccccactcccgcccctcccccatcgtgctgcatgacctccacgcacgcacgtccagggacagactggaatgtatgtcatttggggtcttgggggcagggctcccacgaggccatcctcctcttcttggacctccttggcctgacccattctgtggggaaaccgggtgcccatggagcctcagaaatgccacccggctggttggcatggcctggggcaggaggcagaggcaggagaccaagatggcaggtggaggccaggcttaccacaacggaagagacctcccgctggggccgggcaggcctggctcagctgccacaggcatatggtggagaggggggtaccctgcccaccttggggtggtggcaccagagctcttgtctattcagacgctggtatgggggctcggacccctcactggggacagggccagtgttggagaattctgattccttttttgttgtcttttacttttgtttttaacctgggggttcggggagaggccctgcttgggaacatctcacgagctttcctacatcttccgtggttcccagcacagcccaagattatttggcagccaagtggatggaactaactttcctggactgtgtttcgcattcggcgttatctggaaagtggactgaacggaatcaagctctgagcagaggcctgaagcggaagcaccacatcgtccctgcccatctcactctctcccttgatgatgcccctagagctgaggctggagaagacaccagggctgactttgaccgagggccatggacgcgacaggcctgtggccctgcgcatgctgaaataactggaacccagcctctcctcctacaccggcctacccatctgggcccaagagctgcactcacactcctacaacgaaggacaaactgtccaggtcggagggatcacgagacacagaacctggaggggtgtgcacgctggcaggtggcctctgcggcaattgcctcaccctgaggacatcagcagtcagcctgctcagagcgggggtgctggagcgcgtgcagacacagctcttccggagcagccttcaccttctctctgggatcagtgtccggctggccgacgtggcatttgctgaccgaatgctcatagaggttgacccccacagggtcacgcaggactcggacactgccctggaaacatggatggacaagggcttttggccacaggtgtgggtgtcctgttggaggagggcttgtttggagaagggaggctggctgggggagaaacccggatcccgctgcatctccgcgcctgtgggtgcatgtcgcgtgctcatctgttgcacacagctcactcgtatgtcctgcactggtacatgcatctgtaatacagtttctacgtctatttaaggctaggagccgaatgtgccccattgtcagtgggtccacgtttctccccggctcctctgggctaaggcagtgtggcccgaagcttaaaaagttactcggtactgtttttaagaacacttttatagagttagtggaaggcaagttaagagccaatcactgatccccaagtgtttcttgagcatctggtctggggggaccactttgatcggacccacccttggaaagctcaggggtaggcccaggtgggatgctcaccctgtcactgagggttttggttggcatcgttgtttttgaatgtagcacaagcgatgagcaaactctataagagtgttttaaaaattaacttcccaggaagtgagttaaaaacaataaaagccctttcttgagtt

SEQ ID NO: 294153 - DNA, 1563 bp, Artificial Sequence
  derived and/or modified sequence
atggagggcggccccgccgtgtgctgccaggaccccagagccgagctggtggagagagtggccgccatcgacgtgacccacctggaggaggccgacggcggccccgagcccaccagaaacggcgtggaccccccccccagagccagagccgccagcgtgatccccggcagcaccagcagactgctgcccgccagacccagcctgagcgccagaaagctgagcctgcaggagagacccgccggcagctacctggaggcccaggccggcccctacgccaccggccccgccagccacatcagccccagagcctggagaagacccaccatcgagagccaccacgtggccatcagcgacgccgaggactgcgtgcagctgaaccagtacaagctgcagagcgagatcggcaagggcgcctacggcgtggtgagactggcctacaacgagagcgaggacagacactacgccatgaaggtgctgagcaagaagaagctgctgaagcagtacggcttccccagaagacccccccccagaggcagccaggccgcccagggcggccccgccaagcagctgctgcccctggagagagtgtaccaggagatcgccatcctgaagaagctggaccacgtgaacgtggtgaagctgatcgaggtgctggacgaccccgccgaggacaacctgtacctggccctgcagaaccaggcccagaacatccagctggacagcaccaacatcgccaagccccacagcctgctgcccagcgagcagcaggacagcggcagcacctgggccgccagaagcgtgttcgacctgctgagaaagggccccgtgatggaggtgccctgcgacaagcccttcagcgaggagcaggccagactgtacctgagagacgtgatcctgggcctggagtacctgcactgccagaagatcgtgcacagagacatcaagcccagcaacctgctgctgggcgacgacggccacgtgaagatcgccgacttcggcgtgagcaaccagttcgagggcaacgacgcccagctgagcagcaccgccggcacccccgccttcatggcccccgaggccatcagcgacagcggccagagcttcagcggcaaggccctggacgtgtgggccaccggcgtgaccctgtactgcttcgtgtacggcaagtgccccttcatcgacgacttcatcctggccctgcacagaaagatcaagaacgagcccgtggtgttccccgaggagcccgagatcagcgaggagctgaaggacctgatcctgaagatgctggacaagaaccccgagaccagaatcggcgtgcccgacatcaagctgcacccctgggtgaccaagaacggcgaggagcccctgcccagcgaggaggagcactgcagcgtggtggaggtgaccgaggaggaggtgaagaacagcgtgagactgatccccagctggaccaccgtgatcctggtgaagagcatgctgagaaagagaagcttcggcaaccccttcgagccccaggccagaagagaggagagaagcatgagcgcccccggcaacctgctggtgtag

SEQ ID NO: 294154 - DNA, 1632 bp, Artificial Sequence
  derived and/or modified sequence
atggagggcggccccgccgtgtgctgccaggaccccagagccgagctggtggagagagtggccgccatcgacgtgacccacctggaggaggccgacggcggccccgagcccaccagaaacggcgtggaccccccccccagagccagagccgccagcgtgatccccggcagcaccagcagactgctgcccgccagacccagcctgagcgccagaaagctgagcctgcaggagagacccgccggcagctacctggaggcccaggccggcccctacgccaccggccccgccagccacatcagccccagagcctggagaagacccaccatcgagagccaccacgtggccatcagcgacgccgaggactgcgtgcagctgaaccagtacaagctgcagagcgagatcggcaagggcgcctacggcgtggtgagactggcctacaacgagagcgaggacagacactacgccatgaaggtgctgagcaagaagaagctgctgaagcagtacggcttccccagaagacccccccccagaggcagccaggccgcccagggcggccccgccaagcagctgctgcccctggagagagtgtaccaggagatcgccatcctgaagaagctggaccacgtgaacgtggtgaagctgatcgaggtgctggacgaccccgccgaggacaacctgtacctggccctgcagaaccaggcccagaacatccagctggacagcaccaacatcgccaagccccacagcctgctgcccagcgagcagcaggacagcggcagcacctgggccgccagaagcgtgttcgacctgctgagaaagggccccgtgatggaggtgccctgcgacaagcccttcagcgaggagcaggccagactgtacctgagagacgtgatcctgggcctggagtacctgcactgccagaagatcgtgcacagagacatcaagcccagcaacctgctgctgggcgacgacggccacgtgaagatcgccgacttcggcgtgagcaaccagttcgagggcaacgacgcccagctgagcagcaccgccggcacccccgccttcatggcccccgaggccatcagcgacagcggccagagcttcagcggcaaggccctggacgtgtgggccaccggcgtgaccctgtactgcttcgtgtacggcaagtgccccttcatcgacgacttcatcctggccctgcacagaaagatcaagaacgagcccgtggtgttccccgaggagcccgagatcagcgaggagctgaaggacctgatcctgaagatgctggacaagaaccccgagaccagaatcggcgtgcccgacatcaagctgcacccctgggtgaccaagaacggcgaggagcccctgcccagcgaggaggagcactgcagcgtggtggaggtgaccgaggaggaggtgaagaacagcgtgagactgatccccagctggaccaccgtgatcctggtgaagagcatgctgagaaagagaagcttcggcaaccccttcgagccccaggccagaagagaggagagaagcatgagcgcccccggcaacctgctggtgaaggagggcttcggcgagggcggcaagagccccgagctgcccggcgtgcaggaggacgaggccgccagctag

SEQ ID NO: 294155 - RNA, 1563 nt, Artificial Sequence
  derived and/or modified sequence
auggaaggagggcccgccguauguugucaggacccccgcgccgagcugguggaaaggguugccgcaauagaugugacccauuuggaggaggcggacgguggccccgagccaacccgaaaugguguugauccucccccccgagcccgggcugccagcgugaucccugggaguaccucaaggcuuuugccggcuagaccaagucugucugccaggaagcugagccugcaggagcguccagcuggaaguuaccucgaggcacaggccggcccuuaugcaacuggcccagcuagccacauuucaccucgcgcguggagacggcccaccaucgaaucucaucauguggcuauuagcgacgcagaagacugugugcagcuuaaucaguacaagcuucagagcgagauugggaaaggcgccuauggcgugguucgacucgccuauaacgaaucugaggacagacauuacgcaaugaaaguucuaucuaaaaagaaacuacuuaagcaauauggauucccccgccgcccgcccccacguggcucccaggcugcccaggggggaccugcuaagcagcuccuaccgcuggagaggguguaucaggaaaucgccauccuuaaaaaacucgaucaugugaaugucgugaagcucaucgaagugcuggacgacccagcugaagacaaccuguauuuggcucugcagaaccaggcucagaauauacagcuggacuccacgaauaucgcaaagccucauagucuuuuaccuucggagcagcaggacucagguagcaccugggcagcacgcaguguguucgaccuacuuagaaaaggaccuguuauggaggugccuugcgacaagccuuucagcgaggagcaggcuaggcuuuaucucagggacgugauacucgggcuugaguaccuacacugucagaaaauuguucaccgagauauuaagccaaguaaccuccuccucggggaugaugggcacguaaaaauugcagauuucggcgucucaaaucaauucgaagguaacgaugcucagcucuccucaacagccgguacuccugcuuucauggcgccugaggccauaucagacaguggacaaucauucuccggaaaagcucuggaugucugggcuaccggcgugaccuuguauuguuucguguacggaaaaugccccuuuauagacgacuucauacuggcuuugcaccgaaagaucaagaaugagccugugguguuuccagaagaaccugagauuagcgaggaauugaaggaccugauccugaagaugcuggauaaaaacccugagacuagaaucggcgugcccgacaucaagcuccaccccugggugacuaaaaacggugaggaaccacucccaagugaggaagagcauugcaguguggucgaagugacggaagaggaggucaagaauaguguccggcuuauaccaagcuggacuacggugauucugguaaaaagcaugcuuagaaagcgcagcuucggcaauccauuugagccucaggcgcgaagagaagaacggucgaugagcgcccccgggaaucuacuuguauag

SEQ ID NO: 294156 - RNA, 1563 nt, Artificial Sequence
  derived and/or modified sequence
auggaaggcggaccugccguguguugucaagauccuagggcggaacugguggagaggguagcggcgauugacgugacacaccuagaagaggcugacggugguccagaaccaacacguaauggcguagauccaccaccuagggcacgggcugcuagugugauuccgggcucaacuucaagauugcugcccgcuaggcccagccuuagugcucgcaaguuaagucuacaggaaagacccgcaggcucauaccuggaagcucaagcggggccuuacgcuacaggaccggccucgcauauuuccccccgcgcauggagaagaccuaccauagaaagccaccauguugcgauauccgaugccgaggacugcguccaguugaaucaauacaagcuccagagugaaauugggaaaggcgccuacgguguggugagacuggcuuauaacgagagcgaagauaggcacuacgcuaugaaaguucucucuaaaaagaagcugcucaaacaguauggauuccccagaagaccuccgccacgggguucccaggccgcccagggagggcccgcuaagcaacuccugccgcuggaaaggguuuaucaggagaucgccauacuuaagaaacucgaucacguaaauguggugaaacuuauugaaguccuugaugauccugcggaagauaaccuguaccucgccuugcaaaaucaggcccaaaacauccaguuggacucaaccaauauagcuaaaccccauucccugcuucccuccgagcagcaggacagcggaucgacuugggcugccagaucugucuucgaucuccugaggaagggaccagucauggaaguaccaugcgacaagccauuuagcgaagagcaggcccgucuguaccugagagaugucauauuggggcuugaguaccuacacugucagaaaauuguucaccgagauauuaagccaaguaaccuccuccucggggaugaugggcacguaaaaauugcagauuucggcgucucaaaucaauucgaagguaacgaugcucagcucuccucaacagccgguacuccugcuuucauggcgccugaggccauaucagacaguggacaaucauucuccggaaaagcucuggaugucugggcuaccggcgugaccuuguauuguuucguguacggaaaaugccccuuuauagacgacuucauacuggcuuugcacagaaaaauaaaaaaugaacccgugguauucccugaagaacccgaaaucagcgaagaacuuaaagauuugauccuuaaaaugcuggauaagaacccugagacuaggaucggugucccugauaucaaguugcauccuugggucaccaaaaacggagaagagccacugcccagugaagaggagcacugcucugucguggagguaacggaagaggagguuaaaaauucagugagauuaaucccauccuggaccacagucauucuagucaaguccaugcugcgaaagaggucuuucgguaaucccuucgaaccacaggcucgaagggaagaaagaucuaugucugcaccuggcaaucugcucguauag

SEQ ID NO: 294157 - protein, 604 aa, Artificial Sequence
  derived and/or modified sequence
MMRAVWEALAALAAVACLVGAVRGGPGLSMFAGQAAQPDPCSDENGHPRRCIPDFVNAAFGKDVRVSSTCGRPPARYCVVSERGEERLRSCHLCNASDPKKAHPPAFLTDLNNPHNLTCWQSENYLQFPHNVTLTLSLGKKFEVTYVSLQFCSPRPESMAIYKSMDYGRTWVPFQFYSTQCRKMYNRPHRAPITKQNEQEAVCTDSHTDMRPLSGGLIAFSTLDGRPSAHDFDNSPVLQDWVTATDIRVAFSRLHTFGDENEDDSELARDSYFYAVSDLQVGGRCKCNGHAARCVRDRDDSLVCDCRHNTAGPECDRCKPFHYDRPWQRATAREANECVACNCNLHARRCRFNMELYKLSGRKSGGVCLNCRHNTAGRHCHYCKEGYYRDMGKPITHRKACKACDCHPVGAAGKTCNQTTGQCPCKDGVTGITCNRCAKGYQQSRSPIAPCIKIPVAPPTTAASSVEEPEDCDSYCKASKGKLKINMKKYCKKDYAVQIHILKADKAGDWWKFTVNIISVYKQGTSRIRRGDQSLWIRSRDIACKCPKIKPLKKYLLLGNAEDSPDQSGIVADKSSLVIQWRDTWARRLRKFQQREKKGKCKKA

SEQ ID NO: 294158 - protein, 153 aa, Artificial Sequence
  derived and/or modified sequence
HYCKEGYYRDMGKPITHRKACKACDCHPVGAAGKTCNQTTGQCPCKDGVTGITCNRCAKGYQQSRSPIAPCIKIPVAPPTTAASSVEEPEAARQPNTFQAEGLSLLPGAAEKEGARCWGYRRRLGHRVAQAECRGPRSWAWGRITSSFSFASN

SEQ ID NO: 294159 - DNA, 1815 bp, Artificial Sequence
  derived and/or modified sequence
atgatgcgggccgtgtgggaggccctggccgccctggccgccgtggcttgcttagtgggtgctgttcgcggcggccctggcctgagcatgtttgccggccaggccgcccagcccgatccgtgctcagacgaaaatgggcaccctcgacggtgcatcccagactttgtcaatgccgctttcggtaaggacgtgagagtctcatcaacgtgtggcaggccacccgcgcggtactgtgttgtcagcgagcgaggtgaggagcgactgcgatcttgtcatctgtgtaacgccagtgaccctaagaaagcccatcccccagcgtttctgacggatttgaataacccccacaaccttacctgttggcagagcgaaaattatttacagttccctcataatgtcacactaacactgtccctcgggaaaaagtttgaagtgacttatgtgtctctgcaattctgctcacccaggcctgagtccatggccatctataaaagcatggactacggccgaacttgggtgccttttcagttctattctactcagtgccgcaaaatgtacaacaggccgcaccgagcccccattaccaagcaaaatgagcaagaagccgtgtgtaccgacagccacaccgacatgaggcccctgagtggtgggctcattgccttctccaccctggacggccggccgtcggcccatgatttcgataattctccagtgttgcaggactgggtgactgccacagacatccgagtggcctttagtaggttacatacatttggcgatgaaaacgaggatgacagtgagctggccagggacagctatttctatgccgtatctgacctgcaagtcggagggcgctgtaagtgcaatggccatgctgctcgctgtgtgagggatcgcgacgatagcctggtctgtgactgccgtcacaatactgcgggaccagaatgtgaccgctgcaagccatttcattacgaccgcccttggcaacgggccaccgcaagagaagcaaacgagtgtgtcgcatgcaattgcaacctgcatgccaggcggtgccggtttaatatggagctctataagctgtctggaaggaagagtggtggcgtctgcctcaactgcaggcataacactgcaggacgccactgccactattgtaaggagggctactatcgggatatgggtaagcccattacccacaggaaggcttgtaaggcatgcgactgtcaccccgtgggtgctgctggcaagacctgtaatcaaactacaggtcaatgcccttgtaaagatggggtgacaggcattacatgcaatcggtgcgcgaagggctatcagcagtccagatcacccattgcgccctgtataaaaatcccagttgccccacctacaaccgctgcatcgagtgtggaggaacccgaggattgtgattcctattgcaaggctagcaaaggcaaattaaaaattaacatgaaaaagtattgcaaaaaggactatgccgtgcagatacatatcctaaaagccgataaagccggagactggtggaaattcacagttaatattatttccgtttacaaacagggaacctcccggattcgccgtggagaccagtccttatggatccgcagccgtgacatcgcgtgcaaatgccccaagattaagcccctgaagaagtacctcctcttgggtaatgccgaagattctcccgatcagtcaggcatcgttgccgacaagtcttccctcgtgattcagtggagagacacctgggctcgcaggttacggaaattccaacagcgcgagaagaaaggcaaatgtaaaaaagcctag

SEQ ID NO: 294160 - DNA, 1815 bp, Artificial Sequence
  derived and/or modified sequence
atgatgcgggccgtgtgggaggccctggccgccctggccgccgtggcctgcctggttggggctgttagaggcggacctgggttgtcaatgttcgctggacaggcagcccagcctgacccttgctccgacgaaaatgggcatccccgaaggtgtatacctgattttgtgaatgccgcattcgggaaggatgtgcgagtgagctccacatgcggacgccctcccgctaggtattgtgtggtgtctgagcggggggaggaacgtctaagatcttgtcatttatgtaatgcctcggaccctaaaaaagctcaccctcctgccttcctgaccgatctcaacaacccccacaacctcacgtgttggcagtccgagaattaccttcagtttccacacaacgtaacactgactctttccctggggaagaaattcgaagtcacctatgtgtctctacagttctgctcccctagacctgaatccatggctatctacaagtctatggactatggaaggacatgggtgcccttccagttctacagtacacagtgtagaaagatgtacaacagaccccatagggccccaatcacgaagcagaatgaacaggaagccgtgtgcaccgactcacataccgacatgaggccgttatccgggggcctgatcgctttctctacccttgacggtcgcccttccgcccacgattttgataattcccccgtgttacaggattgggtgaccgctacagatattcgcgtggctttctcccgactccacaccttcggtgatgagaatgaggacgacagcgaactggcacgagacagctacttttacgctgtgtcggatcttcaagtcggggggcgctgcaagtgcaacggccacgctgcccggtgcgtgagggacagggatgactctttggtttgtgactgtcgccacaacacagcaggtcccgagtgcgataggtgcaagccctttcattatgatagaccttggcagagagcaaccgccagagaggccaatgaatgtgtggcttgcaactgcaacttgcacgctagaaggtgcaggtttaatatggaactctacaaactctccggccgcaagtcgggtggagtatgcctgaattgccgccacaatacagctgggaggcactgccattattgtaaggaaggttactaccgagatatgggtaagcccatcacacatcgcaaggcttgtaaggcctgtgattgccacccagtgggagccgccggaaaaacctgtaaccagaccacaggtcagtgcccctgtaaggatggagttacaggcatcacatgcaaccgctgcgcaaaggggtaccaacagagtagaagtcccatcgcaccatgcatcaagataccggtcgccccccccacaacagccgctagtagcgtggaggaacctgaggactgtgattcctactgcaaggccagcaaaggcaagttaaagatcaatatgaaaaagtattgtaaaaaggactacgccgtccagatacacattctgaaagctgataaggcgggagattggtggaagtttaccgtgaatataatctcagtgtataagcaaggtaccagtaggatccggcgcggcgatcaatctctctggattcgtagtcgtgatatagcatgtaagtgtccaaaaatcaagcctttaaagaagtatctccttctggggaacgcagaagattcaccagaccagagtggaattgtcgcagataagtcctccctcgtgatccaatggcgtgacacatgggcacgccggctgcgcaagttccaacagagggaaaagaaaggcaagtgtaaaaaagcctag

SEQ ID NO: 294161 - DNA, 1815 bp, Artificial Sequence
  derived and/or modified sequence
atgatgcgtgcggtatgggaggctttggccgcactcgcggctgtggcttgtctggtgggcgctgtgcggggaggcccaggcctgagcatgtttgccggacaggcggctcagccggatccatgctcggatgagaatggccatccccgacgttgtattccggatttcgttaacgcggcattcggcaaggatgttcgcgtgagttccacatgcgggcgaccacctgctcgctattgcgtggtttccgaacgtggggaggagagactcaggtcctgccacttatgtaatgcatcggatcctaagaaggcccatccgcctgcctttcttacagacctgaacaatccacacaacttgacctgctggcagtccgaaaattacctacaattcccacacaacgtgaccttgacgttatccctgggaaagaaatttgaggtgacttacgtgtccctccagttttgttcccctcgtccagaatccatggcgatctataaatcaatggactatgggagaacttgggtgccgtttcagttttactccacacagtgtaggaaaatgtacaatagaccccatcgcgcaccaataacaaaacaaaatgagcaagaggctgtgtgcactgactctcacaccgacatgcgcccactgagtggcggtttaattgccttctctaccctggacgggcgtccttccgcccacgacttcgataactcacccgtcctgcaagactgggtgactgccactgacatcagggtggccttcagccggctccacactttcggcgatgaaaatgaagacgattcagagctggctcgggattcctacttctatgccgtgtccgatctgcaggtcggaggaagatgcaaatgtaacggtcatgccgctaggtgcgtgcgcgaccgagacgatagcctggtatgcgattgccggcacaataccgccggaccggagtgcgacaggtgcaaaccgtttcactacgaccggccatggcagcgcgctactgcaagagaggccaacgagtgcgtggcctgcaactgcaatctgcatgctaggcggtgtcgattcaacatggagctgtacaagctctccggacgcaagtcagggggtgtctgcctcaattgccggcataacacagctgggcgtcattgccattattgtaaggagggatattatcgcgacatgggcaagcctatcacacatcgcaaagcttgtaaggcatgcgactgccaccccgtgggggcagcgggaaagacctgtaatcagacgaccggccagtgcccatgcaaggacggagtgactggaattacttgtaaccgttgtgctaaaggctatcagcagagccgaagcccaatcgctccttgcatcaaaataccggtcgctccgccaacaacagccgcaagctcagttgaggagcccgaagattgcgactcctattgcaaagcaagtaaaggtaagctaaagatcaatatgaaaaaatattgcaaaaaggactacgctgtgcagattcatattttaaaggccgacaaggcaggtgattggtggaagtttacagtcaatataatctctgtgtacaagcaaggaacctcgcgtattaggagaggcgatcaaagcttatggatccggtccagggatatcgcgtgcaagtgtccaaagattaagcccctaaagaaatacttgctcttaggtaatgccgaagacagccccgatcaaagtgggattgtcgccgataaaagctccttggtgattcagtggagagacacctgggccaggcgactgcggaagttccagcagagagaaaaaaaaggcaagtgcaaaaaggcctag

SEQ ID NO: 294162 - DNA, 462 bp, Artificial Sequence
  derived and/or modified sequence
cattactgcaaggagggttattatcgggacatgggcaaacccattacccataggaaagcgtgtaaggcatgtgactgtcaccctgtgggagctgctggtaaaacatgcaatcagacaaccgggcagtgtccatgtaaggacggggtcacaggcataacatgtaatagatgtgccaaaggttaccagcaaagtagaagtcctattgcgccttgtatcaaaattccagtggctccacctaccaccgcagcctcctctgttgaggagcccgaggccgctcgacagcctaacacctttcaggctgaaggtctgtctttgttacccggtgctgctgaaaaggaaggagccaggtgttgggggtacagaagacgactgggacaccgggtcgcccaggccgaatgccgtggtcccaggtcctgggcatggggacggatcacaagcagcttttcttttgccagtaactag

SEQ ID NO: 294163 - DNA, 1815 bp, Artificial Sequence
  derived and/or modified sequence
atgatgagggccgtctgggaagccctggcggcattggccgcagtcgcatgtcttgtgggcgctgtgagggggggacctgggctgtctatgtttgctggtcaggccgcacagcccgacccttgtagtgacgaaaatggccaccccaggaggtgcattccagattttgttaacgctgctttcggcaaagacgtgagggtgtcctcaacttgtggaagacctccagccaggtattgcgtggtatcggaacgaggtgaagagcgcctgaggagctgccacctctgtaacgcctctgaccctaaaaaggcccacccaccagcgtttttgacagatctcaacaacccgcacaacctcacatgttggcaatcagagaactaccttcagtttccgcacaacgtgaccctgactttatctctaggtaaaaaatttgaggtgacttatgtatcactgcagttctgctcacccagaccagagtctatggcaatatacaagtcaatggattacggacgcacatgggtgccgttccagttctattccacccagtgccgaaagatgtataatcgaccgcacagggcacccattaccaagcagaatgaacaggaggcagtctgtactgattctcacaccgatatgcggcctctctccggagggctgatcgctttcagcactctggacgggcgacccagtgcacatgatttcgacaattcaccagtgctccaggattgggtgacagccaccgacatccgtgtggccttttctcggcttcatacatttggtgatgaaaatgaggacgattctgaactcgctcgagattcgtatttctacgccgtcagcgacctacaggtaggcggtaggtgcaaatgtaacggccacgctgccaggtgtgtgagagatagagatgacagcctggtttgcgactgcaggcacaacaccgccggaccggaatgcgatagatgtaaacccttccactacgatcggccttggcaacgggctaccgccagagaggcaaatgagtgtgtggcatgtaattgtaacctgcacgcgcgtagatgtcggttcaatatggaattgtataagctgagtggcaggaagtcaggcggagtgtgtctcaactgtaggcacaatacagccggaaggcattgccattactgcaaggagggttactatcgggatatgggcaagccaatcacccacaggaaggcctgtaaagcatgcgactgccatcctgtcggcgcagctggcaaaacttgcaaccagacaaccggccagtgcccctgtaaagacggagtcaccggcattacttgcaatcgctgtgccaaaggctatcagcagtccagaagtcccatagcaccctgtattaagatacctgtcgctccacccaccactgccgcttccagcgtcgaggaacccgaagactgtgatagctactgcaaggcctcaaagggaaaactcaagatcaacatgaaaaagtactgtaaaaaagactatgccgtccagatccatatcctcaaggccgataaagcaggcgattggtggaagttcacagtaaatattatctcagtctataaacagggaacctcgcggatcagaaggggcgaccagtcactgtggatcaggtcacgcgatattgcctgtaagtgcccaaaaatcaagcccctcaagaaatacctccttcttggcaatgccgaggatagcccagatcagtcaggaattgttgcagacaagtcttcacttgttatccaatggcgcgacacttgggccaggcgccttagaaaatttcagcagcgggagaaaaaagggaagtgtaagaaggcctag

SEQ ID NO: 294164 - DNA, 1815 bp, Artificial Sequence
  derived and/or modified sequence
atgatgcgcgctgtgtgggaggccctggcagccctggccgctgtcgcatgccttgtgggggctgtgcgcggtggtccaggactgagcatgttcgccggtcaggcggctcaaccagacccatgcagcgacgaaaatggtcatccccgacggtgcattcctgatttcgtcaatgctgcattcggaaaggacgtacgggtctcctcaacctgtggacgaccccctgcgagatactgtgtcgtatctgagcgaggtgaggagcgtctgcggtcttgccacttgtgcaatgccagcgacccaaagaaggcccacccccctgccttcctcacagacttgaataacccgcacaacctgacgtgctggcagtctgagaactacctccaattcccacacaacgtgacccttaccctcagtctcggcaagaagttcgaagtgacttacgtctctcttcagttttgctctcctcgaccagagtctatggctatatacaagagcatggattatggtcgcacgtgggtgccctttcagttctactccacccagtgtagaaaaatgtacaatcggccacaccgcgcacccatcaccaagcagaatgaacaggaggcagtatgtactgactcccacacagacatgagaccgctgagtgggggacttatcgcgtttagcactttagatgggaggccgtccgcacatgattttgataatagtcctgtcctgcaggactgggttaccgctacagacattcgagtggcctttagtcggctacatactttcggcgacgagaatgaagacgactcggagcttgcccgtgatagctatttctacgcagtgtccgacctgcaggtcggaggcaggtgcaagtgtaatgggcacgccgcacggtgcgtccgcgatcgggacgatagtttggtgtgtgattgtcgacacaatacagctggacctgagtgtgatagatgcaaacccttccattacgatagaccctggcagcgcgcaactgccagggaggccaatgagtgcgtagcctgcaactgcaacttacacgcacgcaggtgtaggtttaacatggaactgtataaactgtccgggcgtaaaagtggtggtgtgtgcctgaattgtagacacaacactgccggacgccactgtcactattgtaaggaggggtattatagagacatgggcaaacccatcacccaccggaaagcttgtaaagcatgcgattgtcacccagtaggcgcagccggtaagacctgtaaccagacgacaggacagtgtccctgcaaggatggggtcacaggcattacatgtaatagatgcgccaaaggctatcagcaatccaggtctccaatagctccttgcataaagattcctgtagcacctcctacgacggctgcctccagcgttgaggaacctgaagattgcgatagctattgtaaggccagcaagggaaaattgaaaattaatatgaagaagtactgtaagaaggactatgctgtgcagattcacattctcaaggccgacaaggcgggtgactggtggaaattcaccgtgaacattatctccgtgtataaacaggggactagtcgtatccgtagaggcgaccagtcactgtggatccggtctcgggatatcgcttgcaaatgcccaaagattaagcctttgaagaagtatctactcctgggaaacgctgaagacagcccggaccaatccggtatcgtcgcggacaaaagttccttggtgatccagtggagggacacatgggcacgacggctgcgaaaattccagcaacgcgaaaagaaaggaaaatgcaaaaaggcgtag

SEQ ID NO: 294165 - DNA, 1815 bp, Artificial Sequence
  derived and/or modified sequence
atgatgcgggccgtgtgggaggctctggcagccctcgccgctgtcgcctgcctggtaggagctgtcaggggtggacctggactgagcatgtttgccggacaagcggcacagccagacccatgttcagacgagaacggacaccctcgccgatgtatccctgatttcgtcaacgccgcctttgggaaagacgtccgggtcagcagcacctgtggccgcccaccggctcgttattgcgtggtaagcgaacggggcgaggagagattgcggagctgccatttgtgtaatgccagtgaccctaagaaagcccaccccccagcatttcttactgatttgaataacccacataatctcacatgttggcagtccgagaattatttgcaattcccccataatgtgaccttgaccctcagcttaggcaagaagtttgaagtaacttacgtcagcctacagttttgctcaccaaggcccgagtccatggctatctacaaaagcatggactacggccgcacatgggtccctttccagttctacagtacacagtgccgcaaaatgtataatagaccccatagagccccaataaccaaacagaacgagcaggaagccgtatgcacagattcgcacacagacatgcgcccactgtccggagggctaatcgctttctccacccttgacggccgcccatccgctcacgatttcgacaactcaccagtgctccaggactgggttactgcaaccgatatcagggtcgcatttagccgattgcacacttttggtgatgagaatgaggacgactccgaattggcgcgcgactcgtatttttacgccgtatctgacctgcaagtgggcgggcgctgtaagtgtaatggccacgccgcccggtgtgtgagggatagagatgattccctggtttgtgactgtagacataatacagcaggccctgagtgcgaccggtgtaaaccttttcattacgacagaccatggcagcgagctaccgcacgggaggccaatgagtgtgtagcctgcaattgtaatctccatgctcggcggtgccggtttaacatggaactatataaactgagtggccgcaagagcggcggtgtgtgtttgaactgcaggcataacacagcaggacgccactgtcactattgtaaggaggggtattacagggatatggggaaacctataacgcacaggaaggcatgtaaggcctgcgattgtcatcccgtgggggctgctgggaagacttgcaatcaaacaactggccagtgtccctgcaaggacggagttaccggtatcacatgtaacaggtgcgcgaaaggttatcagcaatcccgcagccctatagcaccatgtattaaaataccagtggcgccacccacaactgccgcgtcgtccgtggaggagcctgaggattgcgattcctattgtaaagccagtaagggaaagctgaaaattaacatgaaaaaatattgcaagaaggactatgccgtacagatccacattttaaaggctgacaaggcaggcgactggtggaagtttacagtcaacataattagcgtctataaacaaggcactagtaggatcagaaggggagaccaaagcttatggattagatctagggatattgcatgtaagtgccctaagataaaacctctgaaaaaatacctgctgctgggcaacgcagaggattctccggatcaatcaggaattgtcgccgacaaatcgtccctagtgattcaatggagggacacatgggcgcggcgtctaagaaagtttcagcagcgcgaaaagaaaggcaagtgcaaaaaggcctag

SEQ ID NO: 294166 - DNA, 462 bp, Artificial Sequence
  derived and/or modified sequence
cattattgcaaggagggttactatcgcgacatgggcaaacccattacacaccggaaggcatgcaaggcatgcgactgccaccctgttggcgcagcaggcaagacatgcaatcagaccacaggccagtgcccatgcaaggatggtgtgaccggaataacctgcaacagatgcgcaaaaggatatcaacagtcccggtccccaatagctccatgcatcaagattcccgttgcacccccgaccactgcagcctcatccgtggaggaacccgaggcagcccgtcaacccaacactttccaggcagaggggctgtcactgctcccaggagccgctgagaaagagggagcccggtgctggggatatagaagaaggctcggacatagggtcgcacaggctgagtgtaggggaccccggtcttgggcttgggggcgaattacatcctcattctcctttgctagcaactag

SEQ ID NO: 294167 - DNA, 700 bp, Artificial Sequence
  derived and/or modified sequence
cattactgcaaggagggctactaccgcgacatgggcaagcccatcacccaccggaaggcctgcaaagcctgtgattgccaccctgtgggtgctgctggcaaaacctgcaaccaaaccaccggccagtgtccctgcaaggacggcgtgacgggtatcacctgcaaccgctgcgccaaaggctaccagcagagccgctctcccatcgccccctgcataaagatccctgtagcgccgccgacgactgcagccagcagcgtggaggagcctgaagctgcccgccagcccaacaccttccaggctgaggggttgtcactccttcctggggctgcagagaaggaaggagccagatgctggggatacagaaggaggcttgggcacagggtcgcacaagcagaatgcagggggcccaggagctgggcgtgggggagaatcacatcttcattttcattcgcctctaactaaaaatttagcatttcctccatggcaaagagaggccgcagaccgcagcatgcggccaagcctgcaccgtggtcactggcggaagtcacagcggtttacacatcacattctagctggtgcagatatcataaatatcgttcatgctggttattgcttctcaaaacgacagaagttactagacctgctgctagatcctgatttataatcattaataaagaagcactcgcgtaacgtaaccata

SEQ ID NO: 294168 - DNA, 1815 bp, Artificial Sequence
  derived and/or modified sequence
atgatgagggctgtgtgggaggcccttgctgccctcgctgctgtcgcttgtcttgttggtgccgtacggggaggtcccggactctcgatgtttgccgggcaggctgctcagcctgacccttgctccgacgaaaacggccatccccgtagatgtatccccgactttgtgaatgcagcgttcgggaaggatgtcagagtcagtagcacctgcgggcgaccccctgcacgatactgcgtggtgagcgagcggggagaagaacgcctgcggagttgtcatttgtgtaatgcctccgatcccaagaaagcacatccacctgccttcctgacagacctcaacaacccacacaacctcacttgttggcaaagtgagaactaccttcaattccctcataatgtgacactgactctgagcctgggcaagaagttcgaggttacatatgttagtcttcagttctgttctcctcggccggagagcatggccatttacaaatcaatggactacggtaggacatgggttccctttcagttttattccactcagtgccgcaaaatgtataatagaccacacagagcccctatcacaaagcagaatgaacaggaagccgtctgtacagactctcatacagacatgaggccactgtcaggcgggctcatagccttctccacactggatggtaggcccagtgcccatgatttcgataacagcccagtgcttcaggattgggtgaccgccaccgacattcgtgttgccttttcccggcttcatacatttggagatgagaacgaagacgattcagaacttgccagagatagctatttctacgcggtgagcgatttacaagtggggggtagatgtaagtgcaacggccatgcagcccggtgtgttagggatcgagacgattccttggtgtgtgattgtaggcacaataccgccggaccagaatgtgacagatgtaaacccttccactacgatagaccttggcaacgggccacagcccgagaagcaaatgagtgtgtggcatgcaactgtaacctgcacgcccggagatgtcgttttaacatggaactatacaagctgagtggccgaaaatcaggaggggtgtgtttaaactgcaggcacaacacggccggaagacactgtcactactgtaaagagggctattaccgcgatatgggtaagcctatcacgcatcgtaaggcatgtaaggcctgtgattgccatcccgtgggagctgcggggaagacatgcaaccaaacaaccggtcagtgcccttgtaaagatggagtgaccggaattacctgtaatcgatgcgcaaaagggtaccagcagtcgcgctccccaatcgcaccgtgcattaagattcctgtcgctcctcctaccacagctgctagctccgtggaagagccggaagactgcgattcatattgtaaggctagcaaggggaaactcaagatcaatatgaagaagtactgtaagaaggattatgctgtacaaatccatattctgaaggcagacaaagccggggattggtggaagtttaccgtgaacatcattagcgtgtacaagcagggaacgagcagaatacggcgcggtgaccaaagcctctggatcaggagtagggatattgcctgcaagtgtccaaagatcaagccgctgaaaaaatacttgctgctcggcaatgcagaagactcccctgaccagtcgggtattgtggccgataaaagctcactggtaattcagtggcgtgacacctgggcccgccggctcaggaaatttcaacagcgcgagaagaaaggaaagtgcaagaaggcatag

SEQ ID NO: 294169 - DNA, 1815 bp, Artificial Sequence
  derived and/or modified sequence
atgatgagagccgtatgggaagcattagcagctctggccgccgtcgcctgcctcgttggcgccgtgcgtggggggcccggtcttagcatgttcgcaggccaagccgcacaacctgatccctgttccgacgaaaatggacacccgcggcgatgtatccccgactttgttaacgcggcgttcggcaaggatgtcagagtaagtagtacatgcgggaggcctccagcacgatactgcgtggtgagcgaaaggggggaggaacggctgagaagctgccacctgtgcaacgcgtccgaccctaagaaggcccaccctcctgcctttctgactgacctgaataatcctcacaatctgacatgttggcaaagtgaaaattatcttcaattcccacacaacgttaccttgacgctgtccttaggtaagaagttcgaagtgacgtacgttagcttgcagttctgtagccctcgaccggaaagtatggccatttacaagtccatggattacggcagaacctgggtcccgtttcagttctactccacccaatgtcggaaaatgtacaatcggccgcatagagcaccaatcactaagcagaacgagcaggaagctgtatgtactgattcccacaccgacatgcgcccgctttctggtggcctcatcgcctttagcaccctggacggcagaccctccgcacatgactttgataattcaccagtgcttcaggattgggtcacagccactgacatcagggtggctttttctcggctgcatactttcggtgatgagaacgaagacgacagcgagctcgcaagggattcttatttttatgccgtatccgatttgcaagtgggcggcaggtgcaaatgcaatggccacgcagccagatgtgtaagagacagagacgacagccttgtttgcgactgccgccacaatacagccggcccagaatgtgaccgctgtaaaccattccactatgaccgtccctggcagcgtgcaaccgcccgtgaagcgaacgagtgcgtggcgtgcaattgcaaccttcatgcacggcgctgccgcttcaacatggagctatataaactgtcaggcaggaaaagcgggggggtgtgcttaaactgccggcacaataccgccggacggcactgccactactgtaaagagggatattatcgcgatatggggaagccaatcactcacagaaaagcttgtaaggcatgtgattgtcaccctgtgggagcggccggtaagacatgcaatcagactacaggacagtgtccctgcaaggatggtgtcactggaatcacatgtaaccgttgtgcgaagggctaccagcagagcagatctcctattgccccttgtatcaagatccccgttgccccacctacaactgcagcttccagtgttgaggaacctgaggattgcgactcgtactgcaaggcatcaaaaggcaaactcaaaattaacatgaagaagtactgcaaaaaggattacgctgtacaaattcatattcttaaagccgataaagcaggggactggtggaagttcaccgtgaatattatctctgtctacaagcagggcacctccagaattcggcgcggcgatcaatcactgtggataagatcgagagatattgcttgtaagtgccccaaaatcaagcctttaaaaaaatatttacttctcggaaacgcggaagattctcccgatcagagtggtatcgtagctgacaagtccagtctcgtcattcaatggcgggatacttgggcccggaggttacggaaatttcaacagagagagaagaagggcaaatgcaaaaaggcctag

SEQ ID NO: 294170 - DNA, 1815 bp, Artificial Sequence
  derived and/or modified sequence
atgatgagggccgtgtgggaagcattggccgcgttagccgccgtcgcttgcctggtgggagcagtccgaggcggccctggcttatccatgtttgccggacaggccgcccagcccgatccatgctccgacgaaaatggacatcctaggagatgcattcccgactttgtaaatgcggctttcggcaaagatgtgcgggtttctagtacatgtggaagacctcccgccagatattgtgtcgtgagtgagagaggcgaggagcgactccgcagttgtcatctgtgcaatgcatccgatcctaagaaagcgcacccccccgcatttcttacagacctaaacaatcctcacaacctcacctgctggcaatcagaaaactatctgcaattcccccataacgtaacactgacactctccctgggtaaaaaattcgaagttacatacgtatcactgcagttttgctctccacgccctgagtcaatggctatttacaaaagcatggactatggacggacatgggtaccttttcaattttactctacacagtgcagaaaaatgtacaatcgaccacatagggcaccaatcactaagcagaatgagcaggaggccgtgtgcactgattcacacaccgacatgcggcctctgtctggcggactgatagccttttccactctggacggtcgaccctccgctcacgacttcgacaatagccccgtgctgcaggattgggtaaccgccaccgatattagggtcgctttttctaggctgcatacgtttggcgatgagaatgaggacgattccgaactggccagggacagttacttttacgcagtatccgacttgcaagtgggagggagatgcaaatgtaatggccatgctgctagatgtgtaagggaccgcgatgattctttggtttgtgactgcaggcataataccgctggaccagagtgtgatagatgtaagccttttcattacgatagaccttggcaaagagccactgctagagaagcaaacgagtgcgtggcttgtaactgtaacctgcacgctcgtaggtgtcggtttaatatggagctctacaagctgagtgggcgaaaaagtggaggtgtatgtctaaactgcaggcataatactgctggccgccattgccattactgtaaggaggggtattaccgtgacatggggaagcctatcacccaccggaaggcatgcaaggcatgcgactgtcatccagtgggagccgcaggtaagacatgcaatcagaccaccggccaatgtccctgtaaggacggggtgaccggtatcacatgtaaccgatgcgctaaaggatatcaacaaagcaggtcccctatagccccgtgcatcaaaatcccagtagcacctcctacaaccgccgcaagctccgtggaagagccagaagattgtgattcgtattgtaaggcctcaaaagggaaattgaaaattaatatgaagaaatattgcaaaaaggattatgccgtacagattcacatcttgaaagctgataaggccggagactggtggaaattcactgtgaatatcataagcgtctataaacagggcacttctcgcatccgacggggggatcagtctttgtggatccgatctagagacatagcctgtaaatgtccaaaaatcaagcccctcaaaaaatatctattgttggggaatgcggaggactctccggaccagtcagggattgtagcggataagtcaagcctagtgatacagtggcgtgacacttgggcccggcggttacgaaagttccaacaaagagagaagaaaggaaagtgtaaaaaagcctag

SEQ ID NO: 294171 - DNA, 462 bp, Artificial Sequence
  derived and/or modified sequence
cattactgcaaagaaggctactatcgggatatgggaaaacccataacacacagaaaggcatgtaaagcctgtgactgccatcctgttggcgccgcaggaaagacctgtaatcagacaactggccagtgcccctgtaaagacggagttacaggtatcacctgcaacagatgcgccaaaggataccagcaatcaagaagcccaatagcaccttgtataaagatacccgtggcgccacctactacagctgctagttccgtggaagaacctgaagcagcacgccaacctaacacatttcaggccgaaggcctgagcctgctgccaggagccgctgagaaggagggtgcgagatgttggggttacaggcgccgcctaggccatagggtagcacaggctgaatgtcgagggccacggtcatgggcttggggaagaattacttcatctttctcgtttgcttccaattag

SEQ ID NO: 294172 - DNA, 1815 bp, Artificial Sequence
  derived and/or modified sequence
atgatgagggccgtgtgggaagcactcgccgcccttgccgcggttgcttgcctagttggcgccgtgcgggggggacccgggttatcaatgtttgcaggacaagccgcccagcccgacccatgctccgatgagaacgggcatccacgtcgatgcatccctgactttgtaaatgccgcattcgggaaggatgtcagagtgtcttctacctgcggacgccccccggccaggtattgtgtggtttccgaacgaggcgaggaaaggctgagaagttgtcatctttgcaacgcatcagacccaaaaaaggcccacccccctgccttcctcaccgatctaaataatccgcataatttaacctgttggcaatcagagaactatctgcagtttcctcacaatgtgactctgaccttaagcctgggcaagaaattcgaggtaacctacgtctcacttcaattctgttcacctagacccgaatctatggcaatatacaagtccatggattatggcagaacatgggtgcccttccagttctactcaactcagtgtcggaaaatgtataatagacctcacagagccccaattactaagcagaatgaacaagaagcagtctgcacagactcacacaccgatatgagaccacttagtgggggccttatagctttcagtaccctcgatggccgaccatccgcacacgactttgataacagccctgtgcttcaggactgggtgacggcaacagacattagagtggcgttttcccgacttcacacttttggggacgagaatgaggacgattccgagttagcgagagactcttacttttatgccgtgagcgatctgcaagttggaggaaggtgtaaatgtaacggacacgccgccagatgtgtgcgggatagggatgattcattagtatgcgactgccgacacaacaccgccgggcctgaatgcgatagatgcaaacccttccattatgatcggccctggcagagagccaccgcaagagaggcaaacgaatgtgtcgcctgcaattgcaacttacatgccaggagatgtcgttttaacatggaattgtacaaattaagcgggagaaagagcggaggcgtgtgccttaattgtcggcacaatactgctggaagacattgccactattgtaaagaaggatactacagggatatggggaaacccatcacacaccggaaagcctgtaaggcctgtgactgccatcctgtcggggccgccggaaagacatgcaaccagactacaggacagtgtccatgcaaagatggcgttaccggcatcacatgcaacagatgtgcaaagggataccagcagtcacgaagtcccatcgccccctgcataaaaatcccagtcgccccccctaccaccgctgcaagcagcgttgaagagcctgaggactgtgattcttactgcaaagcgagcaaaggcaaattaaagatcaatatgaagaagtactgtaagaaagattatgctgtccaaatccacatcctgaaggcagacaaggcaggggattggtggaagtttacagtaaacattatttccgtatacaaacagggaacaagcaggatcaggcgaggggaccagagtctgtggataaggagtcgtgatattgcttgcaaatgtcccaaaatcaagcctcttaaaaagtatttactgctgggcaacgccgaggacagcccagatcagagcggtatcgtggcagataaatcatcactcgtcatacagtggcgtgacacctgggcacgacggctgaggaaattccagcagagggagaagaaagggaagtgtaaaaaagcttag

SEQ ID NO: 294173 - DNA, 1815 bp, Artificial Sequence
  derived and/or modified sequence
atgatgcgcgctgtttgggaagccttagcggcacttgccgccgtcgcgtgcctggtcggcgcagttcgcggaggacccggcctgtcgatgttcgctggacaagccgcccagcctgacccgtgcagtgacgagaatggacatcctaggagatgtatcccagattttgtgaatgctgccttcggcaaagacgtccgggtctcttcaacctgcggtcgccctcccgcccgatattgcgtcgtgagtgagcgtggagaagagagactgcgaagttgtcatttgtgtaatgcctctgatcccaagaaagcccaccctcctgcctttctgaccgacctgaataacccccacaacctgacttgctggcagtcagaaaattaccttcagttccctcacaacgtgaccctgacacttagcctagggaagaagtttgaagtcacatacgtgtccctgcaattttgctcacctcggcccgaatccatggcaatctataaatcaatggattatggcagaacctgggtaccttttcaattttatagtacgcagtgccgcaagatgtataaccgcccccaccgagcacccataacgaagcaaaacgaacaagaggctgtatgtactgattcccacaccgacatgcgcccgctttctggtggcctcatcgcctttagcaccctggacggcagaccctccgcacatgactttgataattcaccagtgcttcaggattgggtcacagccactgacatcagggtggctttttctcggctgcatactttcggtgatgagaacgaagacgacagcgagctcgcaagggattcttatttttatgccgtatccgatttgcaagtgggcggcaggtgcaaatgcaatggccacgcagccagatgtgtaagagacagagacgactcattggtttgcgactgcaggcataacactgctggcccagaatgtgatcgctgcaaaccctttcattatgaccgcccatggcagcgtgccaccgccagagaggcaaacgaatgcgtcgcatgtaactgcaatctgcacgctcgacgatgccggttcaatatggaattgtacaaattaagtggtcggaaatcaggtggcgtgtgcttgaactgcagacacaacaccgcaggacgccactgccattattgtaaggaaggttactatcgagatatgggtaagcctatcactcataggaaagcttgcaaagcttgcgactgtcacccagtaggagcggcaggcaagacttgtaatcagactacgggccaatgcccctgcaaggatggcgtgaccggcattacctgcaatcgctgtgccaaggggtatcagcaatcaagatcacccatagctccctgtattaagattccagtggcccccccgacgactgccgcctcgagtgttgaggaacctgaggactgcgactcatactgtaaagcttccaaaggtaagctgaagataaacatgaagaaatattgcaagaaagactacgctgttcagatccacatcctcaaagctgataaggccggcgactggtggaagttcactgttaacataattagcgtctataaacaggggacttcacgaattagaaggggggatcagagtttgtggatccggtcaagagacatcgcctgtaaatgcccaaaaatcaaacctctcaagaaatatttgttgctcgggaacgccgaagattcacccgaccagtcaggaattgtggccgacaaatctagcctcgttatccagtggcgagatacatgggcaaggcgtctgcggaagttccaacagagagaaaagaagggtaagtgtaaaaaggcttag

SEQ ID NO: 294174 - DNA, 5954 bp, Artificial Sequence
  derived and/or modified sequence
cttcgggggcgagcgcgcgtgtgtgtgagtgcgcgccggccagcgcgccttctgcggcaggcggacagatcctcggcgcggcagggccggggcaagctggacgcagcatgatgcgcgcagtgtgggaggcgctggcggcgctggcggcggtggcgtgcctggtgggcgcggtgcgcggcgggcccgggctcagcatgttcgcgggccaggcggcgcagcccgatccctgctcggacgagaacggccacccgcgccgctgcatcccggactttgtcaatgcggccttcggcaaggacgtgcgcgtgtccagcacctgcggccggcccccggcgcgctactgcgtggtgagcgagcgcggcgaggagcggctgcgctcgtgccacctctgcaacgcgtccgaccccaagaaggcgcacccgcccgccttcctcaccgacctcaacaacccgcacaacctgacgtgctggcagtccgagaactacctgcagttcccgcacaacgtcacgctcacactgtccctcggcaagaagttcgaagtgacctacgtgagcctgcagttctgctcgccgcggcccgagtccatggccatctacaagtccatggactacgggcgcacgtgggtgcccttccagttctactccacgcagtgccgcaagatgtacaaccggccgcaccgcgcgcccatcaccaagcagaacgagcaggaggccgtgtgcaccgactcgcacaccgacatgcgcccgctctcgggcggcctcatcgccttcagcacgctggacgggcggccctcggcgcacgacttcgacaactcgcccgtgctgcaggactgggtcacggccacagacatccgcgtggccttcagccgcctgcacacgttcggcgacgagaacgaggacgactcggagctggcgcgcgactcgtacttctacgcggtgtccgacctgcaggtgggcggccggtgcaagtgcaacggccacgcggcccgctgcgtgcgcgaccgcgacgacagcctggtgtgcgactgcaggcacaacacggccggcccggagtgcgaccgctgcaagcccttccactacgaccggccctggcagcgcgccacagcccgcgaagccaacgagtgcgtggcctgtaactgcaacctgcatgcccggcgctgccgcttcaacatggagctctacaagctttcggggcgcaagagcggaggtgtctgcctcaactgtcgccacaacaccgccggccgccactgccattactgcaaggagggctactaccgcgacatgggcaagcccatcacccaccggaaggcctgcaaagcctgtgattgccaccctgtgggtgctgctggcaaaacctgcaaccaaaccaccggccagtgtccctgcaaggacggcgtgacgggtatcacctgcaaccgctgcgccaaaggctaccagcagagccgctctcccatcgccccctgcataaagatccctgtagcgccgccgacgactgcagccagcagcgtggaggagcctgaagactgcgattcctactgcaaggcctccaaggggaagctgaagattaacatgaaaaagtactgcaagaaggactatgccgtccagatccacatcctgaaggcggacaaggcgggggactggtggaagttcacggtgaacatcatctccgtgtataagcagggcacgagccgcatccgccgcggtgaccagagcctgtggatccgctcgcgggacatcgcctgcaagtgtcccaaaatcaagcccctcaagaagtacctgctgctgggcaacgcggaggactctccggaccagagcggcatcgtggccgataaaagcagcctggtgatccagtggcgggacacgtgggcgcggcggctgcgcaagttccagcagcgtgagaagaagggcaagtgcaagaaggcctagcgccgaggcagcgggcgggcgggcgggcgggcgccagggcggggccgagcgagagcgggcgccttggcccggccgccgcggacttggcccgcgagggctttcccaggtggggggagggagggggcggggccgcacggcgcggggggcgggaccctcggcggcccctccccctacccccaccctgcgcgctctgggcgggagccgcgtgcacgcggggcggggtgcgccgccggccgggccctggagaaatgacgagacgtagctacctcacggggctccttccagagcagagacgcgcttccctgggcctgggcgcggccgccgtggaggggctgggggcagcctgccctggggcccgggggcgggcgcagaatcgcacaactggggccccaggcgcggggcgtggatggcgcggagacgtggacgggaggagaactgtgaattctcaagcccgtagtgtgggcggggcgcggagcacccaccaaaccaccacccgacacgcagccgacgggatccccccctttctccccggccccttctagcagttccccgcgggccacctggctgtcacagcctggactcctccatctgaaggggcctggcagcatttggggagtggacagctcctgtccagccagcatgccccaggcggcctctgtctccactgctacctgctgagtgggtcctactgggtgggggcttggggtcggtgagtggttcacctgtggagagaggagaggaagcccctgctgctgcctgtctctgcccctgcccctgcccctgcccagcgtggggctggcccatccggaaggcagtgggcccagggacacccctgagaagcccaagccgggtggtcaccgcctcatgctggagctgcctgttggaggaggcatcgcaaacgcaaaacctcccagagagtttccttttggaaacttggaaccagccctttttatgacgttttccagggggagggggaggggcactggctgggtttacggcagtgacactatttatgtaaatgacatcagctcccgcaaggcccctcagcaatgtcaacagctggaaagggcctgaacgggcttggagtctgcaggctgcgaaggcacttgggcctggcttggggccgggggcttgtttgagctgggatggggtttgctggctcagtgaagtaccagagtgcctgagccatgggtgggcaggggcacaggaatgaccaggttcctgggggccaaggaggccatgctggcttctccaagggaaggcacagaggctgccggcctgccccctacagctgtcttgggtctggcctgggccacaccttgaccgtgcctttccagacggtctttgtggagtctgcccgtgccctccactgtgccccagccctccttccaaaatctcctagagacacggtcctcaagcaggcagccccttttgttctgacctcctcacacagggtccattcctgtgccctggggcctcctggctccctgccttcctgggctctctgcactgcccgggcctctggcccacatcctcacacccggcgcactgaattaagaggcctggctcccctcacagtcaggaaattggtttcactttcccggccagagtttggctgctcaaaagggtcataccaagtatgaagctcggcccccggtggtctggcttccctccgccttccccacatttacccgcatcacggctgccatttattgagcacctgctgtgtgccaggcactttacccacatgctcccagtgtgtactcatgacaaccctgtgggacagggactcattatcaccagcaaggagactggagtacacgtgcccaaggtcatgctgcaaattggtggcaggactggggctcaaactccagagcccgactttctgaccaggggccacgctggccctcactgcactccagctctgcagcctacccgcccaatccctgtgcaggctgggagggtgctcttgggggagtggccaccgagcccctggccctggttactgcctcttgaggacactggcatctgggctggagaacaggagcccggggtggggtagggcatggggacaatcacatcttcagaggaggcagcaaagtggtgcgggatgcagggacggacttgccagatggcagctccaggttccaggaaggcaggccttggatgctccgaagaggtggtagaaaggtgtttttagaaaggtgttttggctgcctcagggtggttggagagactccaggagagactggcagaggtgcctcaggggcagggagcagacagacctgccctgggaaggggcatttggcttccctgaatccagcccaaggctagaagacagggcccctctccaagctgtcagcgcccctcggatgcccagtgtggtgtgctgggcgccatcagcatcacaaggcactacgctgctggggcggttgtcctatttctgtctatgccagtgtggtttcttcaccctgcccagaagggctgtggcagccccacgatatcccaccctgggtctgggtctcacgggtgtcctgtgaggggcttgcatttgtggtggtctctgaggccacctcagcaacggagctggcgacacgccaagcaacaaggcatcttgcggaaaattcagccagtgtcctgcccctcccttcggctcagcaccccgcagggcacaggctgtccgcccggtggtctggcccttggggaatgcgtcagggtgaccagatccaccatgctagcagccaggtcactgttgggattgcacggtcgtcacgagctgcctttcctatccacacacccagccaggacccagcccaccactcccgactgcagccccggcctctgcggtgagcaccatccttgggaaagcacccctcctccactccggtgccccactccaaggagcagagggaaatgggaattgaggtgtcccggtttgtacagttaggaagggatgtaaaacggaactagattttgattttgaagagtgtattaaccagaattgtgctatgtaggtgtttgtttgaagaaaaacataccagattagtctttgtttttgaaacagcttccccagttgtcctttttcttaccagctgggtggtctggtgcccctgacagctgagtgcctgctttacggacacgcagtaatgccgaagatttgcgggggaggacatagggctgtccccgggattcacctgctggctgtggtctctgcccactgcttctgtccttggaaagcagggcaggaggcagcatccccaggggcctctatgtgggagggagggacacctggggtcacaacccagggagggagggtcacagcccagggaggctgggagctgctccaaggccctggaactctgcctcagtcgcggcatgctggagaggggtacggacttactttcttggagttgtcccaggttggaatgagactgaactcaagaagagaccctaagggactggggaatggttcctgccttcaggaaagtgaaagacgcttaggctgtcaacacttaaaggaagtccccttgaagcccagagtggacagactagacccattgatggggccactggccatggtccgtggacaagacattcctgtgggccatggcacaccgggggggatcaaaatgtgtacttgtggggtctcgccccttgccaaaagccaaaccagtcccactcctgtcattggacgtttcttcccattccctcctcccaaatgcacttcccctcctccctctgccccctcctgtgttttggatttctgttcactcagaattgtaaatgtttagttgtgaccatgacgtattgtttgggtcaatgtccctttccaatgcatactaatatattatggttattatatatgaatatatttaatgacatggaaaaagttgtggattttctttctttccttttttttgggggggggtggggggttggttagagttgtaatggacccagatggaacttgtaatgtgggccccacatgatagaactaaattcagatatcattaaataaactcttgtacacta

SEQ ID NO: 294175 - DNA, 5953 bp, Artificial Sequence
  derived and/or modified sequence
ctccgctcgccaccccgccgagagctggagggcgcggggccaggcgccttctgcggcaggcggacagatcctcggcgcggcagggccggggcaagctggacgcagcatgatgcgcgcagtgtgggaggcgctggcggcgctggcggcggtggcgtgcctggtgggcgcggtgcgcggcgggcccgggctcagcatgttcgcgggccaggcggcgcagcccgatccctgctcggacgagaacggccacccgcgccgctgcatcccggactttgtcaatgcggccttcggcaaggacgtgcgcgtgtccagcacctgcggccggcccccggcgcgctactgcgtggtgagcgagcgcggcgaggagcggctgcgctcgtgccacctctgcaacgcgtccgaccccaagaaggcgcacccgcccgccttcctcaccgacctcaacaacccgcacaacctgacgtgctggcagtccgagaactacctgcagttcccgcacaacgtcacgctcacactgtccctcggcaagaagttcgaagtgacctacgtgagcctgcagttctgctcgccgcggcccgagtccatggccatctacaagtccatggactacgggcgcacgtgggtgcccttccagttctactccacgcagtgccgcaagatgtacaaccggccgcaccgcgcgcccatcaccaagcagaacgagcaggaggccgtgtgcaccgactcgcacaccgacatgcgcccgctctcgggcggcctcatcgccttcagcacgctggacgggcggccctcggcgcacgacttcgacaactcgcccgtgctgcaggactgggtcacggccacagacatccgcgtggccttcagccgcctgcacacgttcggcgacgagaacgaggacgactcggagctggcgcgcgactcgtacttctacgcggtgtccgacctgcaggtgggcggccggtgcaagtgcaacggccacgcggcccgctgcgtgcgcgaccgcgacgacagcctggtgtgcgactgcaggcacaacacggccggcccggagtgcgaccgctgcaagcccttccactacgaccggccctggcagcgcgccacagcccgcgaagccaacgagtgcgtggcctgtaactgcaacctgcatgcccggcgctgccgcttcaacatggagctctacaagctttcggggcgcaagagcggaggtgtctgcctcaactgtcgccacaacaccgccggccgccactgccattactgcaaggagggctactaccgcgacatgggcaagcccatcacccaccggaaggcctgcaaagcctgtgattgccaccctgtgggtgctgctggcaaaacctgcaaccaaaccaccggccagtgtccctgcaaggacggcgtgacgggtatcacctgcaaccgctgcgccaaaggctaccagcagagccgctctcccatcgccccctgcataaagatccctgtagcgccgccgacgactgcagccagcagcgtggaggagcctgaagactgcgattcctactgcaaggcctccaaggggaagctgaagattaacatgaaaaagtactgcaagaaggactatgccgtccagatccacatcctgaaggcggacaaggcgggggactggtggaagttcacggtgaacatcatctccgtgtataagcagggcacgagccgcatccgccgcggtgaccagagcctgtggatccgctcgcgggacatcgcctgcaagtgtcccaaaatcaagcccctcaagaagtacctgctgctgggcaacgcggaggactctccggaccagagcggcatcgtggccgataaaagcagcctggtgatccagtggcgggacacgtgggcgcggcggctgcgcaagttccagcagcgtgagaagaagggcaagtgcaagaaggcctagcgccgaggcagcgggcgggcgggcgggcgggcgccagggcggggccgagcgagagcgggcgccttggcccggccgccgcggacttggcccgcgagggctttcccaggtggggggagggagggggcggggccgcacggcgcggggggcgggaccctcggcggcccctccccctacccccaccctgcgcgctctgggcgggagccgcgtgcacgcggggcggggtgcgccgccggccgggccctggagaaatgacgagacgtagctacctcacggggctccttccagagcagagacgcgcttccctgggcctgggcgcggccgccgtggaggggctgggggcagcctgccctggggcccgggggcgggcgcagaatcgcacaactggggccccaggcgcggggcgtggatggcgcggagacgtggacgggaggagaactgtgaattctcaagcccgtagtgtgggcggggcgcggagcacccaccaaaccaccacccgacacgcagccgacgggatccccccctttctccccggccccttctagcagttccccgcgggccacctggctgtcacagcctggactcctccatctgaaggggcctggcagcatttggggagtggacagctcctgtccagccagcatgccccaggcggcctctgtctccactgctacctgctgagtgggtcctactgggtgggggcttggggtcggtgagtggttcacctgtggagagaggagaggaagcccctgctgctgcctgtctctgcccctgcccctgcccctgcccagcgtggggctggcccatccggaaggcagtgggcccagggacacccctgagaagcccaagccgggtggtcaccgcctcatgctggagctgcctgttggaggaggcatcgcaaacgcaaaacctcccagagagtttccttttggaaacttggaaccagccctttttatgacgttttccagggggagggggaggggcactggctgggtttacggcagtgacactatttatgtaaatgacatcagctcccgcaaggcccctcagcaatgtcaacagctggaaagggcctgaacgggcttggagtctgcaggctgcgaaggcacttgggcctggcttggggccgggggcttgtttgagctgggatggggtttgctggctcagtgaagtaccagagtgcctgagccatgggtgggcaggggcacaggaatgaccaggttcctgggggccaaggaggccatgctggcttctccaagggaaggcacagaggctgccggcctgccccctacagctgtcttgggtctggcctgggccacaccttgaccgtgcctttccagacggtctttgtggagtctgcccgtgccctccactgtgccccagccctccttccaaaatctcctagagacacggtcctcaagcaggcagccccttttgttctgacctcctcacacagggtccattcctgtgccctggggcctcctggctccctgccttcctgggctctctgcactgcccgggcctctggcccacatcctcacacccggcgcactgaattaagaggcctggctcccctcacagtcaggaaattggtttcactttcccggccagagtttggctgctcaaaagggtcataccaagtatgaagctcggcccccggtggtctggcttccctccgccttccccacatttacccgcatcacggctgccatttattgagcacctgctgtgtgccaggcactttacccacatgctcccagtgtgtactcatgacaaccctgtgggacagggactcattatcaccagcaaggagactggagtacacgtgcccaaggtcatgctgcaaattggtggcaggactggggctcaaactccagagcccgactttctgaccaggggccacgctggccctcactgcactccagctctgcagcctacccgcccaatccctgtgcaggctgggagggtgctcttgggggagtggccaccgagcccctggccctggttactgcctcttgaggacactggcatctgggctggagaacaggagcccggggtggggtagggcatggggacaatcacatcttcagaggaggcagcaaagtggtgcgggatgcagggacggacttgccagatggcagctccaggttccaggaaggcaggccttggatgctccgaagaggtggtagaaaggtgtttttagaaaggtgttttggctgcctcagggtggttggagagactccaggagagactggcagaggtgcctcaggggcagggagcagacagacctgccctgggaaggggcatttggcttccctgaatccagcccaaggctagaagacagggcccctctccaagctgtcagcgcccctcggatgcccagtgtggtgtgctgggcgccatcagcatcacaaggcactacgctgctggggcggttgtcctatttctgtctatgccagtgtggtttcttcaccctgcccagaagggctgtggcagccccacgatatcccaccctgggtctgggtctcacgggtgtcctgtgaggggcttgcatttgtggtggtctctgaggccacctcagcaacggagctggcgacacgccaagcaacaaggcatcttgcggaaaattcagccagtgtcctgcccctcccttcggctcagcaccccgcagggcacaggctgtccgcccggtggtctggcccttggggaatgcgtcagggtgaccagatccaccatgctagcagccaggtcactgttgggattgcacggtcgtcacgagctgcctttcctatccacacacccagccaggacccagcccaccactcccgactgcagccccggcctctgcggtgagcaccatccttgggaaagcacccctcctccactccggtgccccactccaaggagcagagggaaatgggaattgaggtgtcccggtttgtacagttaggaagggatgtaaaacggaactagattttgattttgaagagtgtattaaccagaattgtgctatgtaggtgtttgtttgaagaaaaacataccagattagtctttgtttttgaaacagcttccccagttgtcctttttcttaccagctgggtggtctggtgcccctgacagctgagtgcctgctttacggacacgcagtaatgccgaagatttgcgggggaggacatagggctgtccccgggattcacctgctggctgtggtctctgcccactgcttctgtccttggaaagcagggcaggaggcagcatccccaggggcctctatgtgggagggagggacacctggggtcacaacccagggagggagggtcacagcccagggaggctgggagctgctccaaggccctggaactctgcctcagtcgcggcatgctggagaggggtacggacttactttcttggagttgtcccaggttggaatgagactgaactcaagaagagaccctaagggactggggaatggttcctgccttcaggaaagtgaaagacgcttaggctgtcaacacttaaaggaagtccccttgaagcccagagtggacagactagacccattgatggggccactggccatggtccgtggacaagacattcctgtgggccatggcacaccgggggggatcaaaatgtgtacttgtggggtctcgccccttgccaaaagccaaaccagtcccactcctgtcattggacgtttcttcccattccctcctcccaaatgcacttcccctcctccctctgccccctcctgtgttttggatttctgttcactcagaattgtaaatgtttagttgtgaccatgacgtattgtttgggtcaatgtccctttccaatgcatactaatatattatggttattatatatgaatatatttaatgacatggaaaaagttgtggattttctttctttccttttttttgggggggggtggggggttggttagagttgtaatggacccagatggaacttgtaatgtgggccccacatgatagaactaaattcagatatcattaaataaactcttgtacacta

SEQ ID NO: 294176 - DNA, 5918 bp, Artificial Sequence
  derived and/or modified sequence
ctccgcaggcgccttctgcggcaggcggacagatcctcggcgcggcagggccggggcaagctggacgcagcatgatgcgcgcagtgtgggaggcgctggcggcgctggcggcggtggcgtgcctggtgggcgcggtgcgcggcgggcccgggctcagcatgttcgcgggccaggcggcgcagcccgatccctgctcggacgagaacggccacccgcgccgctgcatcccggactttgtcaatgcggccttcggcaaggacgtgcgcgtgtccagcacctgcggccggcccccggcgcgctactgcgtggtgagcgagcgcggcgaggagcggctgcgctcgtgccacctctgcaacgcgtccgaccccaagaaggcgcacccgcccgccttcctcaccgacctcaacaacccgcacaacctgacgtgctggcagtccgagaactacctgcagttcccgcacaacgtcacgctcacactgtccctcggcaagaagttcgaagtgacctacgtgagcctgcagttctgctcgccgcggcccgagtccatggccatctacaagtccatggactacgggcgcacgtgggtgcccttccagttctactccacgcagtgccgcaagatgtacaaccggccgcaccgcgcgcccatcaccaagcagaacgagcaggaggccgtgtgcaccgactcgcacaccgacatgcgcccgctctcgggcggcctcatcgccttcagcacgctggacgggcggccctcggcgcacgacttcgacaactcgcccgtgctgcaggactgggtcacggccacagacatccgcgtggccttcagccgcctgcacacgttcggcgacgagaacgaggacgactcggagctggcgcgcgactcgtacttctacgcggtgtccgacctgcaggtgggcggccggtgcaagtgcaacggccacgcggcccgctgcgtgcgcgaccgcgacgacagcctggtgtgcgactgcaggcacaacacggccggcccggagtgcgaccgctgcaagcccttccactacgaccggccctggcagcgcgccacagcccgcgaagccaacgagtgcgtggcctgtaactgcaacctgcatgcccggcgctgccgcttcaacatggagctctacaagctttcggggcgcaagagcggaggtgtctgcctcaactgtcgccacaacaccgccggccgccactgccattactgcaaggagggctactaccgcgacatgggcaagcccatcacccaccggaaggcctgcaaagcctgtgattgccaccctgtgggtgctgctggcaaaacctgcaaccaaaccaccggccagtgtccctgcaaggacggcgtgacgggtatcacctgcaaccgctgcgccaaaggctaccagcagagccgctctcccatcgccccctgcataaagatccctgtagcgccgccgacgactgcagccagcagcgtggaggagcctgaagactgcgattcctactgcaaggcctccaaggggaagctgaagattaacatgaaaaagtactgcaagaaggactatgccgtccagatccacatcctgaaggcggacaaggcgggggactggtggaagttcacggtgaacatcatctccgtgtataagcagggcacgagccgcatccgccgcggtgaccagagcctgtggatccgctcgcgggacatcgcctgcaagtgtcccaaaatcaagcccctcaagaagtacctgctgctgggcaacgcggaggactctccggaccagagcggcatcgtggccgataaaagcagcctggtgatccagtggcgggacacgtgggcgcggcggctgcgcaagttccagcagcgtgagaagaagggcaagtgcaagaaggcctagcgccgaggcagcgggcgggcgggcgggcgggcgccagggcggggccgagcgagagcgggcgccttggcccggccgccgcggacttggcccgcgagggctttcccaggtggggggagggagggggcggggccgcacggcgcggggggcgggaccctcggcggcccctccccctacccccaccctgcgcgctctgggcgggagccgcgtgcacgcggggcggggtgcgccgccggccgggccctggagaaatgacgagacgtagctacctcacggggctccttccagagcagagacgcgcttccctgggcctgggcgcggccgccgtggaggggctgggggcagcctgccctggggcccgggggcgggcgcagaatcgcacaactggggccccaggcgcggggcgtggatggcgcggagacgtggacgggaggagaactgtgaattctcaagcccgtagtgtgggcggggcgcggagcacccaccaaaccaccacccgacacgcagccgacgggatccccccctttctccccggccccttctagcagttccccgcgggccacctggctgtcacagcctggactcctccatctgaaggggcctggcagcatttggggagtggacagctcctgtccagccagcatgccccaggcggcctctgtctccactgctacctgctgagtgggtcctactgggtgggggcttggggtcggtgagtggttcacctgtggagagaggagaggaagcccctgctgctgcctgtctctgcccctgcccctgcccctgcccagcgtggggctggcccatccggaaggcagtgggcccagggacacccctgagaagcccaagccgggtggtcaccgcctcatgctggagctgcctgttggaggaggcatcgcaaacgcaaaacctcccagagagtttccttttggaaacttggaaccagccctttttatgacgttttccagggggagggggaggggcactggctgggtttacggcagtgacactatttatgtaaatgacatcagctcccgcaaggcccctcagcaatgtcaacagctggaaagggcctgaacgggcttggagtctgcaggctgcgaaggcacttgggcctggcttggggccgggggcttgtttgagctgggatggggtttgctggctcagtgaagtaccagagtgcctgagccatgggtgggcaggggcacaggaatgaccaggttcctgggggccaaggaggccatgctggcttctccaagggaaggcacagaggctgccggcctgccccctacagctgtcttgggtctggcctgggccacaccttgaccgtgcctttccagacggtctttgtggagtctgcccgtgccctccactgtgccccagccctccttccaaaatctcctagagacacggtcctcaagcaggcagccccttttgttctgacctcctcacacagggtccattcctgtgccctggggcctcctggctccctgccttcctgggctctctgcactgcccgggcctctggcccacatcctcacacccggcgcactgaattaagaggcctggctcccctcacagtcaggaaattggtttcactttcccggccagagtttggctgctcaaaagggtcataccaagtatgaagctcggcccccggtggtctggcttccctccgccttccccacatttacccgcatcacggctgccatttattgagcacctgctgtgtgccaggcactttacccacatgctcccagtgtgtactcatgacaaccctgtgggacagggactcattatcaccagcaaggagactggagtacacgtgcccaaggtcatgctgcaaattggtggcaggactggggctcaaactccagagcccgactttctgaccaggggccacgctggccctcactgcactccagctctgcagcctacccgcccaatccctgtgcaggctgggagggtgctcttgggggagtggccaccgagcccctggccctggttactgcctcttgaggacactggcatctgggctggagaacaggagcccggggtggggtagggcatggggacaatcacatcttcagaggaggcagcaaagtggtgcgggatgcagggacggacttgccagatggcagctccaggttccaggaaggcaggccttggatgctccgaagaggtggtagaaaggtgtttttagaaaggtgttttggctgcctcagggtggttggagagactccaggagagactggcagaggtgcctcaggggcagggagcagacagacctgccctgggaaggggcatttggcttccctgaatccagcccaaggctagaagacagggcccctctccaagctgtcagcgcccctcggatgcccagtgtggtgtgctgggcgccatcagcatcacaaggcactacgctgctggggcggttgtcctatttctgtctatgccagtgtggtttcttcaccctgcccagaagggctgtggcagccccacgatatcccaccctgggtctgggtctcacgggtgtcctgtgaggggcttgcatttgtggtggtctctgaggccacctcagcaacggagctggcgacacgccaagcaacaaggcatcttgcggaaaattcagccagtgtcctgcccctcccttcggctcagcaccccgcagggcacaggctgtccgcccggtggtctggcccttggggaatgcgtcagggtgaccagatccaccatgctagcagccaggtcactgttgggattgcacggtcgtcacgagctgcctttcctatccacacacccagccaggacccagcccaccactcccgactgcagccccggcctctgcggtgagcaccatccttgggaaagcacccctcctccactccggtgccccactccaaggagcagagggaaatgggaattgaggtgtcccggtttgtacagttaggaagggatgtaaaacggaactagattttgattttgaagagtgtattaaccagaattgtgctatgtaggtgtttgtttgaagaaaaacataccagattagtctttgtttttgaaacagcttccccagttgtcctttttcttaccagctgggtggtctggtgcccctgacagctgagtgcctgctttacggacacgcagtaatgccgaagatttgcgggggaggacatagggctgtccccgggattcacctgctggctgtggtctctgcccactgcttctgtccttggaaagcagggcaggaggcagcatccccaggggcctctatgtgggagggagggacacctggggtcacaacccagggagggagggtcacagcccagggaggctgggagctgctccaaggccctggaactctgcctcagtcgcggcatgctggagaggggtacggacttactttcttggagttgtcccaggttggaatgagactgaactcaagaagagaccctaagggactggggaatggttcctgccttcaggaaagtgaaagacgcttaggctgtcaacacttaaaggaagtccccttgaagcccagagtggacagactagacccattgatggggccactggccatggtccgtggacaagacattcctgtgggccatggcacaccgggggggatcaaaatgtgtacttgtggggtctcgccccttgccaaaagccaaaccagtcccactcctgtcattggacgtttcttcccattccctcctcccaaatgcacttcccctcctccctctgccccctcctgtgttttggatttctgttcactcagaattgtaaatgtttagttgtgaccatgacgtattgtttgggtcaatgtccctttccaatgcatactaatatattatggttattatatatgaatatatttaatgacatggaaaaagttgtggattttctttctttccttttttttgggggggggtggggggttggttagagttgtaatggacccagatggaacttgtaatgtgggccccacatgatagaactaaattcagatatcattaaataaactcttgtacacta

SEQ ID NO: 294177 - DNA, 1815 bp, Artificial Sequence
  derived and/or modified sequence
atgatgagagccgtgtgggaggccctggccgccctggccgccgtggcctgcctggtgggcgccgtgagaggcggccccggcctgagcatgttcgccggccaggccgcccagcccgacccctgcagcgacgagaacggccaccccagaagatgcatccccgacttcgtgaacgccgccttcggcaaggacgtgagagtgagcagcacctgcggcagaccccccgccagatactgcgtggtgagcgagagaggcgaggagagactgagaagctgccacctgtgcaacgccagcgaccccaagaaggcccacccccccgccttcctgaccgacctgaacaacccccacaacctgacctgctggcagagcgagaactacctgcagttcccccacaacgtgaccctgaccctgagcctgggcaagaagttcgaggtgacctacgtgagcctgcagttctgcagccccagacccgagagcatggccatctacaagagcatggactacggcagaacctgggtgcccttccagttctacagcacccagtgcagaaagatgtacaacagaccccacagagcccccatcaccaagcagaacgagcaggaggccgtgtgcaccgacagccacaccgacatgagacccctgagcggcggcctgatcgccttcagcaccctggacggcagacccagcgcccacgacttcgacaacagccccgtgctgcaggactgggtgaccgccaccgacatcagagtggccttcagcagactgcacaccttcggcgacgagaacgaggacgacagcgagctggccagagacagctacttctacgccgtgagcgacctgcaggtgggcggcagatgcaagtgcaacggccacgccgccagatgcgtgagagacagagacgacagcctggtgtgcgactgcagacacaacaccgccggccccgagtgcgacagatgcaagcccttccactacgacagaccctggcagagagccaccgccagagaggccaacgagtgcgtggcctgcaactgcaacctgcacgccagaagatgcagattcaacatggagctgtacaagctgagcggcagaaagagcggcggcgtgtgcctgaactgcagacacaacaccgccggcagacactgccactactgcaaggagggctactacagagacatgggcaagcccatcacccacagaaaggcctgcaaggcctgcgactgccaccccgtgggcgccgccggcaagacctgcaaccagaccaccggccagtgcccctgcaaggacggcgtgaccggcatcacctgcaacagatgcgccaagggctaccagcagagcagaagccccatcgccccctgcatcaagatccccgtggccccccccaccaccgccgccagcagcgtggaggagcccgaggactgcgacagctactgcaaggccagcaagggcaagctgaagatcaacatgaagaagtactgcaagaaggactacgccgtgcagatccacatcctgaaggccgacaaggccggcgactggtggaagttcaccgtgaacatcatcagcgtgtacaagcagggcaccagcagaatcagaagaggcgaccagagcctgtggatcagaagcagagacatcgcctgcaagtgccccaagatcaagcccctgaagaagtacctgctgctgggcaacgccgaggacagccccgaccagagcggcatcgtggccgacaagagcagcctggtgatccagtggagagacacctgggccagaagactgagaaagttccagcagagagagaagaagggcaagtgcaagaaggcctag

SEQ ID NO: 294178 - DNA, 462 bp, Artificial Sequence
  derived and/or modified sequence
cactactgcaaggagggctactacagagacatgggcaagcccatcacccacagaaaggcctgcaaggcctgcgactgccaccccgtgggcgccgccggcaagacctgcaaccagaccaccggccagtgcccctgcaaggacggcgtgaccggcatcacctgcaacagatgcgccaagggctaccagcagagcagaagccccatcgccccctgcatcaagatccccgtggccccccccaccaccgccgccagcagcgtggaggagcccgaggccgccagacagcccaacaccttccaggccgagggcctgagcctgctgcccggcgccgccgagaaggagggcgccagatgctggggctacagaagaagactgggccacagagtggcccaggccgagtgcagaggccccagaagctgggcctggggcagaatcaccagcagcttcagcttcgccagcaactag

SEQ ID NO: 294179 - DNA, 1815 bp, Artificial Sequence
  derived and/or modified sequence
atgatgcgagccgtgtgggaggccttggcagcattggctgccgtggcatgtttagttggtgcagttcggggaggcccagggctgtctatgtttgccggtcaagctgctcagccagacccctgtagcgacgaaaatggccacccccggcggtgcataccagactttgtgaacgctgcctttggtaaagacgtgcgggtttcaagtacatgcggcagacctcctgcacggtactgtgtcgtgagcgagcggggcgaagagcggcttcggtcatgccacttgtgcaatgctagcgacccaaagaaggcacacccacccgcttttctgaccgacctcaacaacccacacaacctgacgtgctggcagtctgagaactacttgcagttcccacataatgtgactctaacactttcattaggaaagaaatttgaggtcacctacgtctccctgcagttttgttcgcctcgtccggagtccatggcgatctacaagtcaatggactacggacgaacatgggttccatttcaattttacagtacacagtgtagaaaaatgtataatcgacctcacagagcccccatcactaagcagaacgaacaagaggccgtctgtaccgactctcacacagatatgaggcccctgtcagggggccttatcgccttttctaccctcgatggacggcccagtgcacacgatttcgacaattctccagtgctccaggattgggttacggctactgatattcgggtggcattttcacgtctgcacacattcggggacgagaacgaagacgacagtgagctggctcgagattcttatttttacgctgtgtctgacctccaggtgggaggtcggtgcaagtgtaatgggcatgccgccagatgtgtcagggaccgagacgacagccttgtgtgtgactgccggcacaacactgctgggcctgaatgcgaccggtgtaagcccttccactatgaccgaccatggcaaagagctaccgcacgcgaggcaaatgagtgtgtagcatgcaactgcaatctccacgcccgccggtgcaggtttaacatggaactgtacaaactaagtggccggaaatcaggaggggtgtgtctgaattgccggcacaatacggcagggcgccactgtcactattgtaaagaaggatattaccgggatatggggaagcctattactcatagaaaagcctgtaaggcttgcgactgtcaccctgttggtgccgcaggaaaaacgtgtaatcagactaccggacaatgtccctgtaaggatggagtaactggcataacgtgtaaccggtgtgctaaaggatatcagcagagtcgatcacccatagcaccatgcattaaaatccccgtggcccccccaactaccgcggcctcttcggtggaggagcccgaagactgcgatagctattgtaaggcatcaaaaggcaagctcaaaattaacatgaagaagtattgcaagaaagattacgctgttcagattcacattttaaaggctgataaagccggcgattggtggaagtttaccgttaatatcattagtgtgtacaaacaaggaaccagcaggatccgcaggggggatcagtctttgtggattcgtagccgagacattgcgtgtaaatgcccaaagattaagccgcttaagaagtatctcctgctcggtaacgccgaggactcgcccgatcagtcagggatcgtggccgacaaatcgtcacttgtgatacagtggcgggacacatgggctcgacgccttagaaaattccaacagcgggagaaaaagggcaaatgtaaaaaagcctag

SEQ ID NO: 294180 - DNA, 462 bp, Artificial Sequence
  derived and/or modified sequence
cactactgtaaggaaggctattaccgcgacatggggaaacccattacccacagaaaagcttgtaaagcctgtgactgccaccctgttggagccgccggcaaaacttgtaaccagacaaccggacaatgtccttgcaaagatggtgtgactgggattacctgtaaccgttgcgccaaagggtatcagcagtcacgaagccccatagctccgtgcatcaagatcccagtcgcgccccctactacagccgcatctagcgtggaggaacccgaggcggcaaggcaaccaaataccttccaggccgaaggtctttcccttttgcctggagccgccgagaaggaaggggcccgctgctggggatacagacgccgccttggccatcgcgttgcgcaagccgaatgccgagggccacggtcttgggcctggggccggatcacttccagcttttccttcgcatctaattag

SEQ ID NO: 294181 - DNA, 1815 bp, Artificial Sequence
  derived and/or modified sequence
atgatgcgggcggtttgggaagccttggcggcgctggccgccgtcgcctgcctggtcggcgctgtaagaggaggacccggcctgagtatgtttgccgggcaggccgctcagcccgacccttgctcagacgagaatggccatcctcgacggtgtattcctgactttgtcaacgccgcttttggcaaagatgtgagggtcagcagcacatgcggccgtcctccagcacgatactgcgtggtcagtgagcggggggaggaaaggcttcgatcttgccatttatgcaatgcatcagaccccaagaaggcgcacccccccgcttttctcactgatctgaacaatccacacaatttgacatgctggcagagcgagaattatcttcagtttcctcacaatgttactctcaccctatcactgggcaagaaattcgaggtcacgtacgtgagccttcagttctgtagccctcggccggaaagcatggccatttataaaagcatggactatggccgcacatgggtgcctttccaattctactcaactcagtgccgcaagatgtataaccgaccgcatcgtgccccaattaccaaacagaatgagcaggaagcggtttgtacagactcccatacagatatgcggcctttgtccgggggattaatcgcctttagcaccctcgacggtcgcccgagcgcacacgattttgacaactccccagtgctgcaagactgggtgaccgcaactgatatcagagttgctttctcacgcctgcatacattcggagatgaaaatgaggatgatagcgagctggcccgcgatagctacttttatgcagtgagcgaccttcaggtgggtggccgatgcaaatgtaacggccacgccgcccgctgcgtgcgagaccgcgatgacagcttggtgtgcgattgcagacacaacacagcaggtccggagtgtgaccgctgcaaaccttttcattatgaccgtccttggcagagggcgaccgcccgggaggccaacgagtgtgttgcctgtaattgtaaccttcacgccaggcggtgccgtttcaatatggaattgtacaaactgagtggacggaaaagtggtggcgtgtgcttgaattgtcgccataacactgctgggcgccattgtcattactgcaaagagggctactacagggatatgggaaaacccattacacacagaaaggcctgtaaggcttgcgactgtcaccccgtgggcgctgctggaaagacctgcaaccaaaccaccggacagtgcccttgcaaggatggcgtgactggtattacctgtaaccggtgcgcaaaagggtatcagcagagtagaagccctatcgcgccatgtatcaagattcctgttgctccgccaacaaccgcggccagcagcgtcgaggaacccgaggactgtgattcctactgcaaagcatccaagggtaagctcaagatcaatatgaagaaatactgtaagaaggattatgctgtccagattcatattctgaaggctgacaaggccggagactggtggaagtttaccgtcaatatcatatccgtgtacaaacagggcacaagcaggatccggagaggagaccagtcactgtggatcaggtcgagggatattgcttgtaagtgtccaaaaatcaaacccctaaaaaagtatctgctgctgggcaacgcggaggattctccagatcaatccggcatcgtcgcagataagtcttctctggttattcagtggcgcgatacctgggcacgaaggttgcggaaatttcagcagagggagaagaaaggcaagtgcaaaaaggcctag

SEQ ID NO: 294182 - DNA, 1815 bp, Artificial Sequence
  derived and/or modified sequence
atgatgagagcagtgtgggaagcactggccgctctagcagccgtcgcttgtctggttggggcggtgagagggggtccagggctttccatgtttgccggacaggctgcacagccagacccctgttcagacgagaacggccacccacgtcgatgcatacccgactttgtcaatgcagccttcggcaaggacgttcgcgtaagttcaacatgtgggcggccgcctgcccggtattgcgttgtatctgaaaggggggaggaacgactgaggagctgtcacttgtgtaacgctagcgacccaaagaaggcacaccccccagcatttttgaccgatctcaacaacccacacaaccttacttgctggcaatcggaaaactacctgcagtttccccacaatgtgaccttgacacttagcctggggaagaagttcgaggtgacatatgtcagcctgcaattttgctcaccacgcccagaatccatggctatttacaagagtatggattatggccgcacctgggtgcctttccagttctattccacacagtgtcgcaaaatgtacaacaggccccatagggccccaatcacaaagcagaacgaacaggaagcagtgtgcactgacagccacacagatatgcgaccattgtctggaggactgatagcgttttccactttggatggaaggccctccgctcacgatttcgacaattcacccgtcctccaggattgggtgacagcaacagatataagagtggctttttcccgtctgcatacatttggagacgagaatgaagacgactccgaactggctagagacagctatttctacgccgtgtcagatttacaagtgggaggaaggtgcaagtgcaatgggcacgccgcccggtgcgtaagggatagggatgactccttagtgtgcgattgcagacacaacacagctgggcctgagtgtgacaggtgtaagccatttcattacgataggccctggcaacgcgccacggccagggaagccaatgagtgcgtcgcctgtaattgtaacctgcatgcaagacgctgtagattcaatatggagctgtataaattgagcggcaggaaatccgggggggtctgtctgaactgtcgacacaacacggccgggcgtcactgccattactgtaaagaaggctactacagagatatgggtaaacccattacgcaccgcaaggcctgcaaggcctgtgattgccaccctgtcggggccgcaggcaagacttgtaatcaaaccacagggcagtgtccatgcaaggacggggtgaccggcattacctgcaacaggtgtgctaaaggttaccagcaatccaggtccccaattgctccatgtatcaagatacccgtggctccccctacgactgcagcgagttccgtagaggagcctgaagactgtgacagctattgcaaagcaagcaaaggcaaactaaaaataaatatgaaaaaatattgtaaaaaagactatgcagtgcagattcacatactgaaggctgacaaagcaggagactggtggaaatttacagtgaacattattagcgtgtataaacagggcacatctcgcatccgacggggagatcagagtctgtggattcgttcccgggatatcgcttgcaagtgtcccaagataaagccgctgaaaaaatatctactgctcgggaatgccgaggactccccagatcaatcaggcattgtcgcggacaagtcatccctcgtcattcagtggcgtgatacgtgggcaagacgtttgcgaaaattccagcagcgggagaagaagggaaagtgcaaaaaggcctag

SEQ ID NO: 294183 - DNA, 1815 bp, Artificial Sequence
  derived and/or modified sequence
atgatgagagctgtgtgggaggccctggccgccctggccgctgtggcctgcctggtgggcgctgtgcggggcggccctggcctgtccatgtttgctggccaggccgcccagcctgacccctgcagtgatgaaaatggccacccccggcgctgcatcccagactttgtgaatgctgccttcggcaaggatgtgcgggtgagcagcacctgtggccggcccccagcccgctactgtgtggtgtctgagcggggggaggagcggctgcggagctgccacctgtgcaatgccagtgaccccaagaaggcccaccccccagccttcctgacagacctgaacaacccccacaacctgacctgctggcagagcgagaactacctgcagttcccccacaacgtgaccctgaccctgagcctgggcaagaagtttgaggtgacctacgtgtccctgcagttctgcagccccaggcctgagagcatggccatctacaagtccatggactatggccgcacctgggtgcccttccagttctacagcacccagtgcaggaagatgtacaaccggccccaccgggcccccatcaccaagcagaatgagcaggaggccgtgtgcacagacagccacacagacatgaggcccctgagcggcggcctcatcgccttcagcaccctggatggccggcccagcgcccatgactttgacaacagccctgtgctgcaggactgggtgacagccacagacatccgggtggccttcagccggctgcacacctttggagatgaaaatgaagatgattctgagctggcccgggacagctacttctatgctgtgtctgacctgcaggtgggcggccgctgcaagtgcaatggacatgctgcccgctgtgtgcgggacagagatgacagcctggtgtgtgactgccgccacaacacagctggcccagaatgtgaccgctgcaagcccttccactatgaccggccctggcagagggccacagcccgggaggccaatgaatgtgtggcctgcaactgcaacctgcacgcccggcgctgccgcttcaacatggagctgtacaagctgagcggcaggaagagcggcggcgtgtgcctgaactgccgccacaacacagctggccgccactgccactactgcaaggagggctactacagagacatgggcaagcccatcacccacaggaaggcctgcaaggcctgtgactgccaccctgtgggcgccgccggcaagacctgcaaccagaccaccggccagtgcccctgcaaggatggagtgacaggcatcacctgcaacagatgtgccaagggctaccagcagagccgcagccccatcgccccctgcatcaagatccctgtggccccacccaccacagctgccagctctgtggaggagcctgaggactgtgacagctactgcaaggccagcaagggcaagctgaagatcaacatgaagaagtactgcaagaaggactatgctgtgcagatccacatcctgaaggctgacaaggccggggactggtggaagttcaccgtgaacatcatctctgtgtacaagcagggcaccagccgcatcagaagaggagaccagagcctgtggatccgcagccgggacatcgcctgcaagtgccccaagatcaagcccctgaagaagtacctgctgctgggcaatgctgaggacagcccagaccagagcggcatcgtggccgacaagagcagcctggtgatccagtggagggacacctgggcccggcggctgaggaagttccagcagcgggagaagaagggcaagtgcaagaaggcctag

SEQ ID NO: 294184 - DNA, 462 bp, Artificial Sequence
  derived and/or modified sequence
cactactgcaaggagggctactacagagacatgggcaagcccatcacccacaggaaggcctgcaaggcctgtgactgccaccctgtgggcgccgccggcaagacctgcaaccagaccaccggccagtgcccctgcaaggatggagtgacaggcatcacctgcaacagatgtgccaagggctaccagcagagccgcagccccatcgccccctgcatcaagatccctgtggccccacccaccacagctgccagctctgtggaggagcctgaggccgcccggcagcccaacaccttccaggccgagggcctgagcctgctgcctggagctgctgagaaggagggcgcccgctgctggggctacagaagaaggctgggccaccgggtggcccaggccgagtgccggggccccaggtcctgggcctggggccgcatcaccagcagcttctcctttgccagcaactag

SEQ ID NO: 294185 - DNA, 1815 bp, Artificial Sequence
  derived and/or modified sequence
atgatgcgggccgtgtgggaggccctggccgccctggccgccgtggcttgcctggtaggagctgtgagggggggcccaggactctcaatgtttgcggggcaagcagcgcaaccagatccttgttcagatgaaaatggacacccccggagatgcattccagactttgtcaatgccgcctttggcaaggacgtgcgggtgtcttcgacttgcggacgtcctcccgccaggtactgtgttgtgagtgaacggggagaggagaggctgcgatcctgtcatttgtgcaatgctagtgaccccaaaaaagctcaccctcccgcttttctgactgatttaaataacccccataacctgacatgttggcagtcagagaattatctgcagtttccgcacaatgttacccttactttaagcctaggaaaaaaattcgaggttacttacgttagtctgcagttttgcagtcctcggcctgagtcaatggcgatctataaatctatggattacggccgaacatgggtgccattccaattttactcaactcagtgcagaaagatgtacaatcgacctcacagggccccgattaccaagcagaatgagcaagaagcagtatgtaccgattcgcacactgatatgcggcctctgagcgggggcttgattgcattctccactctcgatggccggccatctgcacacgacttcgacaacagtcccgtgttgcaggactgggtcactgcaacagacattagagtggcattttcccgccttcatacctttggcgacgagaacgaagacgactccgagcttgctagggattcctacttctacgctgtgtccgacctgcaggtagggggccggtgcaagtgcaacggccacgcagctaggtgcgtgcgggatcgggatgacagcctggtttgcgactgcagacacaatacggccggtcctgagtgcgatcggtgcaaaccttttcattacgatcggccctggcagcgggctaccgctagggaggccaacgagtgtgtggcgtgcaactgcaacctgcatgccaggcggtgtaggtttaatatggagctctataagctgtcaggacggaagtctggaggtgtatgtttgaactgtcgtcacaacaccgccgggcggcattgccattattgcaaggagggctactatagggatatgggcaaacccattacgcaccggaaagcttgtaaggcttgtgactgccaccctgtcggagcagctggcaagacatgcaaccagacaaccgggcagtgcccctgtaaggacggggtcaccggcattacttgtaatcgttgcgctaagggttaccagcaaagtcggtccccaatcgccccatgtattaaaattcccgtggcgcctcccacaacggccgcaagctcagtcgaggagccggaggattgtgactcttattgtaaggcaagtaaggggaagttaaaaattaatatgaagaaatattgtaaaaaagattatgcagtccaaatccatatcctgaaggctgataaggcgggagattggtggaagttcactgtgaacatcatctctgtctacaagcaggggacaagccgcattagaaggggcgaccagtcactgtggatacgctcccgcgacattgcctgtaagtgtccaaaaataaaaccgctgaaaaaatacttgctgttgggcaacgctgaagatagccctgaccagtctggcatagtggccgacaaaagttccttggtcatccagtggcgtgacacttgggcaaggcgacttcgtaaattccagcagcgcgagaaaaagggtaaatgtaaaaaggcctag

SEQ ID NO: 294186 - DNA, 462 bp, Artificial Sequence
  derived and/or modified sequence
cactactgcaaggagggctactaccgggacatgggcaagcccatcacgcaccggaaagcttgtaaagcctgcgattgccaccctgtaggcgcagcaggtaaaacgtgtaatcagacaaccggccagtgtccatgtaaggatggcgtgacaggaatcacttgcaatcgatgcgcgaaaggttaccagcaatctaggagccctattgctccctgcatcaaaatccccgtggctcctcccactacagcagcctcttctgtggaggaacccgaagctgcacgccaaccaaacacttttcaggcagaggggttgtctctgttgcctggggctgcggagaaagaaggggccaggtgttggggctatcggcgccggttgggacatagggtggcacaggccgagtgtagagggcctcggtcatgggcttgggggcgaatcacttcctccttctcatttgcatccaactag

SEQ ID NO: 294187 - RNA, 1815 nt, Artificial Sequence
  derived and/or modified sequence
augaugcgggccgugugggaggcucuggcagcccucgccgcugucgccugccugguaggagcugucagggguggaccuggacugagcauguuugccggacaagcggcacagccagacccauguucagacgagaacggacacccucgccgauguaucccugauuucgucaacgccgccuuugggaaagacguccgggucagcagcaccuguggccgcccaccggcucguuauugcgugguaagcgaacggggcgaggagagauugcggagcugccauuuguguaaugccagugacccuaagaaagcccaccccccagcauuucuuacugauuugaauaacccacauaaucucacauguuggcaguccgagaauuauuugcaauucccccauaaugugaccuugacccucagcuuaggcaagaaguuugaaguaacuuacgucagccuacaguuuugcucaccaaggcccgaguccauggcuaucuacaaaagcauggacuacggccgcacaugggucccuuuccaguucuacaguacacagugccgcaaaauguauaauagaccccauagagccccaauaaccaaacagaacgagcaggaagccguaugcacagauucgcacacagacaugcgcccacuguccggagggcuaaucgcuuucuccacccuugacggccgcccauccgcucacgauuucgacaacucaccagugcuccaggacuggguuacugcaaccgauaucagggucgcauuuagccgauugcacacuuuuggugaugagaaugaggacgacuccgaauuggcgcgcgacucguauuuuuacgccguaucugaccugcaagugggcgggcgcuguaaguguaauggccacgccgcccggugugugagggauagagaugauucccugguuugugacuguagacauaauacagcaggcccugagugcgaccgguguaaaccuuuucauuacgacagaccauggcagcgagcuaccgcacgggaggccaaugaguguguagccugcaauuguaaucuccaugcucggcggugccgguuuaacauggaacuauauaaacugaguggccgcaagagcggcgguguguguuugaacugcaggcauaacacagcaggacgccacugucacuauuguaaggagggguauuacagggauauggggaaaccuauaacgcacaggaaggcauguaaggccugcgauugucaucccgugggggcugcugggaagacuugcaaucaaacaacuggccagugucccugcaaggacggaguuaccgguaucacauguaacaggugcgcgaaagguuaucagcaaucccgcagcccuauagcaccauguauuaaaauaccaguggcgccacccacaacugccgcgucguccguggaggagccugaggauugcgauuccuauuguaaagccaguaagggaaagcugaaaauuaacaugaaaaaauauugcaagaaggacuaugccguacagauccacauuuuaaaggcugacaaggcaggcgacugguggaaguuuacagucaacauaauuagcgucuauaaacaaggcacuaguaggaucagaaggggagaccaaagcuuauggauuagaucuagggauauugcauguaagugcccuaagauaaaaccucugaaaaaauaccugcugcugggcaacgcagaggauucuccggaucaaucaggaauugucgccgacaaaucgucccuagugauucaauggagggacacaugggcgcggcgucuaagaaaguuucagcagcgcgaaaagaaaggcaagugcaaaaaggccuag

SEQ ID NO: 294188 - RNA, 462 nt, Artificial Sequence
  derived and/or modified sequence
cauuauugcaaggaggguuacuaucgcgacaugggcaaacccauuacacaccggaaggcaugcaaggcaugcgacugccacccuguuggcgcagcaggcaagacaugcaaucagaccacaggccagugcccaugcaaggauggugugaccggaauaaccugcaacagaugcgcaaaaggauaucaacagucccgguccccaauagcuccaugcaucaagauucccguugcacccccgaccacugcagccucauccguggaggaacccgaggcagcccgucaacccaacacuuuccaggcagaggggcugucacugcucccaggagccgcugagaaagagggagcccggugcuggggauauagaagaaggcucggacauagggucgcacaggcugaguguaggggaccccggucuugggcuugggggcgaauuacauccucauucuccuuugcuagcaacuag

SEQ ID NO: 294189 - RNA, 1815 nt, Artificial Sequence
  derived and/or modified sequence
augaugagggcugugugggaggcccuugcugcccucgcugcugucgcuugucuuguuggugccguacggggaggucccggacucucgauguuugccgggcaggcugcucagccugacccuugcuccgacgaaaacggccauccccguagauguauccccgacuuugugaaugcagcguucgggaaggaugucagagucaguagcaccugcgggcgacccccugcacgauacugcguggugagcgagcggggagaagaacgccugcggaguugucauuuguguaaugccuccgaucccaagaaagcacauccaccugccuuccugacagaccucaacaacccacacaaccucacuuguuggcaaagugagaacuaccuucaauucccucauaaugugacacugacucugagccugggcaagaaguucgagguuacauauguuagucuucaguucuguucuccucggccggagagcauggccauuuacaaaucaauggacuacgguaggacauggguucccuuucaguuuuauuccacucagugccgcaaaauguauaauagaccacacagagccccuaucacaaagcagaaugaacaggaagccgucuguacagacucucauacagacaugaggccacugucaggcgggcucauagccuucuccacacuggaugguaggcccagugcccaugauuucgauaacagcccagugcuucaggauugggugaccgccaccgacauucguguugccuuuucccggcuucauacauuuggagaugagaacgaagacgauucagaacuugccagagauagcuauuucuacgcggugagcgauuuacaagugggggguagauguaagugcaacggccaugcagcccgguguguuagggaucgagacgauuccuuggugugugauuguaggcacaauaccgccggaccagaaugugacagauguaaacccuuccacuacgauagaccuuggcaacgggccacagcccgagaagcaaaugaguguguggcaugcaacuguaaccugcacgcccggagaugucguuuuaacauggaacuauacaagcugaguggccgaaaaucaggagggguguguuuaaacugcaggcacaacacggccggaagacacugucacuacuguaaagagggcuauuaccgcgauauggguaagccuaucacgcaucguaaggcauguaaggccugugauugccaucccgugggagcugcggggaagacaugcaaccaaacaaccggucagugcccuuguaaagauggagugaccggaauuaccuguaaucgaugcgcaaaaggguaccagcagucgcgcuccccaaucgcaccgugcauuaagauuccugucgcuccuccuaccacagcugcuagcuccguggaagagccggaagacugcgauucauauuguaaggcuagcaaggggaaacucaagaucaauaugaagaaguacuguaagaaggauuaugcuguacaaauccauauucugaaggcagacaaagccggggauugguggaaguuuaccgugaacaucauuagcguguacaagcagggaacgagcagaauacggcgcggugaccaaagccucuggaucaggaguagggauauugccugcaaguguccaaagaucaagccgcugaaaaaauacuugcugcucggcaaugcagaagacuccccugaccagucggguauuguggccgauaaaagcucacugguaauucaguggcgugacaccugggcccgccggcucaggaaauuucaacagcgcgagaagaaaggaaagugcaagaaggcauag

SEQ ID NO: 294190 - RNA, 1815 nt, Artificial Sequence
  derived and/or modified sequence
augaugagagccguaugggaagcauuagcagcucuggccgccgucgccugccucguuggcgccgugcguggggggcccggucuuagcauguucgcaggccaagccgcacaaccugaucccuguuccgacgaaaauggacacccgcggcgauguauccccgacuuuguuaacgcggcguucggcaaggaugucagaguaaguaguacaugcgggaggccuccagcacgauacugcguggugagcgaaaggggggaggaacggcugagaagcugccaccugugcaacgcguccgacccuaagaaggcccacccuccugccuuucugacugaccugaauaauccucacaaucugacauguuggcaaagugaaaauuaucuucaauucccacacaacguuaccuugacgcuguccuuagguaagaaguucgaagugacguacguuagcuugcaguucuguagcccucgaccggaaaguauggccauuuacaaguccauggauuacggcagaaccugggucccguuucaguucuacuccacccaaugucggaaaauguacaaucggccgcauagagcaccaaucacuaagcagaacgagcaggaagcuguauguacugauucccacaccgacaugcgcccgcuuucugguggccucaucgccuuuagcacccuggacggcagacccuccgcacaugacuuugauaauucaccagugcuucaggauugggucacagccacugacaucaggguggcuuuuucucggcugcauacuuucggugaugagaacgaagacgacagcgagcucgcaagggauucuuauuuuuaugccguauccgauuugcaagugggcggcaggugcaaaugcaauggccacgcagccagauguguaagagacagagacgacagccuuguuugcgacugccgccacaauacagccggcccagaaugugaccgcuguaaaccauuccacuaugaccgucccuggcagcgugcaaccgcccgugaagcgaacgagugcguggcgugcaauugcaaccuucaugcacggcgcugccgcuucaacauggagcuauauaaacugucaggcaggaaaagcgggggggugugcuuaaacugccggcacaauaccgccggacggcacugccacuacuguaaagagggauauuaucgcgauauggggaagccaaucacucacagaaaagcuuguaaggcaugugauugucacccugugggagcggccgguaagacaugcaaucagacuacaggacagugucccugcaaggauggugucacuggaaucacauguaaccguugugcgaagggcuaccagcagagcagaucuccuauugccccuuguaucaagauccccguugccccaccuacaacugcagcuuccaguguugaggaaccugaggauugcgacucguacugcaaggcaucaaaaggcaaacucaaaauuaacaugaagaaguacugcaaaaaggauuacgcuguacaaauucauauucuuaaagccgauaaagcaggggacugguggaaguucaccgugaauauuaucucugucuacaagcagggcaccuccagaauucggcgcggcgaucaaucacuguggauaagaucgagagauauugcuuguaagugccccaaaaucaagccuuuaaaaaaauauuuacuucucggaaacgcggaagauucucccgaucagagugguaucguagcugacaaguccagucucgucauucaauggcgggauacuugggcccggagguuacggaaauuucaacagagagagaagaagggcaaaugcaaaaaggccuag

SEQ ID NO: 294191 - RNA, 1815 nt, Artificial Sequence
  derived and/or modified sequence
augaugagggccgugugggaagcauuggccgcguuagccgccgucgcuugccuggugggagcaguccgaggcggcccuggcuuauccauguuugccggacaggccgcccagcccgauccaugcuccgacgaaaauggacauccuaggagaugcauucccgacuuuguaaaugcggcuuucggcaaagaugugcggguuucuaguacauguggaagaccucccgccagauauugugucgugagugagagaggcgaggagcgacuccgcaguugucaucugugcaaugcauccgauccuaagaaagcgcacccccccgcauuucuuacagaccuaaacaauccucacaaccucaccugcuggcaaucagaaaacuaucugcaauucccccauaacguaacacugacacucucccuggguaaaaaauucgaaguuacauacguaucacugcaguuuugcucuccacgcccugagucaauggcuauuuacaaaagcauggacuauggacggacauggguaccuuuucaauuuuacucuacacagugcagaaaaauguacaaucgaccacauagggcaccaaucacuaagcagaaugagcaggaggccgugugcacugauucacacaccgacaugcggccucugucuggcggacugauagccuuuuccacucuggacggucgacccuccgcucacgacuucgacaauagccccgugcugcaggauuggguaaccgccaccgauauuagggucgcuuuuucuaggcugcauacguuuggcgaugagaaugaggacgauuccgaacuggccagggacaguuacuuuuacgcaguauccgacuugcaagugggagggagaugcaaauguaauggccaugcugcuagauguguaagggaccgcgaugauucuuugguuugugacugcaggcauaauaccgcuggaccagagugugauagauguaagccuuuucauuacgauagaccuuggcaaagagccacugcuagagaagcaaacgagugcguggcuuguaacuguaaccugcacgcucguaggugucgguuuaauauggagcucuacaagcugagugggcgaaaaaguggagguguaugucuaaacugcaggcauaauacugcuggccgccauugccauuacuguaaggagggguauuaccgugacauggggaagccuaucacccaccggaaggcaugcaaggcaugcgacugucauccagugggagccgcagguaagacaugcaaucagaccaccggccaaugucccuguaaggacggggugaccgguaucacauguaaccgaugcgcuaaaggauaucaacaaagcagguccccuauagccccgugcaucaaaaucccaguagcaccuccuacaaccgccgcaagcuccguggaagagccagaagauugugauucguauuguaaggccucaaaagggaaauugaaaauuaauaugaagaaauauugcaaaaaggauuaugccguacagauucacaucuugaaagcugauaaggccggagacugguggaaauucacugugaauaucauaagcgucuauaaacagggcacuucucgcauccgacggggggaucagucuuuguggauccgaucuagagacauagccuguaaauguccaaaaaucaagccccucaaaaaauaucuauuguuggggaaugcggaggacucuccggaccagucagggauuguagcggauaagucaagccuagugauacaguggcgugacacuugggcccggcgguuacgaaaguuccaacaaagagagaagaaaggaaaguguaaaaaagccuag

SEQ ID NO: 294192 - RNA, 462 nt, Artificial Sequence
  derived and/or modified sequence
cauuacugcaaagaaggcuacuaucgggauaugggaaaacccauaacacacagaaaggcauguaaagccugugacugccauccuguuggcgccgcaggaaagaccuguaaucagacaacuggccagugccccuguaaagacggaguuacagguaucaccugcaacagaugcgccaaaggauaccagcaaucaagaagcccaauagcaccuuguauaaagauacccguggcgccaccuacuacagcugcuaguuccguggaagaaccugaagcagcacgccaaccuaacacauuucaggccgaaggccugagccugcugccaggagccgcugagaaggagggugcgagauguugggguuacaggcgccgccuaggccauaggguagcacaggcugaaugucgagggccacggucaugggcuuggggaagaauuacuucaucuuucucguuugcuuccaauuag

SEQ ID NO: 294193 - RNA, 1815 nt, Artificial Sequence
  derived and/or modified sequence
augaugagggccgugugggaagcacucgccgcccuugccgcgguugcuugccuaguuggcgccgugcgggggggacccggguuaucaauguuugcaggacaagccgcccagcccgacccaugcuccgaugagaacgggcauccacgucgaugcaucccugacuuuguaaaugccgcauucgggaaggaugucagagugucuucuaccugcggacgccccccggccagguauugugugguuuccgaacgaggcgaggaaaggcugagaaguugucaucuuugcaacgcaucagacccaaaaaaggcccaccccccugccuuccucaccgaucuaaauaauccgcauaauuuaaccuguuggcaaucagagaacuaucugcaguuuccucacaaugugacucugaccuuaagccugggcaagaaauucgagguaaccuacgucucacuucaauucuguucaccuagacccgaaucuauggcaauauacaaguccauggauuauggcagaacaugggugcccuuccaguucuacucaacucagugucggaaaauguauaauagaccucacagagccccaauuacuaagcagaaugaacaagaagcagucugcacagacucacacaccgauaugagaccacuuagugggggccuuauagcuuucaguacccucgauggccgaccauccgcacacgacuuugauaacagcccugugcuucaggacugggugacggcaacagacauuagaguggcguuuucccgacuucacacuuuuggggacgagaaugaggacgauuccgaguuagcgagagacucuuacuuuuaugccgugagcgaucugcaaguuggaggaagguguaaauguaacggacacgccgccagaugugugcgggauagggaugauucauuaguaugcgacugccgacacaacaccgccgggccugaaugcgauagaugcaaacccuuccauuaugaucggcccuggcagagagccaccgcaagagaggcaaacgaaugugucgccugcaauugcaacuuacaugccaggagaugucguuuuaacauggaauuguacaaauuaagcgggagaaagagcggaggcgugugccuuaauugucggcacaauacugcuggaagacauugccacuauuguaaagaaggauacuacagggauauggggaaacccaucacacaccggaaagccuguaaggccugugacugccauccugucggggccgccggaaagacaugcaaccagacuacaggacaguguccaugcaaagauggcguuaccggcaucacaugcaacagaugugcaaagggauaccagcagucacgaagucccaucgcccccugcauaaaaaucccagucgcccccccuaccaccgcugcaagcagcguugaagagccugaggacugugauucuuacugcaaagcgagcaaaggcaaauuaaagaucaauaugaagaaguacuguaagaaagauuaugcuguccaaauccacauccugaaggcagacaaggcaggggauugguggaaguuuacaguaaacauuauuuccguauacaaacagggaacaagcaggaucaggcgaggggaccagagucuguggauaaggagucgugauauugcuugcaaaugucccaaaaucaagccucuuaaaaaguauuuacugcugggcaacgccgaggacagcccagaucagagcgguaucguggcagauaaaucaucacucgucauacaguggcgugacaccugggcacgacggcugaggaaauuccagcagagggagaagaaagggaaguguaaaaaagcuuag

SEQ ID NO: 294194 - RNA, 1815 nt, Artificial Sequence
  derived and/or modified sequence
augaugcgcgcuguuugggaagccuuagcggcacuugccgccgucgcgugccuggucggcgcaguucgcggaggacccggccugucgauguucgcuggacaagccgcccagccugacccgugcagugacgagaauggacauccuaggagauguaucccagauuuugugaaugcugccuucggcaaagacguccgggucucuucaaccugcggucgcccucccgcccgauauugcgucgugagugagcguggagaagagagacugcgaaguugucauuuguguaaugccucugaucccaagaaagcccacccuccugccuuucugaccgaccugaauaacccccacaaccugacuugcuggcagucagaaaauuaccuucaguucccucacaacgugacccugacacuuagccuagggaagaaguuugaagucacauacgugucccugcaauuuugcucaccucggcccgaauccauggcaaucuauaaaucaauggauuauggcagaaccuggguaccuuuucaauuuuauaguacgcagugccgcaagauguauaaccgcccccaccgagcacccauaacgaagcaaaacgaacaagaggcuguauguacugauucccacaccgacaugcgcccgcuuucugguggccucaucgccuuuagcacccuggacggcagacccuccgcacaugacuuugauaauucaccagugcuucaggauugggucacagccacugacaucaggguggcuuuuucucggcugcauacuuucggugaugagaacgaagacgacagcgagcucgcaagggauucuuauuuuuaugccguauccgauuugcaagugggcggcaggugcaaaugcaauggccacgcagccagauguguaagagacagagacgacucauugguuugcgacugcaggcauaacacugcuggcccagaaugugaucgcugcaaacccuuucauuaugaccgcccauggcagcgugccaccgccagagaggcaaacgaaugcgucgcauguaacugcaaucugcacgcucgacgaugccgguucaauauggaauuguacaaauuaaguggucggaaaucagguggcgugugcuugaacugcagacacaacaccgcaggacgccacugccauuauuguaaggaagguuacuaucgagauauggguaagccuaucacucauaggaaagcuugcaaagcuugcgacugucacccaguaggagcggcaggcaagacuuguaaucagacuacgggccaaugccccugcaaggauggcgugaccggcauuaccugcaaucgcugugccaagggguaucagcaaucaagaucacccauagcucccuguauuaagauuccaguggcccccccgacgacugccgccucgaguguugaggaaccugaggacugcgacucauacuguaaagcuuccaaagguaagcugaagauaaacaugaagaaauauugcaagaaagacuacgcuguucagauccacauccucaaagcugauaaggccggcgacugguggaaguucacuguuaacauaauuagcgucuauaaacaggggacuucacgaauuagaaggggggaucagaguuuguggauccggucaagagacaucgccuguaaaugcccaaaaaucaaaccucucaagaaauauuuguugcucgggaacgccgaagauucacccgaccagucaggaauuguggccgacaaaucuagccucguuauccaguggcgagauacaugggcaaggcgucugcggaaguuccaacagagagaaaagaaggguaaguguaaaaaggcuuag

SEQ ID NO: 294195 - protein, 299 aa, Artificial Sequence [sequence omitted]

SEQ ID NO: 294196 - protein, 186 aa, Artificial Sequence
  derived and/or modified sequence
MAAEADGPLKRLLVPILLPEKCYDQLFVQWDLLHVPCLKILLSKGLGLGIVAGSLLVKLPQVFKILGAKSAEGLSLQSVMLELVALTGTMVYSITNNFPFRCRFPRLLRPGPAGASLTSDALDCSHPAPGLQCACCGGGEASPGSHQLPQRAHRPALSHHSLPAVWGLPGPNLHFHSGVSIPFSQL

SEQ ID NO: 294197 - DNA, 900 bp, Artificial Sequence
  derived and/or modified sequence
atggctgccgaagctgatggacctcttaagaggctactcgtacccattttgctccctgagaagtgctacgaccaactgttcgttcagtgggacctattgcatgtcccatgtctgaagatcctgctgagcaaaggcttgggacttggcatagtagccggtagcctgttagtcaaattgccccaggtttttaaaatactcggcgccaaatcagccgaaggattaagcctccagtctgttatgctagagctggtggcattaactggaacaatggtatattctataaccaataactttccattctcaagttggggagaggccttatttctgatgctccagaccatcactatttgctttttggtcatgcactataggggacagactgtgaaaggagtagccttcctggcttgctatggcctcgtgttgctcgtcctcttatcaccactcacacccctcacggtggtgccgtgctccggactgcagtgcgcgtgttgcgggggcggcgaggcttcgccaggctcccaccagttgcctcaaagagctcatcgacctgccctgagccaccactcacttccagctgtctgggggctaccagggcccaatttgcacttccactcaggaaatcggcggtctcctgacggttgggatctctgtggcctcctgtcactgcagaggccgcaccgacgccccgcagccctgttgcttgagtgtaaggcctctccacaggccgagaaaggagccgtggagcccgccacaggcgtgataccttttcccctgattcatccaacatcaggcttcagcccatccgagcccgcctgctggtgcgacttactaatccttcacagcagtgcacttgctgatttcctttcccagggattcctcctcgtggagacgaacggctag

SEQ ID NO: 294198 - DNA, 561 bp, Artificial Sequence
  derived and/or modified sequence
atggcggccgaagcagatggacctttgaagcggcttctggtcccaatcttgctgcctgaaaaatgctatgatcagttgttcgtgcagtgggaccttctgcacgttccatgcttgaaaatcttgctgtcaaaaggtctgggactcggcatcgtcgctggatcattgcttgtgaaactgccccaggtttttaagattctgggagcaaagagtgccgagggtctttcattacagtctgtcatgttggaattagtggccctgacagggacaatggtgtactctatcactaacaacttcccctttagatgtagatttccaagactcctgaggcccggaccagcaggcgcgtcacttacttcagatgctctggattgtagccacccagctcctggcttacagtgtgcctgctgcggcgggggggaggcctcccccggcagccatcaacttccacagagagcacacagacccgcactcagccaccattctctgcccgctgtgtggggcctgccaggccccaacctgcacttccacagcggcgtgagtatcccgttttctcagctctag

SEQ ID NO: 294199 - DNA, 900 bp, Artificial Sequence
  derived and/or modified sequence
atggctgctgaggctgatggccccctgaagaggctgctggtgcccatcctgctgcctgagaagtgctatgaccagctgtttgtgcagtgggacctgctgcacgtgccctgcctgaagatcctgctgagcaagggcctgggcctgggcatcgtggccggcagcctgctggtgaagctgccccaggtgttcaagatcctgggcgccaagtctgctgagggcctgagcctgcagagcgtgatgctggagctggtggccctgaccggcaccatggtgtacagcatcaccaacaacttccccttcagctcctggggcgaggccctcttcctgatgctgcagaccatcaccatctgcttcctggtgatgcactaccggggccagacagtgaagggcgtggccttcctggcctgctacggcctggtgctgctggtgctgctgagccccctgacccccctgactgtggtgccctgcagcggcctgcagtgtgcctgctgcggcggcggggaggccagccctggcagccaccagctgccccagagggcccacaggcctgccctgagccaccacagcctgcctgctgtgtggggcctgcccggccccaacctgcacttccacagcggcaacagaagaagcccagatggctgggacctgtgtggcctgctgagcctgcagaggccccacagaagacctgctgccctgctgctggagtgcaaggccagcccccaggccgagaagggagctgtggagcccgccactggagtcatccccttccccctcatccaccccaccagcggcttcagccccagcgagcccgcctgctggtgtgacctgctgatcctgcacagcagcgccctggccgacttcctgagccagggcttcctgctggtggagaccaacggctag

SEQ ID NO: 294200 - DNA, 561 bp, Artificial Sequence
  derived and/or modified sequence
atggctgctgaggctgatggccccctgaagaggctgctggtgcccatcctgctgcctgagaagtgctatgaccagctgtttgtgcagtgggacctgctgcacgtgccctgcctgaagatcctgctgagcaagggcctgggcctgggcatcgtggccggcagcctgctggtgaagctgccccaggtgttcaagatcctgggcgccaagtctgctgagggcctgagcctgcagagcgtgatgctggagctggtggccctgaccggcaccatggtgtacagcatcaccaacaacttccccttccgctgccgcttcccccggctgctgcggcccggccctgctggggccagcctgaccagtgatgccctggactgcagccacccagcccctggcctgcagtgtgcctgctgcggcggcggggaggccagccctggcagccaccagctgccccagagggcccacaggcctgccctgagccaccacagcctgcctgctgtgtggggcctgcccggccccaacctgcacttccacagcggcgtgtccatccccttcagccagctgtag

SEQ ID NO: 294201 - DNA, 1605 bp, Artificial Sequence
  derived and/or modified sequence
aattccaacagcgcgtccaaaacgtggtccctgactgagacttattttacgccactagagtgagggtgggtagcgtcagaaagagcggggcacggggcgggccagcttcgccgcgggaaaagaacgggaggcggagtgtccgcagcgcgcacgcgcaacgaaagtcaatggcggtctggagagactggcggaagctagctttgcaatatggcggccgaggcggacggaccgcttaaacggctgctcgtgccgattcttttacctgagaaatgctacgaccaacttttcgttcagtgggacttgcttcacgtcccctgcctcaagattctcctcagcaaaggcctggggctgggcattgtggctggctcacttctagtaaagctgccccaggtgtttaaaatcctgggagccaagagtgctgaagggttgagtctccagtctgtaatgctggagctagtggcattgactgggaccatggtctacagcatcactaacaacttcccattcagctcttggggtgaagccttattcctgatgctccagacgatcaccatctgcttcctggtcatgcactacagaggacagactgtgaaaggtgtcgctttcctcgcttgctacggcctggtcctgctggtgcttctctcacctctgacgcccttgactgtagtcaccctgctccaggcctccaatgtgcctgctgtggtggtggggaggcttctccaggcagccaccaactaccacaacgggcacacaggccagctctcagccatcacagtcttcctgctgtttgggggctccctggcccgaatcttcacttccattcaggaaaccggagatcccctgatggctgggacctttgtggtctcctctctctgcaacggcctcatcgccgcccagctgctcttctactggaatgcaaagcctccccacaagcagaaaaaggcgcagtagagccagctactggagtcattccgtttccactcattcacccaacctcagggttctccccatctgagccagcctgctggtgtgacttactcatcctccattcctctgcacttgcagactttctgagccagggttttcttttagtggaaacaaatggttgatggatccagatccttagaaaaggagaggatgggggtagagtctcccaagccaaaattttgacatttgagtgctttcgtaagccctgtacatgtactattaattcagtcattcagccaagcctcctcctctagcagcaatttccagctgtgtaacactatcctgggcaaatgttttaccctgtcctccagcctccctgcttcccttctggccctggaagactgagtctggacggcagagtggagggactgggaggctgtggctgcctccctccctcagcccggctgggactgtctcccggaccccagtgctggggtgggggaagggggacggagaatgactcaggcagggccccagggtggggtgaggaggttcctgctctggcaggtctaggcggaagggagtggagatggggctggttcctgctgcagtgaggggaacagatgggacaataaagactggagactcagttgaataatacaaaactgtttaatacta

SEQ ID NO: 294202 - DNA, 900 bp, Artificial Sequence
  derived and/or modified sequence
atggcggccgaggcggacggaccgcttaaacggctgctcgtgccgattcttttacctgagaaatgctacgaccaacttttcgttcagtgggacttgcttcacgtcccctgcctcaagattctcctcagcaaaggcctggggctgggcattgtggctggctcacttctagtaaagctgccccaggtgtttaaaatcctgggagccaagagtgctgaagggttgagtctccagtctgtaatgctggagctagtggcattgactgggaccatggtctacagcatcactaacaacttcccattcagctcttggggtgaagccttattcctgatgctccagacgatcaccatctgcttcctggtcatgcactacagaggacagactgtgaaaggtgtcgctttcctcgcttgctacggcctggtcctgctggtgcttctctcacctctgacgcccttgactgtagtcccctgctccggcctccaatgtgcctgctgtggtggtggggaggcttctccaggcagccaccaactaccacaacgggcacacaggccagctctcagccatcacagtcttcctgctgtttgggggctccctggcccgaatcttcacttccattcaggaaaccggagatcccctgatggctgggacctttgtggtctcctctctctgcaacggcctcatcgccgcccagctgctcttctactggaatgcaaagcctccccacaagcagaaaaaggcgcagtagagccagctactggagtcattccgtttccactcattcacccaacctcagggttctccccatctgagccagcctgctggtgtgacttactcatcctccattcctctgcacttgcagactttctgagccagggttttcttttagtggaaacaaatggttga

SEQ ID NO: 294203 - DNA, 888 bp, Artificial Sequence
  derived and/or modified sequence
gctttgcaatatggcggccgaggcggacggaccgcttaaacggctgctcgtgccgattcttttacctgagaaatgctacgaccaacttttcgttcagtgggacttgcttcacgtcccctgcctcaagattctcctcagcaaaggcctggggctgggcattgtggctggctcacttctagtaaagctgccccaggtgtttaaaatcctgggagccaagagtgctgaagggttgagtctccagtctgtaatgctggagctagtggcattgactgggaccatggtctacagcatcactaacaacttcccattcaggtgtcgctttcctcgcttgctacggcctggtcctgctggtgcttctctcacctctgacgcccttgactgtagtcaccctgctccaggcctccaatgtgcctgctgtggtggtggggaggcttctccaggcagccaccaactaccacaacgggcacacaggccagctctcagccatcacagtcttcctgctgtttgggggctccctggcccgaatcttcacttccattcaggggtgagcatcccattctctcagctctgaggaaggattctggtgtccagagttggctgacctggctggcggtctccactgatagagccatcagtccgattaccacggttacggcggcggcggctgcgattacgacgttgaggtcttgattcatcttctgtagggtaggaaaaaaccagagtcacacatccaacctcccaccctcgattcctacccatctctaactttccagaccccaggcacaccctcacccaggccattctctgtcatgttgggcccatctgattccaggcctccatccatgacggtcctgtcttcatcagtgcggcggcggcgggagcggcggc

SEQ ID NO: 294204 - DNA, 900 bp, Artificial Sequence
  derived and/or modified sequence
atggccgccgaggccgacggccccctgaagcggctgctggtgcccatcctcttacccgaaaagtgttacgatcagctctttgtccagtgggacctgctccatgtgccctgcttgaaaattttgctgagcaagggcctagggcttggcattgttgcaggctcactgttggtgaaactcccacaggtctttaagatccttggggcaaaatctgcggagggcctcagcctccagtccgtcatgctggagttagtagcactgaccgggacaatggtgtacagtatcacaaacaattttccattctcttcatggggggaagccctgttccttatgctgcagaccatcaccatttgcttcttggttatgcactataggggccagaccgtgaaaggggttgccttcttggcttgttatggattagtgcttctggtcctgctctccccactcacacctctcacagtggtcccctgtagcgggctgcagtgcgcatgctgtggcgggggagaggcatctcccggatcgcatcagctgccccagcgggcgcaccggccagcattatctcatcactctcttcccgctgtttggggattaccaggtcctaacctgcattttcattcggggaacaggcgaagccccgatggctgggacctttgtggccttctctcccttcaaaggccacatagaaggccagccgcccttttgctcgaatgtaaagcttcccctcaggccgaaaaaggggccgttgagcccgccacaggggtaattccctttcccctgatccaccccacttccgggtttagtccttcggagccagcatgttggtgtgaccttcttatattgcactcttctgccttggccgatttcctgtctcagggattcctgttggtcgaaacgaatggctag

SEQ ID NO: 294205 - DNA, 561 bp, Artificial Sequence
  derived and/or modified sequence
atggccgccgaggccgacggccccctgaagcggctgctggtgcccattctgcttccggaaaagtgctacgatcagttgtttgtgcagtgggatctcctacacgtgccatgcttgaagattcttttgtccaaggggcttgggctgggtatagtggccgggagtttgttagtgaagctgccccaggtctttaaaatcttgggcgctaagtcagccgaggggctcagcctgcagagtgtaatgcttgagctcgtggcccttactggcactatggtgtattcaataactaataacttcccttttaggtgccgctttccacgcctgctgcggcccggcccagccggagcgagtctgacgagcgatgccttggactgctcccacccagcccccgggctgcagtgcgcctgctgcggcggcggtgaggctagtcccgggtctcaccaactgccgcagcgcgcacatcgcccagcacttagccatcactccctgccggctgtctggggactgcccgggccaaatttgcactttcactccggagtgtctattccctttagccaactctag

SEQ ID NO: 294206 - DNA, 900 bp, Artificial Sequence
  derived and/or modified sequence
atggccgcagaagctgacggccctctgaagcgactactcgtgcctatcctgctccccgaaaagtgttatgatcaactgtttgtgcaatgggaccttctgcacgtgccgtgcctgaaaattctcctcagcaaagggctggggctgggaatcgtagcgggatctttgctggtaaagctcccccaggtttttaaaattcttggcgcaaagagcgccgaaggcttatcacttcagagcgtgatgttggagttagtggccctgacaggcaccatggtgtattcaattacaaataactttcccttttcttcctggggtgaagctcttttcctaatgcttcagaccatcaccatatgctttctcgtgatgcactaccgcggacaaacagtgaaaggagttgcatttctggcatgctatggtctggtactcctcgtgctgctctctcccctcacacctttgacggtggtcccatgttccggtctgcaatgtgcctgctgcggaggcggtgaggcttctcctgggtcccatcagctcccacagagagcccataggcccgctctttctcatcactccctgccagctgtgtggggtttaccgggacccaacctgcacttccacagcggaaatcgacggagccctgacggctgggatctttgtggactcctgagcctacaaagacctcataggaggccggcagcgctgctgctggaatgcaaagcctcacctcaagcagagaagggtgctgtggagcccgctactggtgtgattcccttcccgctgattcaccctacatccggtttctctccgagtgagcccgcatgctggtgtgatcttctcatactgcacagttccgccctcgcggactttctgagtcaggggtttctccttgtggagaccaatggctag

SEQ ID NO: 294207 - DNA, 561 bp, Artificial Sequence
  derived and/or modified sequence
atggccgcagaggctgacggtccactgaagcgattactagtgcccatcttgctgccggagaagtgttacgaccagctgtttgtgcaatgggacctgctccacgtgccatgcctgaaaattttgctgtcaaagggtcttggcctagggatcgtcgcagggtccttgttagtgaagcttcctcaggtatttaaaatcctcggagccaaaagtgccgaggggctctcccttcagagcgtgatgctcgaacttgtcgcacttacaggtacaatggtgtatagcatcacaaataactttcccttcagatgtagatttccacggcttctgcgccctgggcctgccggagccagtctgacaagcgatgcgctagattgctcccatccggctcccggactgcagtgcgcttgctgtggcggaggagaagcctcccctggctcccatcagctgcctcagcgggctcacagaccggctctgtcccaccatagtttaccggctgtttggggcctgcctggtcctaacctgcactttcacagcggagtgtccatccctttttctcaactgtag

SEQ ID NO: 294208 - DNA, 900 bp, Artificial Sequence
  derived and/or modified sequence
atggccgccgaggccgacggccccctgaagagactgctggtgcccatcctgctgcccgagaagtgctacgaccagctgttcgtgcagtgggacctgctgcacgtgccctgcctgaagatcctgctgagcaagggcctgggcctgggcatcgtggccggcagcctgctggtgaagctgccccaggtgttcaagatcctgggcgccaagagcgccgagggcctgagcctgcagagcgtgatgctggagctggtggccctgaccggcaccatggtgtacagcatcaccaacaacttccccttcagcagctggggcgaggccctgttcctgatgctgcagaccatcaccatctgcttcctggtgatgcactacagaggccagaccgtgaagggcgtggccttcctggcctgctacggcctggtgctgctggtgctgctgagccccctgacccccctgaccgtggtgccctgcagcggcctgcagtgcgcctgctgcggcggcggcgaggccagccccggcagccaccagctgccccagagagcccacagacccgccctgagccaccacagcctgcccgccgtgtggggcctgcccggccccaacctgcacttccacagcggcaacagaagaagccccgacggctgggacctgtgcggcctgctgagcctgcagagaccccacagaagacccgccgccctgctgctggagtgcaaggccagcccccaggccgagaagggcgccgtggagcccgccaccggcgtgatccccttccccctgatccaccccaccagcggcttcagccccagcgagcccgcctgctggtgcgacctgctgatcctgcacagcagcgccctggccgacttcctgagccagggcttcctgctggtggagaccaacggctag

SEQ ID NO: 294209 - DNA, 561 bp, Artificial Sequence
  derived and/or modified sequence
atggccgccgaggccgacggccccctgaagagactgctggtgcccatcctgctgcccgagaagtgctacgaccagctgttcgtgcagtgggacctgctgcacgtgccctgcctgaagatcctgctgagcaagggcctgggcctgggcatcgtggccggcagcctgctggtgaagctgccccaggtgttcaagatcctgggcgccaagagcgccgagggcctgagcctgcagagcgtgatgctggagctggtggccctgaccggcaccatggtgtacagcatcaccaacaacttccccttcagatgcagattccccagactgctgagacccggccccgccggcgccagcctgaccagcgacgccctggactgcagccaccccgcccccggcctgcagtgcgcctgctgcggcggcggcgaggccagccccggcagccaccagctgccccagagagcccacagacccgccctgagccaccacagcctgcccgccgtgtggggcctgcccggccccaacctgcacttccacagcggcgtgagcatccccttcagccagctgtag

SEQ ID NO: 294210 - DNA, 120 bp, Artificial Sequence
  derived and/or modified sequence
cagaaaggcggcgtggagggaaaatggcaggccgatgcagtgctgtcttggtgccccctggcctttgcagttgtgccctccaaacaactttcggagctctggtacatttgttcagactag

SEQ ID NO: 294211 - DNA, 381 bp, Artificial Sequence
  derived and/or modified sequence
atggccgccgaggccgatggtcccctgaaaaggcttctggtgcctatcctcctgccagagaagtgctatgaccagctgtttgtgcagtgggacctgctgcacgtgccttgtctcaaaattctcctgtccaaaggtctcggcctgggcatcgtggccggaagcctgttagttaaacttccccaagtgttcaaaatcttgggggccaaatccgctgctggcttaaaaaaagaagatgaggcacggccagtacggagcgcatcaatgcgagtgagagggggtctcggagcatggggacaccaacagggtgaagggtgcatggagtgggagagccagggcgccggatccggatatcggtgggcagctgtaccaccaggcgcatag

SEQ ID NO: 294212 - DNA, 381 bp, Artificial Sequence
  derived and/or modified sequence
atggctgctgaggctgatggccccctgaagaggctgctggtgcccatcctgctgcctgagaagtgctatgaccagctgtttgtgcagtgggacctgctgcacgtgccctgcctgaagatcctgctgagcaagggcctgggcctgggcatcgtggccggcagcctgctggtgaagctgccccaggtgttcaagatcctgggcgccaagtctgctgctggcctgaagaaggaggatgaggcccggcctgtgcgcagcgcctccatgagggtgcggggcggcctgggcgcctggggccaccagcagggcgagggctgcatggagtgggagagccagggcgccggcagcggctaccgctgggccgctgtgcccccaggggcctag

SEQ ID NO: 294213 - DNA, 381 bp, Artificial Sequence
  derived and/or modified sequence
atggccgccgaggccgacggccccctgaagcggctgctggtgcccatactcctgccggagaagtgttacgaccaattgttcgtccagtgggatctgcttcacgtcccctgcctgaaaatactacttagcaagggccttggcttgggcatagttgccggctctctcttggttaagctgccacaggtcttcaagattttgggggctaagtctgcggctggcctgaagaaggaagatgaggccagaccagtacgctccgctagcatgagagttagaggcggactgggcgcttggggccatcagcagggggaagggtgcatggagtgggagagccagggggcgggttccggctaccgctgggccgcagtgccccccggagcttag

SEQ ID NO: 294214 - DNA, 381 bp, Artificial Sequence
  derived and/or modified sequence
atggcagctgaggccgatggtcctcttaagcgcttgctggtgcctatcctgctgcctgaaaaatgctacgaccagctgttcgtacagtgggatttattgcacgtaccgtgcttgaagatcttgctttccaagggcttaggtttagggattgtggcaggctctctccttgtcaaactgccccaggtgttcaagattcttggcgctaaaagcgcagctggtctaaagaaggaagacgaagcgcgaccagtccgttctgcttcaatgagggtcagggggggacttggagcctggggacatcaacaaggggaaggctgtatggagtgggagtcacagggtgctggaagcgggtatcggtgggctgcagtaccaccaggtgcgtag

SEQ ID NO: 294215 - DNA, 381 bp, Artificial Sequence
  derived and/or modified sequence
atggccgccgaggccgacggccccctgaagagactgctggtgcccatcctgctgcccgagaagtgctacgaccagctgttcgtgcagtgggacctgctgcacgtgccctgcctgaagatcctgctgagcaagggcctgggcctgggcatcgtggccggcagcctgctggtgaagctgccccaggtgttcaagatcctgggcgccaagagcgccgccggcctgaagaaggaggacgaggccagacccgtgagaagcgccagcatgagagtgagaggcggcctgggcgcctggggccaccagcagggcgagggctgcatggagtgggagagccagggcgccggcagcggctacagatgggccgccgtgccccccggcgcctag

SEQ ID NO: 294216 - protein, 537 aa, Artificial Sequence
  derived and/or modified sequence
MSSSGYPPNQGAFSTEQSRYPPHSVQYTFPNTRHQQEFAVPDYRSSHLEVSQASQLLQQQQQQQLRRRPSLLSEFHPGSDRPQERRTSYEPFHPGPSPVDHDSLESKRPRLEQVSDSHFQRVSAAVLPLVHPLPEGLRASADAKKDPAFGGKHEAPSSPISGQPCGDDQNASPSKLSKEELIQSMDRVDREIAKVEQQILKLKKKQQQLEEEAAKPPEPEKPVSPPPVEQKHRSIVQIIYDENRKKAEEAHKIFEGLGPKVELPLYNQPSDTKVYHENIKTGVPARRMMKNQVMRKKLILFFKRRNHARKQREQKICQRYDQLMEAWEKKVDRIENNPRRKAKESKTREYYEKQFPEIRKQREQQERFQRVGQRGAGLSATIARSEHEISEIIDGLSEQENNEKQMRQLSVIPPMMFDAEQRRVKFINMNGLMEDPMKVYKDRQFMNVWTDHEKEIFKDKFIQHPKNFGLIASYLERKSVPDCVLYYYLTKKNENYKALVRRNYGKRRGRNQQIARPSQEEKVEEKEEDKAEKTEKK

SEQ ID NO: 294217 - protein, 541 aa, Artificial Sequence
  derived and/or modified sequence
MSSSGYPPNQGAFSTEQSRYPPHSVQYTFPNTRHQQEFAVPDYRSSHLEVSQASQLLQQQQQQQLRRRPSLLSEFHPGSDRPQERRTSYEPFHPGPSPVDHDSLESKRPRLEQVSDSHFQRVSAAVLPLVHPLPEGLRASADAKKDPAFGGKHEAPSSPISGQPCGDDQNASPSKLSKEELIQSMDRVDREIAKVEQQILKLKKKQQQLEEEAAKPPEPEKPVSPPPVEQKHRSIVQIIYDENRKKAEEAHKIFEGLGPKVELPLYNQPSDTKVYHENIKTGVPARRMMKNQVMRKKLILFFKRRNHARKQREQKICQRYDQLMEAWEKKVDRIENNPRRKAKESKTREYYEKQFPEIRKQREQQERFQRVGQRGAGLSATIARSEHEISEIIDGLSEQENNEKQMRQLSVIPPMMFDAEQRRVKFINMNGLMEDPMKVYKDRQFMNVWTDHEKEIFKDKFIQHPKNFGLIASYLERKSVPDCVLYYYLTKKNENYKALVRRNYGKRRGRNQQIARPSQEEKVEEKEEDKAEKTEKKEEEK

SEQ ID NO: 294218 - DNA, 1614 bp, Artificial Sequence
  derived and/or modified sequence
atgagcagcagcggctacccccccaaccagggcgccttcagcaccgagcagagcagataccccccccacagcgtgcagtacaccttccccaacaccagacaccagcaggagttcgccgtgcccgactacagaagcagccacctggaggtgagccaggccagccagctgctgcagcagcagcagcagcagcagctgagaagaagacccagcctgctgagcgagttccaccccggcagcgacagaccccaggagagaagaaccagctacgagcccttccaccccggccccagccccgtggaccacgacagcctggagagcaagagacccagactggagcaggtgagcgacagccacttccagagagtgagcgccgccgtgctgcccctggtgcaccccctgcccgagggcctgagagccagcgccgacgccaagaaggaccccgccttcggcggcaagcacgaggcccccagcagccccatcagcggccagccctgcggcgacgaccagaacgccagccccagcaagctgagcaaggaggagctgatccagagcatggacagagtggacagagagatcgccaaggtggagcagcagatcctgaagctgaagaagaagcagcagcagctggaggaggaggccgccaagccccccgagcccgagaagcccgtgagccccccccccgtggagcagaagcacagaagcatcgtgcagatcatctacgacgagaacagaaagaaggccgaggaggcccacaagatcttcgagggcctgggccccaaggtggagctgcccctgtacaaccagcccagcgacaccaaggtgtaccacgagaacatcaagaccggcgtgcccgccagaagaatgatgaagaaccaggtgatgagaaagaagctgatcctgttcttcaagagaagaaaccacgccagaaagcagagagagcagaagatctgccagagatacgaccagctgatggaggcctgggagaagaaggtggacagaatcgagaacaaccccagaagaaaggccaaggagagcaagaccagagagtactacgagaagcagttccccgagatcagaaagcagagagagcagcaggagagattccagagagtgggccagagaggcgccggcctgagcgccaccatcgccagaagcgagcacgagatcagcgagatcatcgacggcctgagcgagcaggagaacaacgagaagcagatgagacagctgagcgtgatcccccccatgatgttcgacgccgagcagagaagagtgaagttcatcaacatgaacggcctgatggaggaccccatgaaggtgtacaaggacagacagttcatgaacgtgtggaccgaccacgagaaggagatcttcaaggacaagttcatccagcaccccaagaacttcggcctgatcgccagctacctggagagaaagagcgtgcccgactgcgtgctgtactactacctgaccaagaagaacgagaactacaaggccctggtgagaagaaactacggcaagagaagaggcagaaaccagcagatcgccagacccagccaggaggagaaggtggaggagaaggaggaggacaaggccgagaagaccgagaagaagtag

SEQ ID NO: 294219 - DNA, 1626 bp, Artificial Sequence
  derived and/or modified sequence
atgagcagcagcggctacccccccaaccagggcgccttcagcaccgagcagagcagataccccccccacagcgtgcagtacaccttccccaacaccagacaccagcaggagttcgccgtgcccgactacagaagcagccacctggaggtgagccaggccagccagctgctgcagcagcagcagcagcagcagctgagaagaagacccagcctgctgagcgagttccaccccggcagcgacagaccccaggagagaagaaccagctacgagcccttccaccccggccccagccccgtggaccacgacagcctggagagcaagagacccagactggagcaggtgagcgacagccacttccagagagtgagcgccgccgtgctgcccctggtgcaccccctgcccgagggcctgagagccagcgccgacgccaagaaggaccccgccttcggcggcaagcacgaggcccccagcagccccatcagcggccagccctgcggcgacgaccagaacgccagccccagcaagctgagcaaggaggagctgatccagagcatggacagagtggacagagagatcgccaaggtggagcagcagatcctgaagctgaagaagaagcagcagcagctggaggaggaggccgccaagccccccgagcccgagaagcccgtgagccccccccccgtggagcagaagcacagaagcatcgtgcagatcatctacgacgagaacagaaagaaggccgaggaggcccacaagatcttcgagggcctgggccccaaggtggagctgcccctgtacaaccagcccagcgacaccaaggtgtaccacgagaacatcaagaccggcgtgcccgccagaagaatgatgaagaaccaggtgatgagaaagaagctgatcctgttcttcaagagaagaaaccacgccagaaagcagagagagcagaagatctgccagagatacgaccagctgatggaggcctgggagaagaaggtggacagaatcgagaacaaccccagaagaaaggccaaggagagcaagaccagagagtactacgagaagcagttccccgagatcagaaagcagagagagcagcaggagagattccagagagtgggccagagaggcgccggcctgagcgccaccatcgccagaagcgagcacgagatcagcgagatcatcgacggcctgagcgagcaggagaacaacgagaagcagatgagacagctgagcgtgatcccccccatgatgttcgacgccgagcagagaagagtgaagttcatcaacatgaacggcctgatggaggaccccatgaaggtgtacaaggacagacagttcatgaacgtgtggaccgaccacgagaaggagatcttcaaggacaagttcatccagcaccccaagaacttcggcctgatcgccagctacctggagagaaagagcgtgcccgactgcgtgctgtactactacctgaccaagaagaacgagaactacaaggccctggtgagaagaaactacggcaagagaagaggcagaaaccagcagatcgccagacccagccaggaggagaaggtggaggagaaggaggaggacaaggccgagaagaccgagaagaaggaggaggagaagtag

SEQ ID NO: 294220 - DNA, 1614 bp, Artificial Sequence
  derived and/or modified sequence
atgtcctcttctggttatcctccgaaccagggtgccttctccaccgagcagagccggtacccgcctcacagcgtgcagtatacctttccaaatactcgacaccagcaagaattcgcagttcccgactaccggtcttcacatcttgaagtgtcacaggcctcccaattactgcagcaacagcagcagcagcaactaaggagacggccaagcttactgagtgagttccacccagggtccgaccgaccccaggagcggcggaccagctatgagcccttccatccaggcccatcaccggttgaccacgatagcctggagtccaagcgaccaaggttagagcaggtgtccgatagtcactttcaaagggtgagtgccgccgttctgcccttagtgcatcctctgccagagggactgagggcaagcgctgatgcgaagaaggatcccgcattcggcggcaagcatgaagcaccttctagccccatttctggacagccctgtggcgatgaccagaacgcctctccctcaaaattgagcaaagaggaattgatccagtccatggatagggtggacagagagattgctaaagtagagcagcagattctgaagctgaagaaaaaacagcagcagctcgaggaggaagcagctaaaccccccgaaccagagaaacctgtgtctccccctcctgtggaacaaaagcataggagtatcgtgcaaataatttatgatgagaatcgaaagaaagcggaagaggcacacaaaatcttcgagggcttaggccccaaagtagagctccctttgtataatcagccatcagacaccaaagtgtaccacgagaatataaaaaccggggtccctgcacggagaatgatgaaaaaccaagtgatgcggaagaaacttatcctgttctttaaacggagaaaccacgcccgtaagcagagagagcagaagatttgtcagcgttatgatcagctgatggaggcttgggagaagaaagtagatcgtattgaaaataaccctcggcggaaagccaaggagagtaagacccgcgaatactacgagaagcaatttccagagatcagaaaacagcgagagcagcaggaaaggttccagcgggtgggccagcggggagccggcctttccgccacgattgcccgaagcgaacacgagatatctgaaatcattgacggtttgtctgaacaggaaaacaatgagaaacagatgagacagctgtcagtcatacctcccatgatgtttgacgccgagcagcggagggtgaagttcattaacatgaatggcttgatggaagaccctatgaaggtctacaaagatcgacagtttatgaatgtgtggaccgaccatgagaaggaaatctttaaggacaaattcattcaacaccccaaaaactttggcttgatagcttcctacctggagaggaaaagtgtgcccgactgcgttctgtactactacctgaccaaaaaaaatgaaaattacaaagccttagtccgacggaactatgggaagagacggggtcgaaaccagcagattgcaagaccttcccaggaagaaaaggtggaggaaaaggaggaggacaaagccgagaagacagaaaaaaagtag

SEQ ID NO: 294221 - DNA, 1626 bp, Artificial Sequence
  derived and/or modified sequence
atgagctcgtccggctatcctccaaaccagggcgcattctctaccgagcagtcaagataccctccacacagcgtgcagtatacattccccaatacgcggcaccagcaggagttcgctgtgcccgattaccgttcctcccatttggaggtctcgcaggcatcgcaacttctacagcagcagcagcagcagcaattgcggcgcaggcccagtctgctgtctgaatttcatcccgggtctgatcggcctcaggagaggcgcaccagctacgagccctttcaccctggaccttcccctgtcgatcatgatagtctggaatccaagcgacctcgtttggagcaggtgtccgactcccattttcagcgcgtgagtgctgcggtccttcccctcgtccacccactgcctgagggactccgtgcaagtgccgacgcaaagaaggaccccgccttcggcggcaagcatgaagcgccctcatcgccaatttcgggccaaccctgtggcgacgatcaaaacgccagcccgtccaagctgagcaaggaggagctgatccaaagcatggacagagtggaccgcgaaatagccaaagtcgaacagcagattctgaaactgaagaagaaacagcagcagttggaggaggaagcggcaaagccaccagaacctgagaagccggtttcacccccgcccgtggagcagaagcaccggagcatcgtgcagatcatttacgacgagaatagaaaaaaagccgaggaagcccacaaaattttcgaaggactggggcctaaggttgaactgcctttatacaaccagccaagtgatacaaaagtgtaccacgagaacattaagactggcgtccctgcccggagaatgatgaaaaaccaggtgatgagaaagaaactcatcctgttcttcaagcgtcgcaaccacgcgagaaagcagcgggaacagaagatctgccagagatatgatcagctcatggaggcctgggaaaagaaagtagaccgaatcgagaataatccacggagaaaggcgaaggaatctaaaacaagggagtattatgaaaagcagttccctgaaattcgtaagcagcgggagcagcaggagcggtttcagagggtaggccagagaggggctggcctgtccgcaaccatcgctcggagcgaacatgaaattagtgaaattatcgacggactgagtgaacaagaaaataacgagaaacagatgcggcagttaagcgttattccacctatgatgtttgatgcggagcaacggagggtcaaattcattaatatgaacggcctcatggaagacccaatgaaggtctacaaagaccgacagttcatgaatgtgtggactgatcacgaaaaagagatctttaaggataaattcatccagcacccgaaaaattttgggctgatcgccagttatcttgagagaaagtcagtaccggactgtgtgctgtactattatttgaccaagaagaatgagaactacaaggctcttgtgcggagaaattatggtaaaaggaggggtaggaatcaacagattgcccggcctagccaggaagagaaagtcgaggagaaggaagaagataaagctgaaaagacggaaaagaaggaggaggagaaatag

SEQ ID NO: 294222 - DNA, 1614 bp, Artificial Sequence
  derived and/or modified sequence
atgagcagcagcggctacccacccaaccagggcgccttcagcacagagcagagccgctacccaccccacagcgtgcagtacaccttccccaacaccaggcaccagcaggagtttgctgtgcctgactaccgcagcagccacctggaggtgtcccaggccagccagctgctgcagcagcagcagcagcagcagctgcggcggcggcccagcctgctgtctgagttccaccctggcagtgaccggccccaggagaggaggaccagctatgagcccttccaccctggccccagccctgtggaccatgacagcctggagagcaagaggccccggctggagcaggtgtctgacagccacttccagagggtgtctgctgctgtgctgcccctggtgcaccccctgcctgagggcctgcgggccagcgcagatgccaagaaggaccctgcctttggaggcaagcatgaggcccccagcagccccatcagcggccagccctgtggagatgaccagaatgccagccccagcaagctgagcaaggaggagctgatccagagcatggacagagtggaccgggagatcgccaaggtggagcagcagatcctgaagctgaagaagaagcagcagcagctggaggaggaggccgccaagcccccagagcctgagaagcctgtgtccccacctcctgtggagcagaagcacaggagcatcgtgcagatcatctatgatgagaacaggaagaaggccgaggaggcccacaagatctttgagggcctgggccccaaggtggagctgcccctgtacaaccagcccagcgacaccaaggtgtaccacgagaacatcaagacaggagtgcctgcccggaggatgatgaagaaccaggtgatgaggaagaagctgatcctcttcttcaagagaagaaatcatgccaggaagcagcgggagcagaagatctgccagagatatgaccagctgatggaggcctgggagaagaaggtggacagaattgagaacaaccccaggaggaaggccaaggagagcaagacccgggagtactatgagaagcagtttcctgagatcaggaagcagcgggagcagcaggagcgcttccagagggtgggccagagaggagctggcctgagcgccaccatcgcccggagtgaacatgagatcagcgagatcattgatggcctgtctgagcaggagaacaatgagaagcagatgaggcagctgagcgtcatcccccccatgatgtttgatgctgagcagaggagagtgaagttcatcaacatgaatggcctgatggaggaccccatgaaggtgtacaaggaccggcagttcatgaatgtgtggacagaccacgagaaggagatcttcaaggacaagttcatccagcaccccaagaactttggcctgattgccagctacctggagaggaagtctgtgcctgactgtgtgctgtactactacctgaccaagaagaatgaaaactacaaggccctggtgagaagaaactacggcaagagaagaggaagaaaccagcagatcgcccggcccagccaggaggagaaggtggaggagaaggaggaggacaaggccgagaagacagagaagaagtag

SEQ ID NO: 294223 - DNA, 1626 bp, Artificial Sequence
  derived and/or modified sequence
atgagcagcagcggctacccacccaaccagggcgccttcagcacagagcagagccgctacccaccccacagcgtgcagtacaccttccccaacaccaggcaccagcaggagtttgctgtgcctgactaccgcagcagccacctggaggtgtcccaggccagccagctgctgcagcagcagcagcagcagcagctgcggcggcggcccagcctgctgtctgagttccaccctggcagtgaccggccccaggagaggaggaccagctatgagcccttccaccctggccccagccctgtggaccatgacagcctggagagcaagaggccccggctggagcaggtgtctgacagccacttccagagggtgtctgctgctgtgctgcccctggtgcaccccctgcctgagggcctgcgggccagcgcagatgccaagaaggaccctgcctttggaggcaagcatgaggcccccagcagccccatcagcggccagccctgtggagatgaccagaatgccagccccagcaagctgagcaaggaggagctgatccagagcatggacagagtggaccgggagatcgccaaggtggagcagcagatcctgaagctgaagaagaagcagcagcagctggaggaggaggccgccaagcccccagagcctgagaagcctgtgtccccacctcctgtggagcagaagcacaggagcatcgtgcagatcatctatgatgagaacaggaagaaggccgaggaggcccacaagatctttgagggcctgggccccaaggtggagctgcccctgtacaaccagcccagcgacaccaaggtgtaccacgagaacatcaagacaggagtgcctgcccggaggatgatgaagaaccaggtgatgaggaagaagctgatcctcttcttcaagagaagaaatcatgccaggaagcagcgggagcagaagatctgccagagatatgaccagctgatggaggcctgggagaagaaggtggacagaattgagaacaaccccaggaggaaggccaaggagagcaagacccgggagtactatgagaagcagtttcctgagatcaggaagcagcgggagcagcaggagcgcttccagagggtgggccagagaggagctggcctgagcgccaccatcgcccggagtgaacatgagatcagcgagatcattgatggcctgtctgagcaggagaacaatgagaagcagatgaggcagctgagcgtcatcccccccatgatgtttgatgctgagcagaggagagtgaagttcatcaacatgaatggcctgatggaggaccccatgaaggtgtacaaggaccggcagttcatgaatgtgtggacagaccacgagaaggagatcttcaaggacaagttcatccagcaccccaagaactttggcctgattgccagctacctggagaggaagtctgtgcctgactgtgtgctgtactactacctgaccaagaagaatgaaaactacaaggccctggtgagaagaaactacggcaagagaagaggaagaaaccagcagatcgcccggcccagccaggaggagaaggtggaggagaaggaggaggacaaggccgagaagacagagaagaaggaggaggagaagtag

SEQ ID NO: 294224 - DNA, 1614 bp, Artificial Sequence
  derived and/or modified sequence
atgagcagcagcggctacccccccaaccagggcgccttcagcaccgaacagtccagatatccgccacactccgttcagtacacgttcccaaacacaagacaccagcaggagttcgctgtgcccgattacagaagtagccatctggaagtatcacaggcttctcagctcctacagcagcagcagcagcaacagctgcgtcggaggccgagccttctctcagagtttcacccgggtagcgatagacctcaggagcgccgcacgtcttacgagcctttccaccctggcccttcaccggtggatcacgatagcctggagtctaagagaccaaggttagagcaagtgtcagattcacattttcagagggtttcggctgctgtgctcccattagttcatcctttgcctgaggggctccgggccagtgccgatgcaaaaaaagacccagccttcggcgggaagcacgaagcccctagtagccccatcagtgggcagccctgtggcgacgatcagaatgcttcaccctcgaaactgtcaaaggaggagctgattcaatcaatggacagagttgaccgcgaaatagccaaggtggaacagcagatcctcaagctgaaaaaaaagcaacaacagttggaagaggaggcagccaaaccacctgaaccagagaagcctgtgtcacccccccccgtggagcaaaagcatcgaagtattgtgcaaatcatctacgatgaaaataggaaaaaagccgaagaggcccataagattttcgaggggctgggcccgaaggtcgagctgcccttgtacaaccagccatctgacacaaaagtgtaccatgaaaacattaaaactggtgttccagcccgaaggatgatgaagaaccaggtgatgcggaaaaagctcattctgttcttcaagcgacgcaatcacgctaggaaacagcgggagcagaaaatatgccagcggtatgatcagctgatggaggcatgggagaaaaaggttgaccggattgagaacaatcctcggaggaaggctaaggagtctaagacgagggagtattacgaaaagcagtttccggagatcagaaaacagcgcgagcagcaagagcgtttccagcgggtgggacagcgaggggctggtctgtctgcaaccatcgcccggtccgagcatgagatttcggaaattatcgacggcttaagcgaacaagagaataatgaaaagcagatgagacaactctccgtgattcctccaatgatgttcgatgctgagcagagaagggtaaaatttataaatatgaacgggttgatggaagatcccatgaaagtctataaggacagacagtttatgaatgtctggaccgaccatgagaaagaaatcttcaaggacaaatttatccagcatcctaagaacttcggccttatcgcgagttaccttgaacgaaaaagcgtgcccgattgtgtgctgtactactacttgacgaagaagaatgagaattacaaggcgctcgtcagacgcaattacggaaagcggcggggccgcaaccagcaaattgctaggccttctcaggaagagaaggtggaggagaaagaagaggacaaggccgaaaaaacagaaaaaaagtag

SEQ ID NO: 294225 - DNA, 1626 bp, Artificial Sequence
  derived and/or modified sequence
atgagcagcagcggctacccccccaaccagggcgccttcagcaccgagcagagccggtatcctccccattctgtgcagtataccttcccaaatactaggcatcagcaagagttcgctgtgcctgactaccggtccagtcatctggaggtaagccaggcctcccagttgttacagcagcaacagcaacagcagctgcggcgacgcccaagcctgctgtccgaattccatcctggttccgatcggccacaggagaggcgcacctcatatgaaccattccatccaggccctagtcccgttgatcacgactctctggaatcaaaaaggcctagactggaacaagtatcagattctcatttccagcgcgtgtcagctgccgttctccctttggttcaccccctgcccgaggggctgcgcgcatctgccgatgccaaaaaagatccagctttcgggggcaaacatgaagccccctcatctccaatttctggtcagccttgcggcgacgatcagaacgccagtcccagtaaactgagtaaggaggaactgatacagagcatggacagggtagaccgagaaatcgctaaggtggagcagcagatccttaagctcaagaaaaaacaacagcagctggaggaggaggcagcaaagccgcctgagcctgaaaagccagtttcccccccccctgtagagcagaaacataggtccatcgtgcagatcatttacgacgagaataggaagaaagcggaggaagctcacaagattttcgaaggcctgggccccaaggtggaacttccactgtacaatcagcctagcgacacaaaagtgtaccatgagaacattaaaaccggggtcccagcccgccgaatgatgaaaaaccaggttatgcgcaagaaacttatcctcttctttaagcgccgcaatcatgcaagaaagcaaagagagcagaaaatctgtcagcggtacgaccaacttatggaggcgtgggaaaaaaaggtggaccggattgagaacaatcctcggcggaaggctaaggaatccaagacacgcgaatattacgaaaaacagttccctgaaattagaaagcagagggaacagcaggaacggtttcagcgcgtggggcagcggggggcagggctgtcagcgacgattgctcgatcagaacacgagatttctgaaattattgacgggcttagcgaacaggagaacaatgagaagcagatgcgacaactttcagtgatcccacctatgatgtttgacgctgaacaaagacgggtgaaatttattaacatgaacgggttgatggaggatccaatgaaggtgtacaaggaccgtcagttcatgaatgtttggacagatcatgagaaagagatttttaaagacaaatttattcagcatccgaagaatttcggcctgatcgcatcctacctcgaacgtaaatccgtgccggattgcgtgctctactactacctcacaaagaagaatgagaactacaaggctctcgtgaggaggaattacggaaagcgcaggggcagaaatcaacagatagctcgcccttctcaggaggagaaagtggaggaaaaggaggaagacaaggctgaaaagaccgaaaaaaaagaggaggagaaatag

SEQ ID NO: 294226 - DNA, 1614 bp, Artificial Sequence
  derived and/or modified sequence
atgagtagttcaggctatcctcctaaccaaggcgctttctctactgaacagagcaggtatccgccacattctgtgcagtatacttttccgaatactcgacaccagcaagagttcgctgtgcccgactatcgctcttcccaccttgaggtttcccaagccagtcagctattgcagcagcagcaacagcagcagctgcgacgaaggcctagcctgctgtctgaattccacccgggatccgaccgccctcaggaacgcagaacttcctacgaaccattccacccgggaccatcacccgtcgatcacgattcactggaatcaaaacgccctcgattggaacaagtttctgattcacactttcaacgggtctccgccgctgtgctaccgctggtgcatcccttaccggagggcttacgggcttcagctgatgccaagaaagacccggcatttgggggtaagcacgaagccccaagcagtcctatctcaggccagccttgcggagacgaccagaatgccagtccatctaagctttccaaagaagagttgatacagagcatggatagggtggatcgtgaaatcgcaaaagttgaacagcagatcctgaagctcaagaagaagcagcagcagctcgaggaggaagcggcaaagccaccagagcccgagaagcccgtgagtccacccccagtggaacaaaagcaccggagtatcgtgcagatcatttacgatgaaaaccgaaaaaaagctgaagaggcacataagatcttcgaaggattgggcccaaaggtggagctgccgctttataaccaaccttccgatacaaaagtgtaccacgagaatatcaaaaccggcgtacctgcacgtcgtatgatgaagaatcaggtgatgagaaagaagctgattcttttcttcaagcgaaggaaccacgccaggaagcaaagagaacaaaagatatgccagagatacgaccagctgatggaagcctgggagaaaaaggtggatcgtatcgaaaataacccaaggcgaaaagccaaagaaagcaagacacgtgagtactacgagaagcagttccctgaaatacgcaaacagcgcgagcaacaagaaaggttccagagggttggccagcggggagcaggcttaagcgctactatcgctaggagcgaacacgagatctcggaaattatcgatggcctgagcgagcaagagaacaacgagaagcagatgagacagttgagcgtgatacctcccatgatgtttgacgccgagcaaaggagggttaagttcatcaatatgaacggtctgatggaggaccctatgaaagtttacaaagataggcagttcatgaacgtttggaccgatcatgaaaaggaaatttttaaggacaaatttatccagcatccaaaaaatttcggtttgatcgcctcctatctggagcgtaagtccgtacctgactgcgtcctgtactattaccttaccaaaaaaaacgaaaattacaaagctttggtgcgcagaaactacggaaagagacggggtcggaatcaacagatagccaggccctcacaggaggaaaaggtggaagagaaagaagaagataaagccgaaaagacagaaaaaaaatag

SEQ ID NO: 294227 - DNA, 1626 bp, Artificial Sequence
  derived and/or modified sequence
atgagcagcagcggatatcctccaaaccaaggcgctttctccacagagcagagtaggtacccaccacattccgtgcaatacactttcccgaatacccgacaccaacaggaattcgcagtgcccgattacagatcatcccatttagaggtgtcccaggcaagtcagctcctccagcagcagcagcagcagcagctgcgcaggaggccctcgctgctgagcgagtttcacccaggctccgatcggcctcaggagcgaagaacgagttacgagccatttcatcctggtccctctcctgttgaccatgatagtctggagagtaagcgaccgcgacttgaacaagtctccgattcgcactttcaacgggtgtccgcagccgtgttaccactcgttcacccgcttcctgaaggccttagggcatccgccgatgctaagaaagatcctgcatttgggggaaaacatgaagcaccatcctcaccaatctcaggccagccatgcggcgatgaccagaacgcgtccccttccaagttatctaaggaagaacttattcagtctatggacagagtagacagggagatcgctaaggtcgagcagcaaatcttaaagctcaaaaagaaacagcaacagctggaggaagaagccgctaagcccccagaacccgaaaaaccagtcagcccacccccagtcgagcagaaacatcgttcaattgtgcaaatcatatacgatgaaaacagaaagaaagccgaagaagcacacaagattttcgagggattgggacccaaggtcgagctgccactctacaaccagccctcagatacaaaggtgtaccacgagaacatcaagaccggagtgccggcacgtcggatgatgaagaaccaggtgatgaggaagaagcttatcctattttttaaaagacgtaatcacgccaggaaacagagggaacagaaaatttgtcagcgctatgaccagctgatggaagcctgggaaaagaaggttgacagaatcgaaaacaacccacgaagaaaggctaaggagtccaagactcgggagtattacgaaaaacaattcccggagatcagaaagcagcgcgagcaacaggaacgattccaacgcgtgggtcagcgcggagcaggactaagcgccacaatcgctaggtctgagcacgaaataagcgaaatcatcgacggcctgagtgagcaagagaataacgaaaagcagatgcggcaactcagtgtcattccaccaatgatgttcgacgccgagcagcgtagggtaaagttcatcaacatgaatggcctgatggaggaccccatgaaggtctataaagataggcagttcatgaacgtgtggaccgatcacgaaaaagagattttcaaggataagttcattcaacacccaaaaaattttggactaattgccagttatctagagcgcaagagcgttccggattgtgttctgtactactaccttactaagaagaacgagaattataaggctctggtacgacggaactacggtaaaaggagaggtcggaaccagcagatcgctaggccctctcaggaggaaaaagtggaggaaaaagaagaggacaaagccgaaaaaacggaaaaaaaggaggaggagaaatag

SEQ ID NO: 294228 - DNA, 1969 bp, Artificial Sequence
  derived and/or modified sequence
caagatggcggccaaggtggcgaagcagcagccgcggcggcggcggcggctggagtgagcgtccgactcgccgcgccgaacgaggtcccggtgtagggccgcgcgccgtggccgcgtcccactcctcaggccggggcgcacgtcggctcccacgcttagccagctcccgagtttcactcttgttgcccaggctggagtgcaatggcacgatctcggctcaccgcaacctctgcctcttgggttcaagcgattctcctgcctcagcctctcgagtagctgggattacaggtggtttcctagaaacatgattgtttattggcattgatctcacagtctggtgaggacttctttactgataatgtcaagttcaggttatcctcccaaccaaggagcattcagcacagaacaaagtcgttatcctcctcactctgtccagtatacatttcccaacacccgccaccagcaggagttcgcagtccctgattatcgttcctctcatcttgaagtgagtcaggcatcacagcttttgcagcaacagcagcagcaacagcttcgaaggcgaccttccttgctttcagaatttcacccaggttctgacaggcctcaagaaaggagaactagttatgaaccgtttcatccaggcccatccccagtggatcatgattcactggaatcgaagcgaccacgtctggaacaggtttctgattctcattttcagcgtgtcagtgctgcggttttgcctttagtgcacccgctgccagaagggctgagggcttctgcagatgctaagaaggatccagcattcggaggcaaacatgaagctccatcctctccaatttcggggcaaccatgtggagatgatcaaaatgcttcaccttcaaaactctcaaaggaagagttaatacagagtatggatcgtgtagatcgagaaattgcaaaagtagaacagcagatccttaaactgaaaaagaaacaacaacagcttgaagaagaggcagctaaacctcctgagcctgagaagcccgtgtcccctcctcctgtggagcagaaacaccgcagtattgtccaaattatttatgatgagaatcggaaaaaagcagaagaagctcataaaatttttgaaggtcttggcccaaaagttgaactgccactgtataaccagccatcagataccaaggtgtaccatgagaacatcaagactggagtacctgcaaggcgcatgatgaaaaaccaggtgatgaggaaaaaactcattttattttttaaaagaagaaatcatgcaagaaaacaaagggaacaaaaaatctgccagcgttatgatcagctcatggaggcatgggagaaaaaagtggacagaatagaaaataatcctcggaggaaagctaaagaaagcaaaacaagggaatactatgaaaagcagtttccagaaattcgaaaacaaagagaacagcaagaaagatttcagcgagttgggcagaggggagctggtctttcagccaccattgctaggagtgagcatgagatttctgaaattattgatgggctctctgagcaggagaataatgagaaacaaatgcggcagctctctgtgattccacctatgatgtttgatgcagaacaaagacgagtcaagttcattaacatgaatgggcttatggaggaccctatgaaagtgtataaagataggcagtttatgaatgtttggactgaccatgaaaaggagatctttaaggacaagtttatccagcatccaaaaaactttggactaattgcatcatacttggagaggaagagtgttcctgattgtgttttgtattactatttaaccaagaaaaatgagaattataaagccctcgtcagaaggaattatgggaaacgcagaggcagaaaccagcaaattgctcgaccctcgcaagaagaaaaagtagaagaaaaagaagaggataaagcagaaaaaacagaaaaaaaa

SEQ ID NO: 294229 - protein, 2343 aa, Artificial Sequence
  derived and/or modified sequence
MSSSGYPPNQGAFSTEQSRYPPHSVQYTFPNTRHQQDPAFGGKHEAPSSPISGQPCGDDQNASPSKLSKEELIQSMDRVDREIAKVEQQILKLKKKQQQLEEEAAKPPEPEKPVSPPPVEQKHRSIVQIIYDENRKKAEEAHKIFEGLGPKVELPLYNQPSDTKVYHENIKTNQVMRKKLILFFKRRNHARKQREQKICQRYDQLMEAWEKKVDRIENNPRRKAKESKTREYYEKQFPEIRKQREQQERFQRVGQRGAGLSATIARSEHEISEIIDGLSEQENNEKQMRQLSVIPPMMFDAEQRRVKFINMNGLMEDPMKVYKDRQFMNVWTDHEKEIFKDKFIQHPKNFGLIASYLERKSVPDCVLYYYLTKKNENYKALVRRNYGKRRGRNQQIARPSQEEKVEEKEEDKAEKTEKKEEEKKDEEEKDEKEDSKENTKEKDKIDGTAEETEEREQATPRGRKTANSQGRRKGRITRSMTNEAAAASAAAAAATEEPPPPLPPPPEPISTEPVETSRWTEEEMEVAKKGLVEHGRNWAAIAKMVGTKSEAQCKNFYFNYKRRHNLDNLLQQHKQKTSRKPREERDVSQCESVASTVSAQEDEDIEASNEEENPEDSEGAENSSDTESAPSPSPVEAVKPSEDSPENATSRGNTEPAVELEPTTETAPSTSPSLAVPSTKPAEDESVETQVNDSISAETAEQMDVDQQEHSAEEGSVCDPPPATKADSVDVEVRVPENHASKVEGDNTKERDLDRASEKVEPRDEDLVVAQQINAQRPEPQSDNDSSATCSADEDVDGEPERQRMFPMDSKPSLLNPTGSILVSSPLKPNPLDLPQLQHRAAVIPPMVSCTPCNIPIGTPVSGYALYQRHIKAMHESALLEEQRQRQEQIDLECRSSTSPCGTSKSPNREWEVLQPAPHQVITNLPEGVRLPTTRPTRPPPPLIPSSKTTVASEKPSFIMGGSISQGTPGTYLTSHNQASYTQETPKPSVGSISLGLPRQQESAKSATLPYIKQEEFSPRSQNSQPEGLLVRAQHEGVVRGTAGAIQEGSITRGTPTSKISVESIPSLRGSITQGTPALPQTGIPTEALVKGSISRMPIEDSSPEKGREEAASKGHVIYEGKSGHILSYDNIKNAREGTRSPRTAHEISLKRSYESVEGNIKQGMSMRESPVSAPLEGLICRALPRGSPHSDLKERTVLSGSIMQGTPRATTESFEDGLKYPKQIKRESPPIRAFEGAITKGKPYDGITTIKEMGRSIHEIPRQDILTQESRKTPEVVQSTRPIIEGSISQGTPIKFDNNSGQSAIKHNVKSLITGPSKLSRGMPPLEIVPENIKVVERGKYEDVKAGETVRSRHTSVVSSGPSVLRSTLHEAPKAQLSPGIYDDTSARRTPVSYQNTMSRGSPMMNRTSDVSSNKSTNHERKSTLTPTQRESIPAKSPVPGVDPVVSHSPFDPHHRGSTAGEVYRSHLPTHLDPAMPFHRALDPAAAYLFQRQLSPTPGYPSQYQLYAMENTRQTILNDYITSQQMQVNLRPDVARGLSPREQPLGLPYPATRGIIDLTNMPPTILVPHPGGTSTPPMDRITYIPGTQITFPPRPYNSASMSPGHPTHLAAAASAEREREREREKERERERIAAASSDLYLRPGSEQPGRPGSHGYVRSPSPSVRTQETMLQQRPSVFQGTNGTSVITPLDPTAQLRIMPLPAGGPSISQGLPASRYNTAADALAALVDAAASAPQMDVSKTKESKHEAARLEENLRSRSAAVSEQQQLEQKTLEVEKRSVQCLYTSSAFPSGKPQPHSSVVYSEAGKDKGPPPKSRYEEELRTRGKTTITAANFIDVIITRQIASDKDARERGSQSSDSSSSLSSHRYETPSDAIEVISPASSPAPPQEKLQTYQPEVVKANQAENDPTRQYEGPLHHYRPQQESPSPQQQLPPSSQAEGMGQVPRTHRLITLADHICQIITQDFARNQVSSQTPQQPPTSTFQNSPSALVSTPVRTKTSNRYSPESQAQSVHHQRPGSRVSPENLVDKSRGSRPGKSPERSHVSSEPYEPISPPQVPVVHEKQDSLLLLSQRGAEPAEQRNDARSPGSISYLPSFFTKLENTSPMVKSKKQEIFRKLNSSGGGDSDMAAAQPGTEIFNLPAVTTSGSVSSRGHSFADPASNLGLEDIIRKALMGSFDDKVEDHGVVMSQPMGVVPGTANTSVVTSGETRREEGDPSPHSGVCKPKLISKSNSRKSKSPIPGQGYLGTERPSSVSSVHSEGDYHRQTPGWAWEDRPSSTGSTQFPYNPLTMRMLSSTPPTPIACAPSAVNQAAPHQQNRIWEREPAPLLSAQYETLSDSDD

SEQ ID NO: 294230 - DNA, 7032 bp, Artificial Sequence
  derived and/or modified sequence
atgagcagcagcggctacccccccaaccagggcgccttcagcaccgagcagagcagataccccccccacagcgtgcagtacaccttccccaacaccagacaccagcaggaccccgccttcggcggcaagcacgaggcccccagcagccccatcagcggccagccctgcggcgacgaccagaacgccagccccagcaagctgagcaaggaggagctgatccagagcatggacagagtggacagagagatcgccaaggtggagcagcagatcctgaagctgaagaagaagcagcagcagctggaggaggaggccgccaagccccccgagcccgagaagcccgtgagccccccccccgtggagcagaagcacagaagcatcgtgcagatcatctacgacgagaacagaaagaaggccgaggaggcccacaagatcttcgagggcctgggccccaaggtggagctgcccctgtacaaccagcccagcgacaccaaggtgtaccacgagaacatcaagaccaaccaggtgatgagaaagaagctgatcctgttcttcaagagaagaaaccacgccagaaagcagagagagcagaagatctgccagagatacgaccagctgatggaggcctgggagaagaaggtggacagaatcgagaacaaccccagaagaaaggccaaggagagcaagaccagagagtactacgagaagcagttccccgagatcagaaagcagagagagcagcaggagagattccagagagtgggccagagaggcgccggcctgagcgccaccatcgccagaagcgagcacgagatcagcgagatcatcgacggcctgagcgagcaggagaacaacgagaagcagatgagacagctgagcgtgatcccccccatgatgttcgacgccgagcagagaagagtgaagttcatcaacatgaacggcctgatggaggaccccatgaaggtgtacaaggacagacagttcatgaacgtgtggaccgaccacgagaaggagatcttcaaggacaagttcatccagcaccccaagaacttcggcctgatcgccagctacctggagagaaagagcgtgcccgactgcgtgctgtactactacctgaccaagaagaacgagaactacaaggccctggtgagaagaaactacggcaagagaagaggcagaaaccagcagatcgccagacccagccaggaggagaaggtggaggagaaggaggaggacaaggccgagaagaccgagaagaaggaggaggagaagaaggacgaggaggagaaggacgagaaggaggacagcaaggagaacaccaaggagaaggacaagatcgacggcaccgccgaggagaccgaggagagagagcaggccacccccagaggcagaaagaccgccaacagccagggcagaagaaagggcagaatcaccagaagcatgaccaacgaggccgccgccgccagcgccgccgccgccgccgccaccgaggagccccccccccccctgccccccccccccgagcccatcagcaccgagcccgtggagaccagcagatggaccgaggaggagatggaggtggccaagaagggcctggtggagcacggcagaaactgggccgccatcgccaagatggtgggcaccaagagcgaggcccagtgcaagaacttctacttcaactacaagagaagacacaacctggacaacctgctgcagcagcacaagcagaagaccagcagaaagcccagagaggagagagacgtgagccagtgcgagagcgtggccagcaccgtgagcgcccaggaggacgaggacatcgaggccagcaacgaggaggagaaccccgaggacagcgagggcgccgagaacagcagcgacaccgagagcgcccccagccccagccccgtggaggccgtgaagcccagcgaggacagccccgagaacgccaccagcagaggcaacaccgagcccgccgtggagctggagcccaccaccgagaccgcccccagcaccagccccagcctggccgtgcccagcaccaagcccgccgaggacgagagcgtggagacccaggtgaacgacagcatcagcgccgagaccgccgagcagatggacgtggaccagcaggagcacagcgccgaggagggcagcgtgtgcgaccccccccccgccaccaaggccgacagcgtggacgtggaggtgagagtgcccgagaaccacgccagcaaggtggagggcgacaacaccaaggagagagacctggacagagccagcgagaaggtggagcccagagacgaggacctggtggtggcccagcagatcaacgcccagagacccgagccccagagcgacaacgacagcagcgccacctgcagcgccgacgaggacgtggacggcgagcccgagagacagagaatgttccccatggacagcaagcccagcctgctgaaccccaccggcagcatcctggtgagcagccccctgaagcccaaccccctggacctgccccagctgcagcacagagccgccgtgatcccccccatggtgagctgcaccccctgcaacatccccatcggcacccccgtgagcggctacgccctgtaccagagacacatcaaggccatgcacgagagcgccctgctggaggagcagagacagagacaggagcagatcgacctggagtgcagaagcagcaccagcccctgcggcaccagcaagagccccaacagagagtgggaggtgctgcagcccgccccccaccaggtgatcaccaacctgcccgagggcgtgagactgcccaccaccagacccaccagaccccccccccccctgatccccagcagcaagaccaccgtggccagcgagaagcccagcttcatcatgggcggcagcatcagccagggcacccccggcacctacctgaccagccacaaccaggccagctacacccaggagacccccaagcccagcgtgggcagcatcagcctgggcctgcccagacagcaggagagcgccaagagcgccaccctgccctacatcaagcaggaggagttcagccccagaagccagaacagccagcccgagggcctgctggtgagagcccagcacgagggcgtggtgagaggcaccgccggcgccatccaggagggcagcatcaccagaggcacccccaccagcaagatcagcgtggagagcatccccagcctgagaggcagcatcacccagggcacccccgccctgccccagaccggcatccccaccgaggccctggtgaagggcagcatcagcagaatgcccatcgaggacagcagccccgagaagggcagagaggaggccgccagcaagggccacgtgatctacgagggcaagagcggccacatcctgagctacgacaacatcaagaacgccagagagggcaccagaagccccagaaccgcccacgagatcagcctgaagagaagctacgagagcgtggagggcaacatcaagcagggcatgagcatgagagagagccccgtgagcgcccccctggagggcctgatctgcagagccctgcccagaggcagcccccacagcgacctgaaggagagaaccgtgctgagcggcagcatcatgcagggcacccccagagccaccaccgagagcttcgaggacggcctgaagtaccccaagcagatcaagagagagagcccccccatcagagccttcgagggcgccatcaccaagggcaagccctacgacggcatcaccaccatcaaggagatgggcagaagcatccacgagatccccagacaggacatcctgacccaggagagcagaaagacccccgaggtggtgcagagcaccagacccatcatcgagggcagcatcagccagggcacccccatcaagttcgacaacaacagcggccagagcgccatcaagcacaacgtgaagagcctgatcaccggccccagcaagctgagcagaggcatgccccccctggagatcgtgcccgagaacatcaaggtggtggagagaggcaagtacgaggacgtgaaggccggcgagaccgtgagaagcagacacaccagcgtggtgagcagcggccccagcgtgctgagaagcaccctgcacgaggcccccaaggcccagctgagccccggcatctacgacgacaccagcgccagaagaacccccgtgagctaccagaacaccatgagcagaggcagccccatgatgaacagaaccagcgacgtgagcagcaacaagagcaccaaccacgagagaaagagcaccctgacccccacccagagagagagcatccccgccaagagccccgtgcccggcgtggaccccgtggtgagccacagccccttcgacccccaccacagaggcagcaccgccggcgaggtgtacagaagccacctgcccacccacctggaccccgccatgcccttccacagagccctggaccccgccgccgcctacctgttccagagacagctgagccccacccccggctaccccagccagtaccagctgtacgccatggagaacaccagacagaccatcctgaacgactacatcaccagccagcagatgcaggtgaacctgagacccgacgtggccagaggcctgagccccagagagcagcccctgggcctgccctaccccgccaccagaggcatcatcgacctgaccaacatgccccccaccatcctggtgccccaccccggcggcaccagcaccccccccatggacagaatcacctacatccccggcacccagatcaccttcccccccagaccctacaacagcgccagcatgagccccggccaccccacccacctggccgccgccgccagcgccgagagagagagagagagagagagagagaaggagagagagagagagagaatcgccgccgccagcagcgacctgtacctgagacccggcagcgagcagcccggcagacccggcagccacggctacgtgagaagccccagccccagcgtgagaacccaggagaccatgctgcagcagagacccagcgtgttccagggcaccaacggcaccagcgtgatcacccccctggaccccaccgcccagctgagaatcatgcccctgcccgccggcggccccagcatcagccagggcctgcccgccagcagatacaacaccgccgccgacgccctggccgccctggtggacgccgccgccagcgccccccagatggacgtgagcaagaccaaggagagcaagcacgaggccgccagactggaggagaacctgagaagcagaagcgccgccgtgagcgagcagcagcagctggagcagaagaccctggaggtggagaagagaagcgtgcagtgcctgtacaccagcagcgccttccccagcggcaagccccagccccacagcagcgtggtgtacagcgaggccggcaaggacaagggccccccccccaagagcagatacgaggaggagctgagaaccagaggcaagaccaccatcaccgccgccaacttcatcgacgtgatcatcaccagacagatcgccagcgacaaggacgccagagagagaggcagccagagcagcgacagcagcagcagcctgagcagccacagatacgagacccccagcgacgccatcgaggtgatcagccccgccagcagccccgcccccccccaggagaagctgcagacctaccagcccgaggtggtgaaggccaaccaggccgagaacgaccccaccagacagtacgagggccccctgcaccactacagaccccagcaggagagccccagcccccagcagcagctgccccccagcagccaggccgagggcatgggccaggtgcccagaacccacagactgatcaccctggccgaccacatctgccagatcatcacccaggacttcgccagaaaccaggtgagcagccagaccccccagcagccccccaccagcaccttccagaacagccccagcgccctggtgagcacccccgtgagaaccaagaccagcaacagatacagccccgagagccaggcccagagcgtgcaccaccagagacccggcagcagagtgagccccgagaacctggtggacaagagcagaggcagcagacccggcaagagccccgagagaagccacgtgagcagcgagccctacgagcccatcagccccccccaggtgcccgtggtgcacgagaagcaggacagcctgctgctgctgagccagagaggcgccgagcccgccgagcagagaaacgacgccagaagccccggcagcatcagctacctgcccagcttcttcaccaagctggagaacaccagccccatggtgaagagcaagaagcaggagatcttcagaaagctgaacagcagcggcggcggcgacagcgacatggccgccgcccagcccggcaccgagatcttcaacctgcccgccgtgaccaccagcggcagcgtgagcagcagaggccacagcttcgccgaccccgccagcaacctgggcctggaggacatcatcagaaaggccctgatgggcagcttcgacgacaaggtggaggaccacggcgtggtgatgagccagcccatgggcgtggtgcccggcaccgccaacaccagcgtggtgaccagcggcgagaccagaagagaggagggcgaccccagcccccacagcggcgtgtgcaagcccaagctgatcagcaagagcaacagcagaaagagcaagagccccatccccggccagggctacctgggcaccgagagacccagcagcgtgagcagcgtgcacagcgagggcgactaccacagacagacccccggctgggcctgggaggacagacccagcagcaccggcagcacccagttcccctacaaccccctgaccatgagaatgctgagcagcaccccccccacccccatcgcctgcgcccccagcgccgtgaaccaggccgccccccaccagcagaacagaatctgggagagagagcccgcccccctgctgagcgcccagtacgagaccctgagcgacagcgacgactag

SEQ ID NO: 294231 - DNA, 3075 bp, Artificial Sequence
  derived and/or modified sequence
atgccccccctggagatcgtgcccgagaacatcaaggtggtggagagaggcaagtacgaggacgtgaaggccggcgagaccgtgagaagcagacacaccagcgtggtgagcagcggccccagcgtgctgagaagcaccctgcacgaggcccccaaggcccagctgagccccggcatctacgacgacaccagcgccagaagaacccccgtgagctaccagaacaccatgagcagaggcagccccatgatgaacagaaccagcgacgtgaccatcagcagcaacaagagcaccaaccacgagagaaagagcaccctgacccccacccagagagagagcatccccgccaagagccccgtgcccggcgtggaccccgtggtgagccacagccccttcgacccccaccacagaggcagcaccgccggcgaggtgtacagaagccacctgcccacccacctggaccccgccatgcccttccacagagccctggaccccgccgccgccgcctacctgttccagagacagctgagccccacccccggctaccccagccagtaccagctgtacgccatggagaacaccagacagaccatcctgaacgactacatcaccagccagcagatgcaggtgaacctgagacccgacgtggccagaggcctgagccccagagagcagcccctgggcctgccctaccccgccaccagaggcatcatcgacctgaccaacatgccccccaccatcctggtgccccaccccggcggcaccagcaccccccccatggacagaatcacctacatccccggcacccagatcaccttcccccccagaccctacaacagcgccagcatgagccccggccaccccacccacctggccgccgccgccagcgccgagagagagagagagagagagagagagaaggagagagagagagagagaatcgccgccgccagcagcgacctgtacctgagacccggcagcgagcagcccggcagacccggcagccacggctacgtgagaagccccagccccagcgtgagaacccaggagaccatgctgcagcagagacccagcgtgttccagggcaccaacggcaccagcgtgatcacccccctggaccccaccgcccagctgagaatcatgcccctgcccgccggcggccccagcatcagccagggcctgcccgccagcagatacaacaccgccgccgacgccctggccgccctggtggacgccgccgccagcgccccccagatggacgtgagcaagaccaaggagagcaagcacgaggccgccagactggaggagaacctgagaagcagaagcgccgccgtgagcgagcagcagcagctggagcagaagaccctggaggtggagaagagaagcgtgcagtgcctgtacaccagcagcgccttccccagcggcaagccccagccccacagcagcgtggtgtacagcgaggccggcaaggacaagggccccccccccaagagcagatacgaggaggagctgagaaccagaggcaagaccaccatcaccgccgccaacttcatcgacgtgatcatcaccagacagatcgccagcgacaaggacgccagagagagaggcagccagagcagcgacagcagcagcagcctgagcagccacagatacgagacccccagcgacgccatcgaggtgatcagccccgccagcagccccgcccccccccaggagaagctgcagacctaccagcccgaggtggtgaaggccaaccaggccgagaacgaccccaccagacagtacgagggccccctgcaccactacagaccccagcaggagagccccagcccccagcagcagctgccccccagcagccaggccgagggcatgggccaggtgcccagaacccacagactgatcaccctggccgaccacatctgccagatcatcacccaggacttcgccagaaaccaggtgagcagccagaccccccagcagccccccaccagcaccttccagaacagccccagcgccctggtgagcacccccgtgagaaccaagaccagcaacagatacagccccgagagccaggcccagagcgtgcaccaccagagacccggcagcagagtgagccccgagaacctggtggacaagagcagaggcagcagacccggcaagagccccgagagaagccacgtgagcagcgagccctacgagcccatcagccccccccaggtgcccgtggtgcacgagaagcaggacagcctgctgctgctgagccagagaggcgccgagcccgccgagcagagaaacgacgccagaagccccggcagcatcagctacctgcccagcttcttcaccaagctggagaacaccagccccatggtgaagagcaagaagcaggagatcttcagaaagctgaacagcagcggcggcggcgacagcgacatggccgccgcccagcccggcaccgagatcttcaacctgcccgccgtgaccaccagcggcagcgtgagcagcagaggccacagcttcgccgaccccgccagcaacctgggcctggaggacatcatcagaaaggccctgatgggcagcttcgacgacaaggtggaggaccacggcgtggtgatgagccagcccatgggcgtggtgcccggcaccgccaacaccagcgtggtgaccagcggcgagaccagaagagaggagggcgaccccagcccccacagcggcggcgtgtgcaagcccaagctgatcagcaagagcaacagcagaaagagcaagagccccatccccggccagggctacctgggcaccgagagacccagcagcgtgagcagcgtgcacagcgagggcgactaccacagacagacccccggctgggcctgggaggacagacccagcagcaccggcagcacccagttcccctacaaccccctgaccatgagaatgctgagcagcaccccccccacccccatcgcctgcgcccccagcgccgtgaaccaggccgccccccaccagcagaacagaatctgggagagagagcccgcccccctgctgagcgcccagtacgagaccctgagcgacagcgacgactag

SEQ ID NO: 294232 - DNA, 7032 bp, Artificial Sequence
  derived and/or modified sequence
atgagtagtagcggatacccacccaaccagggtgccttttctacagagcagtcaaggtaccctccgcattcagtgcagtacacctttcccaatacaagacatcagcaggacccagctttcggtggaaagcatgaggccccttcatctccaatctccggtcagccatgcggcgacgaccagaacgctagcccctctaaattgagtaaagaggaactcattcagagtatggaccgggttgatagggagattgctaaggtcgagcagcaaattctgaaattgaagaagaagcaacaacagctggaggaggaagcagccaagccacccgagcctgagaaacccgtgagcccaccacccgtagagcagaagcatagatcgatcgttcagataatctatgatgaaaaccgcaagaaagcggaggaggcacacaaaatttttgagggtctaggtcctaaagttgagctccccctttataatcagccctctgacacaaaggtatatcacgagaatatcaagacaaatcaggtgatgcgaaagaagctcatcctattcttcaaaagaagaaatcacgcacgaaagcagcgggaacagaaaatttgccagcgctacgaccagttaatggaagcatgggagaaaaaagtggatcgaatagaaaacaaccctcgcagaaaggctaaagagagcaagactcgagaatactacgagaagcagttccctgagattagaaagcagagggaacagcaagaacggtttcagcgcgtgggacaaaggggcgccggtctcagcgcaaccattgcaagatctgaacatgagatctctgagatcatcgacggcctctctgagcaagaaaacaacgagaagcaaatgaggcagttaagcgtgattccccctatgatgtttgacgcggagcagcggagggtaaagttcattaacatgaacgggctaatggaggaccctatgaaggtttacaaagaccgccaatttatgaacgtatggactgatcacgaaaaggaaatttttaaagacaagtttattcaacacccaaagaattttggactgatagccagttatcttgagcgcaaatccgtcccagattgcgtcctctactactacctcacaaaaaagaatgaaaactacaaggcgttggtcagacgaaattacgggaagaggaggggccggaatcagcagattgcaagaccatcacaggaggaaaaggtggaggagaaggaggaagataaagcggagaagactgaaaaaaaagaagaggaaaagaaggacgaggaagagaaggacgagaaggaagacagcaaagaaaacacgaaagaaaaggataagatcgatgggacggccgaagagaccgaagaacgtgaacaggctacacctcgcggcagaaagactgcaaattctcaaggcaggcgcaagggccggattactcgctctatgacaaacgaggctgcagccgcctctgccgctgctgcggccgccactgaggaaccgcccccaccgctgcctccgccacccgagcctattagtacggagcctgttgagacaagcagatggaccgaggaggagatggaagtggctaaaaagggtctggtcgaacacgggaggaactgggccgccattgcgaaaatggtcggaacaaagagcgaagcacagtgcaagaatttctacttcaactacaagagacggcataatctggataatcttctgcaacagcataaacagaaaaccagtcgcaaacctagggaagagagagacgtgtcccagtgcgagagtgttgcatctactgtttccgcccaagaggacgaagacattgaagcatcaaatgaagaagagaacccggaagactccgaaggagccgagaatagttctgacactgagagtgctcctagtccttccccagtggaggccgtgaagccctcagaggattcccccgagaatgcaacctctaggggcaacaccgagcctgccgtcgagctggagcccactacggagactgcccctagcacatccccctcccttgctgttcctagtaccaagcctgcggaagatgaaagtgtggagactcaagtgaatgacagcatcagcgcggagacggctgagcagatggacgtcgaccagcaggagcatagcgccgaggagggctctgtctgtgatccaccaccggccaccaaggctgatagcgtggacgtggaggtccgcgtccctgagaaccacgcctccaaggtggagggcgacaacacaaaggagagggaccttgaccgcgcttcagagaaggtggaacctcgagacgaggatctcgtggtggctcagcaaataaacgctcagaggccagaaccacagagcgacaacgacagctccgctacctgctccgctgacgaggacgtcgatggagaaccagagagacagcgaatgttccccatggatagcaaacctagtttgctgaaccccaccggttcgattctggtgagtagtcccctcaagcctaatcctctggacctgcctcagctgcaacacagggccgctgtgataccaccgatggttagctgcactccatgtaatatccctatcggcacccctgtttctggctatgctctttaccaacggcacatcaaggccatgcacgaaagtgcacttctcgaagaacagcggcagcggcaagaacagatagatctcgagtgcaggtcctcaacatcaccttgtggaacctccaaatccccaaatagagaatgggaggtattgcagccagctccccatcaggtgatcactaaccttccagaaggcgtgcggctgccaaccaccagacccacccggcccccgcccccgctgattcccagctcaaaaaccaccgtggcgtctgagaagccttccttcataatgggcggcagcatctctcagggaacccccggcacctatctgacctcacacaatcaggcgtcatacactcaggagactcctaaaccctccgtcggttcaatttcgttgggcttacctaggcagcaggagtccgccaaatctgctactctaccctatattaagcaggaggagttctccccgcgctcccagaattctcagccggaagggctcttagtgagggcacagcatgaaggcgtggtgcgaggtaccgctggcgccattcaggaagggagcatcacgagaggaacgcccacttctaaaatctctgtggaatcgattcccagtttgcggggctccatcacacagggcacccccgccctgcctcagactggcattccgacagaagcgctggtgaagggcagcattagtcggatgcctatcgaggattcttccccagagaaggggcgagaggaggctgcctctaagggccatgtaatctatgagggtaaaagcggacacatattatcctacgacaatatcaagaatgcacgggaaggaacacgctcaccgcgtactgctcatgagatttccctaaagcgtagttatgagtctgtagaaggcaatattaagcaaggaatgtcgatgcgggagtctccggtgtccgccccactggaaggtttaatttgtagagctctgcctaggggttcacctcattcagacctgaaggagcggaccgttctgagcggatctatcatgcagggcacaccaagggccacaacggaaagcttcgaggacgggcttaaatatcccaaacagattaagagagagtctccgcctatcagagcatttgaaggtgctattacaaagggcaagccctacgatggaataaccactatcaaagaaatgggcaggtccatccatgaaattccccgccaagatattttgacacaggagtccaggaagacaccggaggtggtgcagagtacacggcccatcatcgaaggatccatctcccaagggacccccatcaagtttgataacaactctgggcagtcagctataaagcacaatgtcaaaagtctcattacgggaccttcaaaactgtcccgaggaatgccacccctggagatcgttcccgagaatatcaaagtcgtagagcgaggaaaatacgaagatgtgaaagccggcgaaacagtgcgcagcagacatacctccgtagtgtcatcgggcccaagcgtgctgcgaagtactttacacgaggcaccgaaggcacagttaagccctggaatttacgatgatacgagcgccagacggacacccgtctcctaccaaaatacaatgagtaggggcagtccaatgatgaaccggactagcgacgtcagctccaacaaaagtactaatcacgagagaaaaagcaccctgacccctacacagagggagtcaatcccggccaaatcccctgtgcctggagttgatcctgtggtaagtcatagcccctttgacccacatcatcggggtagtactgcaggcgaggtataccgttctcacctcccgactcatctcgaccctgctatgccgttccaccgagcacttgatccggccgccgcctatctatttcagcgccagctttcccctaccccaggttaccctagccagtaccaactgtacgcaatggaaaacacacggcagacaatcttgaacgactacattacttcacagcagatgcaagtaaaccttcgacctgacgtggctcgaggattgtcccctagagagcagccactggggctgccgtaccctgccacccgcggcatcatcgacctcaccaatatgcctcccactatcctggttccccaccctgggggcacatctacccctcccatggacagaattacatatatccccggtacacagatcactttccctcctagaccatataattccgcaagcatgtctcctgggcatccaacacacctcgccgcagcagcctctgcagagcgggagcgggagagagagagggagaaggagagggaaagggagaggatcgcggccgcttcttccgatctatacctgagacctggctcagaacagcccggacgacccggcagccacggctatgtgaggagcccgtctccttccgtgagaacccaagaaaccatgctgcagcagaggccaagcgtctttcaggggacgaatggcacaagcgtgatcaccccattggaccctacggcccagttgaggataatgcctctgcctgctggaggcccttctataagtcaggggctgcctgcttccaggtacaacaccgcggctgacgctctggcagctcttgtggacgcggccgccagcgccccacagatggacgtgtcaaagactaaggagagcaagcacgaggcagcccgcctggaagagaacttgcggtctagaagcgctgctgtgtccgagcagcaacagcttgagcagaaaactctggaggttgagaagcggtctgtgcagtgtctgtatacatcgagcgcttttccatccggcaaaccacagccacactcatcagtagtgtactccgaagcagggaaggataaaggaccccctcctaaatcaagatacgaggaagaattacggactcgtggcaagactacaatcactgcggccaattttattgatgtcatcatcactagacagattgcctccgataaggacgctcgggaaaggggcagccaatcctccgatagcagttcctctctgtccagccatagatacgagacaccgtctgatgctatagaagtgatcagtccagcttcaagccccgcaccacctcaggaaaagctgcaaacctatcagcccgaagttgtcaaggcgaatcaggcggagaacgatccaaccagacagtacgagggcccgttgcaccactacagaccccaacaggagtccccaagccctcagcagcagttgccaccttcctcacaggctgaaggcatgggtcaggtccctaggacccaccgactcataaccctcgctgatcatatttgtcagatcattacccaggattttgcgcggaaccaagtgtcgtcccagactccgcagcaacccccaaccagtacattccaaaacagcccctccgcgctggttagcactcctgtgcgcacaaaaaccagcaaccgctatagtccagagagccaggctcaatctgttcatcaccagcgtcctggatcccgcgtcagcccagaaaatctggtggataaatcccgggggagccggccaggtaagagccctgaaaggtcacacgttagctctgagccctatgagcccatctcacctccacaagttccagtggtgcacgaaaaacaggatagcctgcttctgctctctcagaggggcgccgaaccagcagagcagcggaacgatgcgcgtagtcccgggagcatcagctatttgccttcttttttcactaagttggagaataccagcccaatggtcaaaagtaaaaaacaagaaatcttccggaagctgaattcatccggtggaggagacagcgacatggccgctgctcaacccggcaccgagatcttcaacctgcctgcggttacaactagtggcagtgtctcttcccggggacatagttttgccgaccccgcctctaaccttggcctcgaggacataattaggaaggccctaatgggctcttttgatgacaaagtggaggaccacggcgtggtcatgtcccaacctatgggcgtcgtcccaggaactgctaatacctctgtagttacttcaggcgagaccagacgggaggagggggacccctcccctcatagtggggtttgcaaacccaagctcatttcaaaatccaactctagaaaatctaagagccctatccctggccagggttatctcgggacagaacgtccatcttccgtttcatcagtacatagcgagggagattatcaccgccagactcccggctgggcatgggaagataggccctctagcacaggcagcacacagtttccctataatcccctcactatgcggatgctgtccagcacaccgcctacacccatcgcttgcgccccatctgctgtaaaccaagctgccccccaccagcagaacaggatatgggagcgcgagccagcccctttgctgagtgctcaatatgaaactctaagtgacagcgatgactag

SEQ ID NO: 294233 - DNA, 3075 bp, Artificial Sequence
  derived and/or modified sequence
atgcctccgcttgaaattgtgcctgagaatatcaaagtggtcgaacgcggtaaatatgaggacgtgaaggccggcgaaacggtgcgcagcaggcacacttcagtggtgtctagcggtcccagtgtgctgaggtccacactgcacgaggcacctaaggcacagctgagccccgggatttatgacgatacctcagcacgtcgaactcctgtgtcatatcagaacactatgagcagaggaagcccgatgatgaaccgaacttctgacgtcacgatttcttctaacaagagcacaaatcatgagcgaaaaagcactctgaccccaacgcagagagagagtatccctgcgaagagtcccgtgcctggcgtggatcccgtggtgagccacagtccattcgatcctcaccatagagggtcaaccgccggcgaggtttaccgatcacatcttccgactcatctcgatccagccatgccttttcaccgcgccctggaccccgctgctgcagcctacttgttccagagacagttgagccccaccccaggctacccatcacagtaccagttgtatgctatggaaaatactcgccaaactatcctgaacgattacataacttcccagcagatgcaggtcaacttaaggccagacgtcgccaggggcctgtctccaagagaacaacccctggggttaccataccccgctactcgaggcataattgacctgaccaacatgccgcctaccattctcgtgccgcacccaggcggtacttcaactcctcctatggaccgtatcacgtacataccaggcacccaaataacattcccgccacgtccatacaattccgcaagcatgagtccaggacatcccacccaccttgcagccgccgcatcggccgaacgggaacgcgagagggagagggaaaaggaaagagaacgggagcggatcgccgctgcaagcagtgacctgtacctgagacccgggagtgagcaacccggaagacccggatctcatggctacgtacgctcgcccagtcctagtgtccgcacccaggagacaatgctgcagcaacgaccttccgtgttccaaggcaccaatggtacctccgtgattacacctctggaccccaccgcacagttgcgcatcatgccactgccggccggtggaccatccatatctcagggccttcctgcctctcgctacaatactgctgcagatgccttagccgcgctggtagatgctgccgcctctgctcctcagatggatgtttctaagacaaaagaaagtaagcacgaggctgcccgcttagaggagaatctgcgcagtcggtcagctgcagtttccgagcagcaacagcttgagcagaagactctagaagtggagaagcgaagcgtgcaatgcttatatacctcgagtgctttcccctctgggaagccccagccccactctagcgtggtgtactcagaggccggcaaggataagggcccacctcccaagagtcggtatgaagaagagctccggacccgaggaaagaccaccattacagcagccaacttcatcgatgtaatcattacaaggcagattgcttcggacaaggacgcgcgcgagagaggtagtcagagctctgacagtagcagctcactgagcagtcaccgttacgagacgccgagtgatgcgattgaagtaatctccccagcttcctcaccagccccacctcaggaaaagcttcaaacataccagcccgaagtcgtcaaggctaaccaagccgagaacgatccgaccagacagtatgagggacccctgcatcactatagaccccagcaggagtctccgtccccccaacagcagctgcctccatccagtcaggcagaaggcatggggcaggtgccacgcactcacaggttgataaccctcgctgatcatatctgccagattattacccaggatttcgcccgaaatcaggtgagttcccagacaccacagcaaccacctacctctaccttccagaactcaccctccgcactcgtctccacccccgtaagaaccaagacgagtaaccgatactcccccgagtcgcaagcacaaagtgtgcatcaccagaggcccgggtcaagggtttcccctgaaaacctggttgacaagagcaggggcagtcggcccgggaaatcccctgagcggagccatgtgtcttccgaaccctacgagcctatcagccctccgcaggttcctgttgtccatgaaaaacaggattcgttgctgcttttgagccagaggggagccgaacctgccgaacaaagaaacgatgctcggtcacctggctcaataagttatctcccctccttctttacaaagctggaaaacactagcccaatggtgaagtccaaaaagcaggagatctttcggaagcttaatagttctggtggcggggattctgatatggccgctgcgcagccaggtactgaaatcttcaacttaccggctgttacaacctctgggtctgtatcctcacgcgggcactcattcgccgatcccgctagtaatctgggacttgaggatataatccgaaaggccctgatggggtcttttgacgacaaagttgaagatcacggcgtggttatgtcccagcctatgggcgttgtaccaggaactgctaacacatccgtggtcacatcaggcgagactcgacgggaggaaggcgacccttctccacactccggcggcgtctgcaagccaaaattaataagcaaatctaattccaggaaaagtaagtctcccattccagggcagggctacctgggaactgagaggccctcgagcgttagctccgtacactccgaaggggactatcaccgacagacccctggatgggcatgggaggataggccgagctctaccggctccacacagtttccttacaaccccctgacaatgagaatgctttcatccacccctccaactccgatcgcatgtgctccgtctgccgttaatcaggcagccccacaccagcaaaaccgcatctgggagcgtgagcctgcccccctcctgtcggcgcaatacgagacgctgtcagattccgacgattag

SEQ ID NO: 294234 - DNA, 7032 bp, Artificial Sequence
  derived and/or modified sequence
atgagcagcagcggctacccacccaaccagggcgccttcagcacagagcagagccgctacccaccccacagcgtgcagtacaccttccccaacaccaggcaccagcaggaccctgccttcggcggcaagcatgaggcccccagcagccccatcagcggccagccctgtggagatgaccagaatgccagccccagcaagctgagcaaggaggagctgatccagagcatggacagagtggaccgggagatcgccaaggtggagcagcagatcctgaagctgaagaagaagcagcagcagctggaggaggaggccgccaagcccccagagcctgagaagcctgtgagccccccacctgtggagcagaagcacaggagcatcgtgcagatcatctatgatgaaaataggaagaaggccgaggaggcccacaagatctttgagggcctgggccccaaggtggagctgcccctgtacaaccagcccagcgacaccaaggtgtaccacgagaacatcaagaccaaccaggtgatgaggaagaagctgatcctcttcttcaagagaagaaatcatgccaggaagcagcgggagcagaagatctgccagagatatgaccagctgatggaggcctgggagaagaaggtggacagaattgagaacaaccccaggaggaaggccaaggagagcaagacccgggagtactatgagaagcagtttcctgagatcaggaagcagcgggagcagcaggagcgcttccagagggtgggccagagaggagctggcctgagcgccaccatcgcccggagtgaacatgagatcagcgagatcattgatggcctgtctgagcaggagaacaatgagaagcagatgaggcagctgagcgtcatcccccccatgatgtttgatgctgagcagaggagagtgaagttcatcaacatgaatggcctgatggaggaccccatgaaggtgtacaaggaccggcagttcatgaatgtgtggacagaccacgagaaggagatcttcaaggacaagttcatccagcaccccaagaactttggcctgattgccagctacctggagaggaagtctgtgcctgactgtgtgctgtactactacctgaccaagaagaatgaaaactacaaggccctggtgagaagaaactacggcaagagaagaggaagaaaccagcagatcgcccggcccagccaggaggagaaggtggaggagaaggaggaggacaaggccgagaagacagagaagaaggaggaggagaagaaggatgaggaggagaaggatgagaaggaggacagcaaagaaaacaccaaggagaaggacaagattgatggaacagctgaggagacagaggagcgggagcaggccaccccccggggcaggaagacagccaacagccagggccgcaggaagggccgcatcaccaggtccatgaccaatgaggccgccgccgccagcgctgctgctgctgctgccacagaggagcccccaccacccctgcccccacctcctgagcccatcagcacagagcctgtggagaccagccgctggacagaggaggagatggaggtggccaagaagggcctggtggagcacggcaggaactgggccgccatcgccaagatggtgggcaccaagtctgaggcccagtgcaagaacttctacttcaactacaagaggaggcacaacctggacaacctgctgcagcagcacaagcagaagaccagcaggaagccccgggaggagagagatgtgtcccagtgtgagagcgtggccagcacagtgtctgcccaggaggatgaagatattgaggccagcaatgaggaggagaacccagaagattctgagggcgctgagaacagcagtgacacagagagcgcccccagccccagccctgtggaggccgtgaagcccagcgaggacagcccagaaaatgccaccagccggggcaacacagagcctgctgtggagctggagcccaccacagaaacagcccccagcaccagccccagcctggccgtgcccagcaccaagccagcagaagatgagagcgtggagacccaggtgaatgacagcatctctgctgagacagctgagcagatggatgtggaccagcaggagcacagcgctgaggagggctctgtgtgtgaccccccaccagccaccaaggctgacagcgtggatgtggaggtgcgggtgcctgaaaatcatgccagcaaggtggagggggacaacaccaaggagcgggacctggaccgggccagcgagaaggtggagcccagagatgaggacctggtggtggcccagcagatcaatgcccagaggcctgagccccagagcgacaatgacagcagcgccacctgcagcgcagatgaagatgtggatggagagcctgagcggcagaggatgttccccatggacagcaagcccagcctgctgaaccccaccggcagcatcctggtgagcagccccctgaagcccaaccccctggacctgccccagctgcagcacagagctgctgtgattcctcccatggtgtcctgcaccccctgcaacatccccatcggcacccctgtgtctggctacgccctgtaccagaggcacatcaaggccatgcatgaaagtgccctgctggaggagcagaggcagaggcaggagcagattgacctggagtgccgcagcagcaccagcccctgtggcaccagcaagagccccaaccgggagtgggaggtgctgcagcctgccccccaccaggtgatcaccaacctgcctgagggcgtgcggctgcccaccacccggcccaccaggcctcctcctcctctcatccccagcagcaagaccaccgtggccagcgagaagcccagcttcatcatgggcggcagcatcagccagggcaccccaggcacctacctgaccagccacaaccaggccagctacacccaggagacccccaagcccagcgtgggcagcatcagcctgggcctgccccggcagcaggagagcgccaagagcgccaccctgccctacatcaagcaggaggagttcagccccaggagccagaacagccagcctgagggcctgctggtgcgggcccagcatgaaggagtggtgcggggcacagctggggccatccaggagggcagcatcacccggggcacccccaccagcaagatctctgtggagagcatccccagcctgcggggcagcatcacccagggcaccccagccctgccccagacaggcatccccacagaggccctggtgaagggcagcatcagcaggatgcccatcgaggacagcagccctgagaagggccgggaggaggccgccagcaagggccacgtgatctatgagggcaagagcggccacatcctgtcctatgacaacatcaagaatgcccgggagggcaccaggagccccaggacagcccacgagatcagcctgaagaggagctatgagagcgtggagggcaacatcaagcagggcatgtccatgagggagagccctgtgtctgcccccctggagggcctcatctgccgggccctgccccggggcagcccccacagcgacctgaaggagaggacagtgctgagcggcagcatcatgcagggcaccccccgggccaccacagagagctttgaagatggcctgaagtaccccaagcagatcaagcgggagagcccccccatccgggcctttgaaggagccatcaccaagggcaagccctatgatggcatcaccaccatcaaggagatgggccgcagcatccacgagatcccccggcaggacatcctgacccaggagagcaggaagaccccagaggtggtgcagagcacccggcccatcatcgagggcagcatcagccagggcacccccatcaagtttgacaacaacagcggccagagcgccatcaagcacaacgtgaagagcctcatcaccggccccagcaagctgagccggggcatgccacccctggagatcgtgcctgagaacatcaaggtggtggagcggggcaagtatgaagatgtgaaggccggggagaccgtgcgcagccgccacacctctgtggtgagcagcggccccagcgtgctgcggagcaccctgcacgaggcccccaaggcccagctgagccctggcatctatgatgacaccagcgcccggaggacccctgtgtcctaccagaacaccatgagccggggcagccccatgatgaacagaacatctgatgtgagcagcaacaagagcaccaaccacgagaggaagagcaccctgacccccacccagcgggagagcatcccagccaagagccctgtgcctggggtggaccctgtggtgagccacagcccctttgacccccaccaccggggcagcacagctggggaggtgtaccgcagccacctgcccacccacctggaccctgccatgcccttccaccgggccctggaccctgctgctgcctacctgttccagaggcagctgagccccaccccaggctaccccagccagtaccagctgtatgccatggagaacacccggcagaccatcctgaatgactacatcaccagccagcagatgcaggtgaacctgcggccagatgtggcccggggcctgagcccccgggagcagcccctgggcctgccctacccagccacccggggcatcatcgacctgaccaacatgccacccaccatcctggtgccccaccctgggggcaccagcaccccacccatggaccgcatcacctacatccctggcacccagatcaccttccccccccggccctacaacagcgcctccatgagccctggccaccccacccacctggccgctgctgccagcgctgagcgggagcgggagcgggagcgggagaaggagcgggagcgggagagaattgctgctgccagcagtgacctgtacctgcggcccggcagcgagcagcccggccggcccggcagccacggctacgtgcgcagccccagccccagcgtgaggacccaggagaccatgctgcagcagaggccttctgtgttccagggcaccaacggcaccagcgtcatcacccccctggaccccacagcccagctgcgcatcatgcccctgcctgctgggggccccagcatcagccagggcctgcctgccagccgctacaacacagctgctgatgccctggccgccctggtggatgctgctgccagcgccccccagatggatgtgtccaagaccaaggagagcaagcatgaggccgcccggctggaggagaacctgcggagccgctctgctgctgtgtctgagcagcagcagctggagcagaagaccctggaggtggagaagaggtctgtgcagtgcctgtacaccagcagcgccttccccagcggcaagccccagccccacagctctgtggtgtacagcgaggccggcaaggacaagggccccccacccaagagccgctatgaggaggagctgcggacccggggcaagaccaccatcacagctgccaacttcattgatgtgatcatcacccggcagatcgccagtgacaaggatgcccgggagcggggcagccagagcagtgacagcagcagcagcctgagcagccacagatatgagacccccagtgatgccattgaagtcatcagccctgccagcagccctgccccaccccaggagaagctgcagacctaccagcctgaggtggtgaaggccaaccaggctgaaaatgaccccacccggcagtatgagggccccctgcaccactaccggccccagcaggagagccccagcccccagcagcagctgccccccagcagccaggccgagggcatgggccaggtgcccaggacccacaggctcatcaccctggccgaccacatctgccagatcatcacccaggactttgccaggaaccaggtgagcagccagaccccccagcagccccccaccagcaccttccagaacagccccagcgccctggtgtccacccctgtgaggaccaagaccagcaaccgctacagccctgagagccaggcccagagcgtgcaccaccagaggcctggcagccgggtgtccccagagaacctggtggacaagagccggggcagcaggcctgggaagagccctgagaggagccacgtgagcagcgagccctatgagcccatcagccccccccaggtgcctgtggtgcatgagaagcaggacagcctgctgctgctgagccagagaggagctgagcctgctgagcagagaaatgatgcccggagccctggcagcatctcctacctgcccagcttcttcaccaagctggagaacaccagccccatggtgaagagcaagaagcaggagatcttcaggaagctgaacagcagcggcggcggggacagcgacatggccgccgcccagcctggaacagagatcttcaacctgcctgctgtgaccaccagcggctctgtgagcagccggggccacagctttgctgaccctgccagcaacctgggcctggaggacatcatcaggaaggccctgatgggcagctttgatgacaaggtggaggaccacggcgtggtgatgagccagcccatgggcgtggtgcccggcacagccaacacctctgtggtgaccagcggggagacccggcgggaggagggggaccccagcccccacagcggcgtgtgcaagcccaagctgatcagcaagagcaacagcaggaagagcaagagccccatccctggccagggctacctgggcacagagcggcccagctctgtgtcctctgtgcacagcgagggggactaccaccggcagaccccaggctgggcctgggaggaccggcccagcagcacaggcagcacccagttcccctacaaccccctgaccatgaggatgctgagcagcaccccacccacccccatcgcctgtgcccccagcgctgtgaaccaggccgccccccaccagcagaaccgcatctgggagcgggagcccgcccccctgctgagcgcccagtatgagaccctgagtgacagtgatgactag

SEQ ID NO: 294235 - DNA, 3075 bp, Artificial Sequence
  derived and/or modified sequence
atgccacccctggagatcgtgcctgagaacatcaaggtggtggagcggggcaagtatgaagatgtgaaggccggggagaccgtgcgcagccgccacacctctgtggtgagcagcggccccagcgtgctgcggagcaccctgcacgaggcccccaaggcccagctgagccctggcatctatgatgacaccagcgcccggaggacccctgtgtcctaccagaacaccatgagccggggcagccccatgatgaacagaacatctgatgtgaccatcagcagcaacaagagcaccaaccacgagaggaagagcaccctgacccccacccagcgggagagcatcccagccaagagccctgtgcctggggtggaccctgtggtgagccacagcccctttgacccccaccaccggggcagcacagctggggaggtgtaccgcagccacctgcccacccacctggaccctgccatgcccttccaccgggccctggaccctgctgctgctgcctacctgttccagaggcagctgagccccaccccaggctaccccagccagtaccagctgtatgccatggagaacacccggcagaccatcctgaatgactacatcaccagccagcagatgcaggtgaacctgcggccagatgtggcccggggcctgagcccccgggagcagcccctgggcctgccctacccagccacccggggcatcatcgacctgaccaacatgccacccaccatcctggtgccccaccctgggggcaccagcaccccacccatggaccgcatcacctacatccctggcacccagatcaccttccccccccggccctacaacagcgcctccatgagccctggccaccccacccacctggccgctgctgccagcgctgagcgggagcgggagcgggagcgggagaaggagcgggagcgggagagaattgctgctgccagcagtgacctgtacctgcggcccggcagcgagcagcccggccggcccggcagccacggctacgtgcgcagccccagccccagcgtgaggacccaggagaccatgctgcagcagaggccttctgtgttccagggcaccaacggcaccagcgtcatcacccccctggaccccacagcccagctgcgcatcatgcccctgcctgctgggggccccagcatcagccagggcctgcctgccagccgctacaacacagctgctgatgccctggccgccctggtggatgctgctgccagcgccccccagatggatgtgtccaagaccaaggagagcaagcatgaggccgcccggctggaggagaacctgcggagccgctctgctgctgtgtctgagcagcagcagctggagcagaagaccctggaggtggagaagaggtctgtgcagtgcctgtacaccagcagcgccttccccagcggcaagccccagccccacagctctgtggtgtacagcgaggccggcaaggacaagggccccccacccaagagccgctatgaggaggagctgcggacccggggcaagaccaccatcacagctgccaacttcattgatgtgatcatcacccggcagatcgccagtgacaaggatgcccgggagcggggcagccagagcagtgacagcagcagcagcctgagcagccacagatatgagacccccagtgatgccattgaagtcatcagccctgccagcagccctgccccaccccaggagaagctgcagacctaccagcctgaggtggtgaaggccaaccaggctgaaaatgaccccacccggcagtatgagggccccctgcaccactaccggccccagcaggagagccccagcccccagcagcagctgccccccagcagccaggccgagggcatgggccaggtgcccaggacccacaggctcatcaccctggccgaccacatctgccagatcatcacccaggactttgccaggaaccaggtgagcagccagaccccccagcagccccccaccagcaccttccagaacagccccagcgccctggtgtccacccctgtgaggaccaagaccagcaaccgctacagccctgagagccaggcccagagcgtgcaccaccagaggcctggcagccgggtgtccccagagaacctggtggacaagagccggggcagcaggcctgggaagagccctgagaggagccacgtgagcagcgagccctatgagcccatcagccccccccaggtgcctgtggtgcatgagaagcaggacagcctgctgctgctgagccagagaggagctgagcctgctgagcagagaaatgatgcccggagccctggcagcatctcctacctgcccagcttcttcaccaagctggagaacaccagccccatggtgaagagcaagaagcaggagatcttcaggaagctgaacagcagcggcggcggggacagcgacatggccgccgcccagcctggaacagagatcttcaacctgcctgctgtgaccaccagcggctctgtgagcagccggggccacagctttgctgaccctgccagcaacctgggcctggaggacatcatcaggaaggccctgatgggcagctttgatgacaaggtggaggaccacggcgtggtgatgagccagcccatgggcgtggtgcccggcacagccaacacctctgtggtgaccagcggggagacccggcgggaggagggggaccccagcccccacagcggcggcgtgtgcaagcccaagctgatcagcaagagcaacagcaggaagagcaagagccccatccctggccagggctacctgggcacagagcggcccagctctgtgtcctctgtgcacagcgagggggactaccaccggcagaccccaggctgggcctgggaggaccggcccagcagcacaggcagcacccagttcccctacaaccccctgaccatgaggatgctgagcagcaccccacccacccccatcgcctgtgcccccagcgctgtgaaccaggccgccccccaccagcagaaccgcatctgggagcgggagcccgcccccctgctgagcgcccagtatgagaccctgagtgacagtgatgactag

SEQ ID NO: 294236 - DNA, 7994 bp, Artificial Sequence
  derived and/or modified sequence
gtggtttcctagaaacatgattgtttattggcattgatctcacagtctggtgaggacttctttactgataatgtcaagttcaggttatcctcccaaccaaggagcattcagcacagaacaaagtcgttatcctcctcactctgtccagtatacatttcccaacacccgccaccagcaggatccagcattcggaggcaaacatgaagctccatcctctccaatttcggggcaaccatgtggagatgatcaaaatgcttcaccttcaaaactctcaaaggaagagttaatacagagtatggatcgtgtagatcgagaaattgcaaaagtagaacagcagatccttaaactgaaaaagaaacaacaacagcttgaagaagaggcagctaaacctcctgagcctgagaagcccgtgtcccctcctcctgtggagcagaaacaccgcagtattgtccaaattatttatgatgagaatcggaaaaaagcagaagaagctcataaaatttttgaaggtcttggcccaaaagttgaactgccactgtataaccagccatcagataccaaggtgtaccatgagaacatcaagacaaaccaggtgatgaggaaaaaactcattttattttttaaaagaagaaatcatgcaagaaaacaaagggaacaaaaaatctgccagcgttatgatcagctcatggaggcatgggagaaaaaagtggacagaatagaaaataatcctcggaggaaagctaaagaaagcaaaacaagggaatactatgaaaagcagtttccagaaattcgaaaacaaagagaacagcaagaaagatttcagcgagttgggcagaggggagctggtctttcagccaccattgctaggagtgagcatgagatttctgaaattattgatgggctctctgagcaggagaataatgagaaacaaatgcggcagctctctgtgattccacctatgatgtttgatgcagaacaaagacgagtcaagttcattaacatgaatgggcttatggaggaccctatgaaagtgtataaagataggcagtttatgaatgtttggactgaccatgaaaaggagatctttaaggacaagtttatccagcatccaaaaaactttggactaattgcatcatacttggagaggaagagtgttcctgattgtgttttgtattactatttaaccaagaaaaatgagaattataaagccctcgtcagaaggaattatgggaaacgcagaggcagaaaccagcaaattgctcgaccctcgcaagaagaaaaagtagaagaaaaagaagaggataaagcagaaaaaacagaaaaaaaagaagaagaaaagaaagatgaagaggaaaaagatgaaaaagaagactccaaagaaaataccaaggaaaaggacaagatagatggtacagcagaagaaactgaggaaagagagcaagccacaccccgggggcgaaagactgccaacagtcagggccgccgtaagggccggatcaccaggtccatgacaaacgaagctgcagctgccagtgctgcagccgcagcggctactgaagagcccccaccacctctgccaccgccaccagaacccatttctacagagcctgtggagacctctcgatggacagaagaagaaatggaagttgctaaaaaaggtctagtagaacatggtcgtaactgggcagcaattgctaaaatggtgggaacgaaaagtgaagctcaatgtaaaaacttctattttaactataaaaggcgacacaatcttgacaacctcttacagcagcataaacagaaaacttcacgaaaacctcgtgaagagcgagatgtgtctcaatgtgaaagtgtcgcttccactgtttctgctcaggaggatgaagatattgaagcctccaatgaagaagaaaatccagaagacagcgaaggtgcagaaaatagttctgatacagaaagtgctccttctccttcaccagttgaagctgtcaagcccagcgaggacagtcctgaaaatgctacttctcgaggaaacacagaacctgcggttgagcttgagcccaccacggaaactgcacccagtacatctccctccttagcagttccaagtacaaaaccagctgaagatgaaagtgtggagacccaggtgaatgacagcatcagtgctgagacagcagagcagatggatgtagatcagcaggagcacagtgctgaagagggttctgtttgtgatcccccacccgctaccaaagctgactctgtggacgttgaagtgagggtgccagaaaaccatgcatctaaagttgaaggtgataataccaaagaaagagacttggatagagccagtgagaaggtggaacctagagatgaagatttggtggtagctcagcaaataaatgcccaaaggcccgagccccagtcagacaatgattccagtgccacgtgcagcgctgatgaggatgtggatggagagccagagaggcagagaatgtttcctatggactcaaagccttcactgttaaaccccactggatctatactcgtctcatctccgttaaaaccaaatccactggatctgccacagcttcagcatcgagctgctgttatcccaccaatggtatcctgcaccccatgtaacataccaattggaaccccagtgagcggctatgctctctaccagcgacacattaaagcaatgcatgagtcagcactcctggaggagcagcggcagagacaagaacagatagatttggaatgtagaagttctacaagtccatgtggcacatccaagagtccaaacagagagtgggaagtccttcagcctgctccacatcaagtgataactaatctccctgaaggcgttcggcttccgacaactcgaccaaccaggccaccgccccctctcatcccgtcatccaaaaccacagtggcttcagaaaaaccatcttttataatgggaggctccatctcacagggaacaccaggcacttatttgacttctcataatcaggcttcctacactcaagaaacacccaagccgtcagtgggatctatctctcttggactgccacggcaacaggaatctgccaaatcagctactttgccctacatcaagcaggaagaattttctccccgaagccaaaactcacaacctgagggtctgttggtcagggcccaacatgaaggtgtagtcagaggtaccgcaggagccatacaagaaggaagtataactcggggaactccaaccagcaaaatttcagtggagagcattccatccctacggggctctatcactcagggcaccccggctctgccccagactggcataccaacagaggctttggtgaaggggtccatttcgagaatgcccattgaagacagcagtcctgagaaaggcagagaggaagctgcatccaaaggccatgttatttatgaaggcaaaagtggacatatcttgtcatatgataatattaagaatgcccgagaagggactaggagtccaagaacagctcatgaaatcagtttaaagagaagctatgaatcagtggaaggaaatataaagcaagggatgtcaatgagggagtctcctgtatcagcaccgttagaggggctgatatgccgagcattacccagggggagtcctcattctgacctcaaagaaaggactgtattgtctggctccataatgcaggggacaccaagagcaacaactgaaagctttgaagatggccttaaatatcccaaacaaattaaaagggaaagtcctcccatacgagcatttgaaggtgccattaccaaaggaaaaccatatgatggcatcaccaccatcaaagaaatggggcgttccattcatgagattccaaggcaagatattttaactcaggaaagtcggaaaactccagaagtggtccagagcacacggccgataattgagggttccatttcccagggcacaccaataaagtttgacaacaactcaggtcaatctgccatcaaacacaatgtcaaatccttaatcacggggcctagcaaactatcccgtggaatgcctccgctggaaattgtgccagagaacataaaagtggtagaacggggaaaatatgaggatgtgaaagcaggcgagaccgtgcgttcccggcacacgtcagtggtaagctctggcccctccgttcttaggtccacactgcatgaagctcccaaagcacaactgagccctgggatttatgatgacaccagtgcacggaggacccctgtgagttatcaaaacaccatgtccagaggctcacccatgatgaacagaacttctgatgtttcttctaacaagtctaccaatcatgaaaggaaatcgacactgacccctacccagagggaaagtatcccagcgaagtctccagtgcctggggtggaccctgtcgtgagccacagtccgtttgatccccatcacagaggcagcactgcaggcgaggtttatcggagccacctgcccacgcacttggatccagccatgccttttcacagggctttggatcctgcggctgcttacctgtttcagagacagctttcaccaactccaggttacccaagtcagtatcagctttacgcaatggagaacacaagacagacaatcttaaatgattacattacctcacaacagatgcaagtgaacttgcgtccagatgtggccagaggactctccccaagagagcagccactgggtctcccatacccagcaacgagaggaatcattgacctgaccaatatgcctccaacaattttagtgcctcatccagggggaacaagcactcctcccatggacagaatcacttatattcctggtacacagattactttccctcccaggccgtacaactctgcttccatgtctccaggacacccaacacaccttgcagctgctgcaagtgctgagagggaacgggaacgggagcgggagaaggagcgggagcgggaacggattgctgcagcttcctccgacctctacctgcggccaggctcagaacagcctggccgacctggcagtcatggatatgttcgctccccttccccttcagtaagaactcaggagaccatgttgcaacagagacccagtgttttccaaggaaccaatggaaccagtgtaatcacacctttggatccaactgctcagctacgaatcatgccactgcctgctgggggcccttcaataagccaaggcctgccagcctcccgttacaacactgctgcggatgccctggctgctcttgtggatgctgcagcttctgcaccccagatggatgtgtccaaaacaaaagagagtaagcatgaagctgccaggttagaagaaaatttgagaagcaggtcagcagcagttagtgaacagcagcagctagagcagaaaaccctggaggtggagaagagatctgttcagtgtttatacacttcttcagcctttccaagtggcaagccccagcctcattcttcagtagtttattctgaggctgggaaagataaagggcctcctccaaaatccagatatgaggaagagctaaggaccagagggaagactaccattactgcagctaacttcatagacgtgatcatcacccggcaaattgcctcggacaaggatgcgagggaacgtggctctcaaagttcagactcttctagtagcttatcttctcacaggtatgaaacacctagcgatgctattgaggtgataagtcctgccagctcacctgcgccaccccaggagaaactgcagacctatcagccagaggttgttaaggcaaatcaagcggaaaatgatcctaccagacaatatgaaggaccattacatcactatcgaccacagcaggaatcaccatctccccaacaacagctgcccccttcttcacaggcagagggaatggggcaagtgcccaggacccatcggctgatcacacttgctgatcacatctgtcaaattatcacacaagattttgctagaaatcaagtttcctcgcagactccccagcagcctcctacttctacattccagaactcaccttctgctttggtatctacacctgtgaggactaaaacatcaaaccgttacagcccagaatcccaggctcagtctgtccatcatcaaagaccaggttcaagggtctctccagaaaatcttgtggacaaatccaggggaagtaggcctggaaaatccccagagaggagtcacgtctcttcggagccctacgagcccatctccccaccccaggttccggttgtgcatgagaaacaggacagcttgctgctcttgtctcagaggggcgcagagcctgcagagcagaggaatgatgcccgctcaccagggagtataagctacttgccttcattcttcaccaagcttgaaaatacatcacccatggttaaatcaaagaagcaggagatttttcgtaagttgaactcctctggtggaggtgactctgatatggcagctgctcagccaggaactgagatctttaatctgccagcagttactacgtcaggctcagttagctctagaggccattcttttgctgatcctgccagtaatcttgggctggaagacattatcaggaaggctctcatgggaagctttgatgacaaagttgaggatcatggagttgtcatgtcccagcctatgggagtagtgcctggtactgccaacacctcagttgtgaccagtggtgagacacgaagagaggaaggggacccatcacctcattcaggagtttgcaaaccaaagctgatcagcaagtcaaacagcaggaaatctaagtctcctatacctgggcaaggctacttaggaacggaacggccctcttcagtctcctctgtacattcagaaggggattaccataggcagacgccagggtgggcctgggaagacaggccctcttcaacaggctcaactcagtttccttataaccctctgactatgcggatgctcagcagtactccaccaacaccgattgcatgtgctccctctgcggtgaaccaagcagctcctcaccaacagaacaggatctgggagcgagagcctgccccactgctctcagcacagtacgagaccctgtcggatagtgatgactgaactgcacaaagtgaggggaacagggtgcaggagagggatctctagtttttgtggtttaatttttagtagcaggtcaaaaacctgccctcctgtgacttattccctgagacttttcaggagagccagcccacagatgatgaagaaatgatggaagttcatttggagagtcaaatgggaaaaaaacaaacaaaaaactgcctttgatacaggcaattcagtggactataataatagtggagggttgagatgtagagtttttaaaaagtgaacagttgctgttcttacatctgtaaagaaaaccataatgtctttaaatcactcttctgtaaatagatgacctttttgcagtgtatatccccttgctgtagtatctggtgtacttatgttcaaatcagcgcatcaactttgggggtgatttttaaaaatctttttgtctatctatctttttaaccctagccttctaaacaacctcatacagcccagttacataatgttggctgtcacgggcattgtacttttatctgatattgtttcctctaaattcagctttccagtgatgtttaaaatcttgtgaaaatgtttagatttttaacacagaccctgtcataaaatctgtacattagggtcaaaaggtaaaagtaacaaattctgccatattgtaaatttccagtgcaggctttaatttttttttttcattagtagcactgaaaaaatattactgcatgggtatgttctagttcagtttataaagttttaaaggcttatttgaggcatacctcactgttacgcacactggtaatttaaccatgcccctaagtattccttttctcctgcatttgatgcagcccaacaaagcttttgttttgaaataaatttgactaccctgtccata

SEQ ID NO: 294237 - DNA, 3419 bp, Artificial Sequence
  derived and/or modified sequence
tttcagtggagagcattccatccctacggggctctatcactcagggcacaccaataaagtttgacaacaactcaggtcaatctgccatcaaacacaatgtcaaatccttaatcacggggcctagcaaactatcccgtggaatgcctccgctggaaattgtgccagagaacataaaagtggtagaacggggaaaatatgaggatgtgaaagcaggcgagaccgtgcgttcccggcacacgtcagtggtaagctctggcccctccgttcttaggtccacactgcatgaagctcccaaagcacaactgagccctgggatttatgatgacaccagtgcacggaggacccctgtgagttatcaaaacaccatgtccagaggctcacccatgatgaacagaacttctgatgttacaatttcttctaacaagtctaccaatcatgaaaggaaatcgacactgacccctacccagagggaaagtatcccagcgaagtctccagtgcctggggtggaccctgtcgtgagccacagtccgtttgatccccatcacagaggcagcactgcaggcgaggtttatcggagccacctgcccacgcacttggatccagccatgccttttcacagggctttggatcctgcagcggctgcttacctgtttcagagacagctttcaccaactccaggttacccaagtcagtatcagctttacgcaatggagaacacaagacagacaatcttaaatgattacattacctcacaacagatgcaagtgaacttgcgtccagatgtggccagaggactctccccaagagagcagccactgggtctcccatacccagcaacgagaggaatcattgacctgaccaatatgcctccaacaattttagtgcctcatccagggggaacaagcactcctcccatggacagaatcacttatattcctggtacacagattactttccctcccaggccgtacaactctgcttccatgtctccaggacacccaacacaccttgcagctgctgcaagtgctgagagggaacgggaacgggagcgggagaaggagcgggagcgggaacggattgctgcagcttcctccgacctctacctgcggccaggctcagaacagcctggccgacctggcagtcatggatatgttcgctccccttccccttcagtaagaactcaggagaccatgttgcaacagagacccagtgttttccaaggaaccaatggaaccagtgtaatcacacctttggatccaactgctcagctacgaatcatgccactgcctgctgggggcccttcaataagccaaggcctgccagcctcccgttacaacactgctgcggatgccctggctgctcttgtggatgctgcagcttctgcaccccagatggatgtgtccaaaacaaaagagagtaagcatgaagctgccaggttagaagaaaatttgagaagcaggtcagcagcagttagtgaacagcagcagctagagcagaaaaccctggaggtggagaagagatctgttcagtgtttatacacttcttcagcctttccaagtggcaagccccagcctcattcttcagtagtttattctgaggctgggaaagataaagggcctcctccaaaatccagatatgaggaagagctaaggaccagagggaagactaccattactgcagctaacttcatagacgtgatcatcacccggcaaattgcctcggacaaggatgcgagggaacgtggctctcaaagttcagactcttctagtagcttatcttctcacaggtatgaaacacctagcgatgctattgaggtgataagtcctgccagctcacctgcgccaccccaggagaaactgcagacctatcagccagaggttgttaaggcaaatcaagcggaaaatgatcctaccagacaatatgaaggaccattacatcactatcgaccacagcaggaatcaccatctccccaacaacagctgcccccttcttcacaggcagagggaatggggcaagtgcccaggacccatcggctgatcacacttgctgatcacatctgtcaaattatcacacaagattttgctagaaatcaagtttcctcgcagactccccagcagcctcctacttctacattccagaactcaccttctgctttggtatctacacctgtgaggactaaaacatcaaaccgttacagcccagaatcccaggctcagtctgtccatcatcaaagaccaggttcaagggtctctccagaaaatcttgtggacaaatccaggggaagtaggcctggaaaatccccagagaggagtcacgtctcttcggagccctacgagcccatctccccaccccaggttccggttgtgcatgagaaacaggacagcttgctgctcttgtctcagaggggcgcagagcctgcagagcagaggaatgatgcccgctcaccagggagtataagctacttgccttcattcttcaccaagcttgaaaatacatcacccatggttaaatcaaagaagcaggagatttttcgtaagttgaactcctctggtggaggtgactctgatatggcagctgctcagccaggaactgagatctttaatctgccagcagttactacgtcaggctcagttagctctagaggccattcttttgctgatcctgccagtaatcttgggctggaagacattatcaggaaggctctcatgggaagctttgatgacaaagttgaggatcatggagttgtcatgtcccagcctatgggagtagtgcctggtactgccaacacctcagttgtgaccagtggtgagacacgaagagaggaaggggacccatcacctcattcaggaggagtttgcaaaccaaagctgatcagcaagtcaaacagcaggaaatctaagtctcctatacctgggcaaggctacttaggaacggaacggccctcttcagtctcctctgtacattcagaaggggattaccataggcagacgccagggtgggcctgggaagacaggccctcttcaacaggctcaactcagtttccttataaccctctgactatgcggatgctcagcagtactccaccaacaccgattgcatgtgctccctctgcggtgaaccaagcagctcctcaccaacagaacaggatctgggagcgagagcctgccccactgctctcagcacagtacgagaccctgtcggatagtgatgactgaactgcacaaagtgaggggaacagggtgcaggagagggatctctagtttttgtggtttaatttttagtagcaggtcaaaaacctgccctcctgtgacttattccctgagacttttcaggagagccagcccacagatgatgaagaaatgatggaagttcatttggagagtcaaatgggaaaaaaacaaacaaaaaactgcctttga

SEQ ID NO: 294238 - DNA, 7032 bp, Artificial Sequence
  derived and/or modified sequence
atgagcagcagcggctacccccccaaccagggcgccttcagcaccgaacaatctcgttatccacctcactctgtccagtatacttttcctaacacacgtcatcagcaggaccccgctttcgggggaaagcatgaagccccctcctcgcctatatccggccagccatgtggtgatgatcagaacgcctccccgagcaaactcagcaaggaggagttaatacagagtatggaccgcgttgatcgggagatcgcaaaggttgagcagcagatcttgaaactgaagaagaaacagcagcagttggaggaggaggcagccaagccacccgagccggagaaacccgttagccccccccccgtcgaacagaagcatagatccatcgtgcagattatatacgatgagaacagaaagaaagctgaagaggcccacaagatttttgaagggctggggccaaaggtagagttgcctctgtataatcaaccatccgacaccaaagtctatcacgaaaacatcaagaccaaccaagtgatgcgaaagaaactgatcctatttttcaaaagaaggaaccacgctagaaagcagcgggagcagaagatttgccagaggtacgatcagctgatggaagcctgggagaaaaaggtggatagaatcgaaaataatcctaggaggaaagctaaggagtcaaaaacaagagagtattacgagaagcagtttcccgagatccgaaaacaacgagagcagcaggaaaggttccagcgcgtcggccagcggggggccggcctgagtgccacaatcgcgcgaagcgagcatgagatctctgagatcatcgatggactctctgagcaggagaacaacgaaaagcaaatgcgacaattgagcgtaatcccacccatgatgtttgacgcagaacagcggagggtgaaattcatcaacatgaacggactgatggaggatcctatgaaagtgtataaagaccggcagttcatgaatgtttggacggaccatgaaaaagagatattcaaagataagttcatccagcacccaaagaattttggactcatcgccagttaccttgaaagaaaatctgttcccgattgcgtgctgtactattaccttacaaaaaaaaacgagaattacaaagcattagtgcgaagaaattatggaaaacggaggggccgaaatcaacagatcgccagaccaagccaggaggagaaggtggaagaaaaggaggaagataaggccgagaaaaccgagaagaaagaagaggagaaaaaggatgaagaagagaaggatgagaaggaggattccaaggagaacacaaaggaaaaagacaagattgacggcacagctgaggaaacagaggaacgggaacaggcaactccgcgggggcggaaaacagcgaattcccagggccgcaggaaaggtaggatcactcggagcatgacgaatgaggccgctgccgcgagcgccgcagccgctgctgccaccgaagaacccccacctcccctcccaccaccaccggagcctataagtacagagcctgtcgaaacctcccgatggacagaggaggagatggaggtcgccaagaaagggctcgttgaacacggacggaactgggctgccatagccaagatggtggggactaaatcagaagcccaatgtaagaatttttacttcaattataaaagaagacataatctcgacaacttgttacaacagcacaaacaaaagacctcccgtaaacctcgcgaggagcgggacgtgagccagtgtgagtcagtcgcatccacggtttcggctcaggaagacgaagatatcgaagcatcgaatgaggaagaaaacccagaagattcggagggcgcggaaaacagttctgatacagaatccgctccttctccatccccggttgaagccgtgaagcctagcgaagatagccccgaaaacgccacctctcggggtaataccgagccagctgtagagttagaacctactacggagacagctccatccacctctcccagtttggctgttccgagtacgaaaccagccgaagatgagtccgttgaaacccaggtcaacgacagcatctccgctgaaacagctgaacaaatggatgtggaccagcaggaacacagcgccgaagaaggtagcgtgtgtgaccccccccctgccacaaaggccgactccgtagatgttgaggtgcgggtgccggaaaatcacgcaagtaaggtggagggtgacaacactaaggagcgggatctggatagggcctcagaaaaagtggagcctagagacgaggacctggtcgtggcacaacagattaacgctcagcgaccggagccccagtcagataatgacagttctgctacctgctctgcagacgaggacgtggatggagaaccggagcggcagagaatgttccctatggactccaaaccttcactcctgaacccgacggggtctatcctggtctctagtccgctgaagcccaacccgctggatcttcctcaactgcaacaccgtgcggcggtgatcccacccatggtctcctgcaccccctgtaacatacctattggcacgccagtgagcggatatgcattgtatcagcggcacattaaagcaatgcacgagagtgctctcctcgaggagcagagacaacggcaagagcagatagatttggaatgtagatcatccacctctccatgcgggacatctaagtcaccaaaccgagagtgggaggtcctccagcctgcccctcatcaggtgataaccaacctcccagaaggagtcagactcccaactaccaggcccacaaggccgccgcctcccctgatcccctccagcaagacgaccgtcgcgagcgaaaaacccagttttattatggggggaagcatttcccaggggaccccagggacatatcttacatctcacaaccaagcctcttatacgcaggaaacccctaagccgagtgtgggaagcatttcgcttggacttccccgacagcaggagtctgcaaagtccgcgaccctcccttatatcaagcaggaagaatttagccctagatctcaaaatagccagcccgagggactgcttgtgcgtgcccagcatgagggagtggtaagggggactgccggtgctattcaggagggctccattaccagggggactcctacctcaaaaatcagtgttgagtcgatccctagcctccgtgggtcaatcactcagggcactccagccctacctcagaccgggattccaactgaggctctcgttaagggatccattagcaggatgcctatcgaggatagttctcctgagaagggcagagaggaggcggctagcaagggccatgttatttacgagggtaagagcggacacatcctctcgtatgacaatattaagaatgctagagaaggtaccagatcccccagaaccgcacacgaaatttctctaaaacggagctatgaatctgtggagggcaatatcaaacagggcatgtctatgcgggagtccccggtgtctgccccacttgagggtttgatttgtagagctctgcctagaggcagcccgcactccgacctgaaggagagaactgttctatccggctccattatgcaggggactccccgggctactaccgagtctttcgaggacgggctgaaatatcctaaacaaatcaagagggagtcccccccaattcgagccttcgaaggtgctataactaagggaaagccttacgacggaatcaccactattaaggaaatggggagatctatccacgagatcccccgacaggacatccttacacaggagtcgcggaaaacacccgaagtcgtgcagtcgactcggcctatcatagaaggctccataagccaaggaacccctatcaagttcgataataattccgggcagtctgcaataaaacataatgtgaagtccctgatcacaggcccttcaaagctttctaggggaatgccgccactggaaatcgttccggagaacatcaaagtcgtggaacgaggcaagtacgaagacgttaaagctggagagactgttaggtctcggcacacttcagttgttagcagcggtcctagcgttttaaggagcaccctccatgaggcccctaaggcgcaactgtcccccggaatctacgatgacacttccgcaagacgcactcctgtgtcataccagaatactatgtccagggggtccccaatgatgaaccgcacctccgacgtctctagcaacaagtccacaaatcatgagcggaagagtacccttacccccactcagcgggagtctattcctgcaaaatcaccagtgcctggagttgaccccgttgtctctcacagtccattcgaccctcatcatcggggtagcaccgccggagaggtataccgcagccacttgcccacccatctcgaccccgccatgccctttcatagagcactggatcccgccgccgcctacctgttccagaggcaattgtcgccaacaccaggataccccagccaataccaactgtatgccatggagaatacccgacagactattctgaatgattatatcacctcccagcagatgcaggtcaaccttaggcccgatgtcgccagagggctgtcgccgcgtgaacagcccttggggttgccctatccagcaacgaggggcattatagatcttaccaacatgcccccaaccatcctggtgccacacccagggggtacatccacaccgccaatggatcgcatcacatatattcctggcactcagatcaccttccccccgcgcccctataattccgcatcgatgagccctggccaccccacacatcttgccgcagccgcctctgccgaacgtgagcgggagagagagagagagaaagagagagaacgagagagaatcgctgccgcatcaagcgatttgtaccttagacccggttctgagcagccaggccgcccaggcagccacggatatgtcaggagcccttcgccgagtgtgcgaactcaggaaactatgttacagcagcgtccttccgtgttccagggcaccaacggaactagtgtgataacccctttagatcctacagcgcagctgagaataatgccgctccccgccgggggcccctcgatcagccagggcctgcccgcgagtaggtacaacacagctgccgatgcactcgctgccttagtcgacgccgctgcctcagcccctcagatggacgtgtctaagaccaaagaatctaagcatgaggccgccagactggaagaaaatttgcggagccgatctgccgccgtctccgagcaacagcagttagagcaaaaaaccctcgaagtggaaaaaagaagcgtccaatgcctctatacctcttctgcctttccttccggaaagcctcaacctcacagctctgttgtctattccgaggccggcaaggataagggcccaccccccaagtctagatatgaggaggaacttcgcacaagagggaagaccacaatcaccgctgctaattttatcgatgtaattatcactcgccagatcgcatcagataaagacgcacgggagcgcggaagccagtcaagcgattcaagctctagcttgtcttcacaccgctacgaaactccatccgacgctatagaagtgattagccctgcgagcagcccagcccctcctcaggagaagctacagacttatcaaccagaggtggtcaaagcgaatcaagccgaaaatgatccaacaaggcagtacgagggaccgctccatcactaccggccccaacaggagagccccagtccccagcaacaactgcctcccagcagccaggctgaaggaatgggtcaggtgcctaggacccaccgcctgattactctcgcagatcatatttgtcaaattataacacaggacttcgcccgcaatcaggtaagtagtcagacgccacagcagccccctacgtcgacttttcagaacagccccagtgctctcgttagtactcctgtccgcacgaagacgtctaacagatattcccccgaatcacaggcccagtcagtgcatcatcagagacctgggagccgagttagtcctgagaacctggtcgacaaatctcgaggcagccgaccgggcaaatctcccgaacggtctcatgtgtcgagtgagccatacgagcctatctcgccccctcaggtccctgtagtgcacgaaaagcaagattcacttctactcctgagtcagcgaggagctgagcccgctgaacagcgcaatgacgcaaggagcccaggctccatttcatatctacctagcttctttacaaaacttgaaaatacttctccgatggtaaagtctaagaagcaggaaattttcagaaaactgaactccagcggcggcggagattcagatatggcagccgctcagccaggcactgaaatcttcaacctccctgcagttaccacatctgggagtgtctcttccagagggcactcattcgcggaccctgcttccaacctggggctcgaagatattatcagaaaggccctcatgggatctttcgatgataaggttgaggatcacggggtggtgatgagtcagccaatgggtgtcgtccctgggacggccaatacctccgtggtgacctctggcgaaactaggagggaagagggtgacccatcgccccactcgggggtgtgcaagccgaagctcatctccaaatccaattctcggaagagcaaatcaccaataccgggccagggctatctgggcaccgagaggcccagttctgtcagctcagtgcacagtgagggagactaccaccgccagacacctgggtgggcctgggaagataggccgtcttccacgggttcaacacagtttccctataatccgttgaccatgagaatgctttcttcaactcctcccactcccattgcttgcgccccaagcgcggtgaaccaggcagctccacaccagcaaaacagaatctgggaacgagaacccgcccccctgctcagtgcccagtacgagaccctcagcgattccgatgactag

SEQ ID NO: 294239 - DNA, 3075 bp, Artificial Sequence
  derived and/or modified sequence
atgccccccctggagatcgtgcccgagaacatcaaggtggtggagcgagggaagtatgaggacgtgaaagccggggaaactgttcgttcgcgccacacctcggtggtgtcaagcgggccaagcgttcttcggtctaccttgcacgaggcccccaaagctcagctgagccctggcatttatgacgacacatccgctcggagaactcctgtgtcctatcagaacacaatgtcgcgcggaagccccatgatgaatagaacctctgatgtgactatttccagcaataagagtacgaaccacgagcgcaaatccactcttacccccacccagcgggagtcaatacccgccaagagtcctgtgccaggagtggatcccgtggtgagccactcaccttttgacccccatcatcgcggatctacagccggagaagtgtaccgctcccacttacccactcacttggatccggctatgccgtttcaccgtgctcttgaccccgcagctgcagcttacctcttccagcgtcagctgtcccccacaccaggctacccttcacagtaccagttgtatgctatggaaaacaccagacagactatcctcaacgactatatcacttcccaacagatgcaggtgaatctgcgtcctgacgtggctcgggggctcagcccacgcgagcagcctctgggtcttccgtacccagcaacgcggggtatcatcgatcttaccaatatgccaccgaccattcttgtcccacatcctggggggacttccacgccacccatggaccgcattacctatatcccagggacacagattacgttccctccgcgaccgtacaacagcgcaagcatgagtcccggccaccccacccatctggccgcggcagcaagtgccgaacgagagcgggagagagagcgagaaaaagagcgtgaacgcgagcgaatcgccgcagcaagcagcgacctgtacttgcgacccggatcagaacagccagggcgtcctggtagtcacggatatgtgaggtccccatccccctccgtgcgaacacaggagaccatgcttcagcaacgtcctagtgtgttccaagggaccaacgggaccagtgtgatcacacccctggatcccaccgcgcagctacgaattatgcctcttcctgctggaggtccttctatttctcagggcctgcctgcaagtcgttataatactgcggccgatgccttggcagctctggtggatgctgcagcatcggcccctcagatggacgtctccaaaacaaaagaatcgaagcacgaagcagcacgcctggaggaaaacttaagatcccggtcagcagccgtctccgagcagcaacaactggaacagaaaaccttggaggtggagaagcggagcgtgcagtgtctgtacaccagctcagccttcccatctggcaaaccccagccacattcatcagtggtatattcagaagcagggaaagataagggtccgcccccaaaaagccggtatgaggaagagctccggaccaggggaaagaccactattacagctgccaattttattgacgttattattaccaggcaaatagcatccgataaagacgcaagggagaggggcagccagtcctcagacagcagcagcagcctatccagtcatcgatacgaaactccatctgatgcaatagaggttatctctcctgcctcaagcccagctcccccccaggagaaattgcagacctatcagcctgaagtggtgaaagctaaccaggccgagaatgatccgacccgacaatatgaaggaccgcttcaccactaccgcccgcagcaggagagccctagtccacaacaacaactgcccccatcatcccaagctgagggtatgggccaggttcccagaacccaccgcctgataaccttggccgatcatatatgccagatcattactcaggacttcgctaggaaccaggtcagtagccagaccccacagcagcctcccacatccacttttcaaaattctcctagcgcccttgtgtccacccctgtgcgaacgaaaacatctaacaggtacagtcccgagtcccaggcccagagtgtgcaccatcagcgccctgggtcacgggtttccccagagaacttggttgacaagtctaggggaagtcgcccaggcaaatcccccgaacgtagtcatgtgagctcggagccttatgaacccatctcacccccccaggttccggtcgtgcatgaaaaacaggattctttattgttgctatctcagcgcggcgccgaaccagccgagcagagaaacgacgcccggagccccggctctatctcatatctaccatctttcttcaccaagctggagaacacctctccaatggtaaaatctaagaagcaggagatttttcggaagctgaattcaagcgggggcggcgatagcgacatggcggcggcgcagccgggcaccgaaatctttaatctgccggcggtgacaacatccggatccgtcagcagccggggacattcgtttgctgacccagcatccaacctaggactagaagatattatccggaaagccttgatgggcagttttgacgacaaagttgaggaccacggggtggtgatgtcccaaccaatgggcgttgtccccggtactgctaacacaagcgtggtcactagtggagagacccgtcgagaggagggggatccatcacctcattccggcggtgtctgtaaaccaaaactgatcagtaaatccaactccaggaagagtaagtcaccaataccaggacagggatatttagggacagaacgacccagctcggtctctagtgttcattctgaaggcgactatcatcgacagactcctggctgggcctgggaagaccggcctagctccactggatcgacgcaattcccatataaccccctgacaatgcgcatgctgtcttccacccctccgactcccattgcgtgcgctccctctgcagtgaatcaagccgctccccatcagcagaaccggatctgggaacgagaacccgcccccttgctcagcgcccagtatgaaacactgtccgattctgacgattag

SEQ ID NO: 294240 - DNA, 7031 bp, Artificial Sequence
  derived and/or modified sequence
atgagtagctccggctaccctccaaatcagggcgctttttcaacagagcaatctagataccccccacactctgtgcagtatacatttccgaacactcgacatcagcaagacccagcctttggagggaagcacgaggcacccagctccccaatttccggacaaccctgcggcgacgaccagaacgcctcccccagtaaactctccaaagaggaactgatccagtctatggatcgggtggaccgcgagatcgccaaggtggagcagcagattctaaagctgaaaaagaaacagcagcaactcgaggaggaggcggctaagcccccagagcccgaaaagcctgtgtcgcccccaccagttgagcagaaacacagatcaatagtccagattatctatgatgagaataggaaaaaagcagaggaggctcacaagatatttgaggggctagggcctaaagtggaattgccactctataatcagccctctgacactaaagtgtaccacgaaaacattaagacaaaccaagtcatgagaaagaagctgatcctgtttttcaagcggcgaaatcacgcacgcaaacagagggaacagaagatctgccagcggtacgaccagttgatggaagcctgggagaaaaaagtcgatcgcattgagaataacccaaggagaaaggccaaagagtctaagaccagggagtactatgagaagcagttccctgaaatccggaaacagagggagcagcaggagcgctttcagagagtggggcagcgtggggctggactcagtgccacaatcgccagaagcgagcatgagatttctgaaatcatcgacggtctgagcgaacaggagaataacgagaaacagatgcgtcaactctcagtcatcccccctatgatgtttgatgcagaacagcgcagagtcaagtttatcaatatgaacggcctgatggaagatccgatgaaggtctacaaggaccgacagttcatgaacgtgtggacagaccacgagaaggagatctttaaggacaagttcattcaacaccctaaaaactttggcctgatcgcttcgtatttggaacgaaagagtgtgccggattgcgtcttgtattactacctgactaagaaaaatgagaactacaaagctctagtccggagaaattatgggaagcgtagaggcaggaaccaacagatcgcccgtcctagtcaggaggagaaagttgaggaaaaggaagaagacaaggccgagaaaactgaaaaaaaagaggaggaaaagaaagacgaagaggagaaagacgagaaagaggacagcaaggaaaacacgaaggagaaggacaagatcgatggcactgccgaggagacagaagagcgggagcaagctacaccgaggggcaggaagactgccaattcacagggtcggaggaagggcaggataaccaggtccatgaccaacgaagcagcggctgcgtctgccgcagcagccgcagctactgaagagcctcccccaccgctccccccacccccagagccaatctccactgaaccggtggaaacaagtaggtggacggaggaagaaatggaggtcgcaaagaaaggactggttgaacacggtcgaaattgggcagcaatcgcaaagatggtgggtactaagagtgaggcacagtgcaagaacttttacttcaactacaagcgccgacacaacctggataaccttttgcagcagcataagcaaaaaacctcgcggaaacctcgagaggagcgggacgtgtcccaatgcgagagcgtcgcaagcacggtgagtgcccaggaggacgaagatatcgaagctagtaacgaagaggagaatccagaggattcagaaggggctgagaattcctccgatacggaaagcgcccctagtccaagcccagtggaggccgtgaagccctccgaggatagccccgaaaacgccacgtctcgcggtaacaccgagccagctgtcgagctggaacctaccactgagactgcgccatcaactagccccagcctggccgtaccctcgacaaaacctgcagaagatgagagcgtggaaacccaggtgaacgatagcatcagcgctgagacagccgaacagatggacgtagatcaacaggagcattctgccgaagagggatccgtgtgtgatcctcctcccgctaccaaagccgatagcgtggacgtggaggtgcgagtcccagaaaatcatgcgtctaaagtggagggggacaacacaaaagagcgggacctggacagagcctcagaaaaggtggagcccagagacgaggacctcgtagttgcccaacagatcaacgcccagcgtcccgagccccagtccgataacgatagcagtgcaacgtgcagtgctgacgaggatgtcgatggggaacctgagagacagaggatgttccctatggactccaagcccagtttgttaaaccccacaggatccattcttgtctctagccccctcaagccaaatcccttggacctcccccagttgcaacatagagcggctgtcatcccgcctatggtgtcatgcaccccctgcaacatacccatcggcactcctgtgtccggctacgcactgtatcagaggcacattaaggccatgcatgaaagcgcccttctcgaagagcagagacagcgacaggagcagatagatttggagtgtaggtcttctacaagcccttgtggcacaagtaaatcgcccaaccgcgagtgggaggtgcttcagcccgctccacaccaggtaatcacgaatctgcctgagggggtacgcctgcccacgacccgacctacgaggcctcctcccccactgattccatcatccaaaacaacagtggcgagcgaaaaaccctccttcataatgggcggttctatatcccaggggactccaggcacatacctcacatcccacaaccaggcctcgtacacccaggaaacccctaagccttcagtgggctcaattagtctgggcttgcccagacagcaggaatccgccaaaagtgccactttgccatacatcaagcaggaggaattcagccccaggagccagaacagccagcccgagggcctactagttagggcccagcacgaaggcgtggtccgcggaacagctggagcaattcaagagggctccatcacccgagggacacctacatctaagatatcggtggagagcattccctccttacgaggctctatcacacaaggcaccccagccctgccacagacaggcattccaacggaagccctagtcaaggggtccattagccgtatgcccattgaagatagttctcctgagaaaggcagagaggaggcggcttctaaaggtcatgtaatctatgaggggaaatcaggccatattctatcctacgacaatatcaagaacgccagagaggggactcgcagcccaagaaccgctcatgaaatctccctgaagagatcatacgaatccgttgaagggaacatcaaacagggaatgagcatgcgggagtctcctgtatccgctccactggaaggactgatctgtcgtgcactgcccagaggctctccacactcagatctgaaagagcggacagtgttgagtggtagtatcatgcagggtaccccaagagccacgaccgaaagcttcgaggatgggcttaagtaccctaagcagatcaagagggaaagtccgcctatccgggctttcgagggagctattaccaagggtaaaccctacgacggcataacaacaataaaagagatgggaaggtcaattcatgagatccctcgacaggacatccttactcaggagtctcgaaaaaccccagaagtggttcagtcaacgaggccgatcatagagggcagcatctcacaaggcacccctatcaagttcgacaataacagtgggcagagcgctattaagcataacgtcaagtcacttataaccggtccatccaaactgagccggggaatgccacctttggaaatcgtgccagaaaacatcaaggtagtggaaaggggtaagtatgaggatgtcaaggccggagaaaccgtccggagccgccacacctccgtggtctctagcggtccctccgtgttgcgttccactctgcacgaggcccctaaagcccaattgagtcctggcatttacgacgacacatctgcacgtcgaactccggtctcatatcaaaataccatgagtcggggttcacccatgatgaatagaaccagcgacgtgagttccaacaaaagtaccaaccacgaaagaaagtcaactcttacacccacccaaagagaatcaattcccgctaagagccccgtgcccggtgtggatcccgtcgtgtcacacagtccattcgaccctcatcatcgtggaagcacagccggagaggtgtatagatcacatttgcccacacacctggatcctgccatgccatttcatcgggctctggatcctgccgcagcctacctgttccaacggcagctcagtcccacacctggttatccaagtcagtaccaactgtacgctatggagaacacgaggcagacaatcctgaacgattacataacatctcaacagatgcaggtgaacctgagacccgacgtcgctagggggctatcccctagagaacagccacttgggctgccgtatccagcgacgcgcggaatcatcgatcttacaaatatgccccctacaatcctggtgccgcaccctggaggcacaagcacgcctccgatggatcggatcacctacatccccggaacacagatcaccttcccgccaaggccttataacagtgccagtatgtctcctggccaccccacgcatttggctgccgcagcttcagccgaacgcgagagggagcgtgaacgagagaaggagcgcgagcgcgagagaatcgctgccgcatctagtgacctctatctgagacccggatccgaacagcccggtaggcctggttcccatgggtacgtacgttccccatctccctccgttaggacccaggagaccatgcttcaacaacggccatctgtgtttcagggaactaatgggactagtgtcattactccgttagatcctacagcccagctccgaataatgcctctgccagctggcggtcccagtatttcccagggcctgcccgctagtagatacaacacagctgccgatgctctagccgctctcgtggacgcggcagcctcagcccctcagatggacgtcagtaaaaccaaagaatccaaacacgaggcagctcgcctggaagagaaccttagatcaagatctgccgcagtgagtgagcaacaacagttagaacaaaagaccctggaagtcgaaaagcgctccgttcaatgtctgtacacctctagcgcgttccctagtgggaagccccagccacactcctctgtggtctactcagaggccggaaaggacaaaggcccacctccaaagtctcgatatgaagaagaactgcggactcggggaaaaaccacaataacagccgctaacttcattgacgtgattataactcgacagatcgctagcgacaaagatgccagagagcgagggtcccaatcatctgactcttccagcagcctgtcttctcataggtacgagactccaagtgatgcaattgaggtgataagccccgcttcaagtcctgcaccgccacaagagaaactgcaaacgtatcagcccgaagtggtgaaagcaaaccaggctgagaatgatccaacacgtcaatacgaagggcctctgcaccactaccgaccccagcaggagagcccgagtccccagcagcagttaccgccatcttctcaggctgaaggcatgggacaggtgcctcggacacatcgactcatcaccttggcagaccatatttgtcaaatcatcacccaggacttcgcccgaaaccaggtttctagccagactccacagcagcctcccacttcaacctttcagaattcaccttctgcactggtgtccaccccagtgagaactaaaacgagcaatagatatagcccagagagccaggcccagtccgtccatcaccagcgacctggatcccgcgtttccccagaaaaccttgtggacaagagccgcggtagccggccaggcaaaagtccggagcgcagtcacgtgtcctctgagccatatgagccaatctctccaccccaggttcctgtggtccacgagaagcaggattccctgctgcttctgagccagcggggtgcagaacccgcagaacagcgaaatgatgccaggtctcccggaagtattagctatctgcccagcttcttcacaaaactggagaatacttcgccaatggtgaagtcaaaaaaacaagagatttttaggaaactgaattcaagcgggggtggtgacagtgatatggccgcagctcaacctggtacggagatatttaacctgccagcggtgacgaccagtggcagtgtgtcatcccggggtcatagttttgctgaccctgcctctaacttggggctggaggacattattcgtaaggccctgatgggcagtttcgacgacaaggttgaggaccacggggttgtgatgtctcagcctatgggagttgttccgggaaccgcaaatacttccgtagtgacgtcaggagaaacccggagggaggagggggaccccagtcctcatagcggagtttgtaagcccaaactcataagtaaaagcaattcccgaaagtccaagagtccaatcccaggtcagggctacctgggcaccgagcggccatcaagcgtgagtagcgttcactcggaaggggattaccacaggcagaccccaggttgggcctgggaggatcggccaagttctacgggctccacccagttcccctacaaccctctgactatgagaatgctctcatctacccccccaacgccaattgcttgtgctccatccgccgtcaaccaagcagctcctcatcagcagaatcggatctgggaacgagaaccagccccacttctatcggctcagtatgagactctttcagacagtgacgacta

SEQ ID NO: 294241 - DNA, 3075 bp, Artificial Sequence
  derived and/or modified sequence
atgcctccattggagattgtgccagagaatataaaggtagtggagcgaggcaaatatgaagacgtaaaggcaggcgaaaccgtaagaagccgtcacacttctgtagtcagttccggacctagtgtcctgcgttctacgctgcatgaagcccctaaggcccaactgagccccggaatttatgacgatacttccgcgagacggactcctgtatcatatcagaacacgatgtctaggggttctccaatgatgaatcggacaagtgatgtcactatttcatcaaacaaaagtaccaatcacgagcgtaagtctacattaactcccacacagagagagtcaatccccgctaagtcccccgtgcccggtgtggatcccgtggtatcccattctccgtttgatccccatcatcggggttctacggcgggtgaggtgtaccgtagccacctcccgacccatttggacccagccatgcctttccatagagctctcgaccctgccgcagctgcatacctctttcagagacagctctcacccactccagggtaccctagccaataccagctctacgccatggagaacacaagacagaccatactgaatgattacattaccagtcaacaaatgcaggtgaacctcaggcccgatgtggccaggggattgtcccctagagagcagcccctcgggctgccctacccggctacacgaggtatcatagatctcaccaacatgccgcctaccatcctcgtccctcaccctgggggtacaagcacgcctcccatggatcggatcacctacatcccagggacccagatcacgttcccacctcggccatacaactccgctagcatgagccccggtcaccctacacatttagccgctgccgcttctgcagagagggagagagaaagagagcgggagaaggagcgggagagagaacgcattgccgcagcttctagcgacctttatctgaggcccggaagcgagcagccagggagacctgggagccacggctacgttcggagcccatccccatccgtccggactcaggaaaccatgctgcagcagcgccctagcgtgttccagggaactaacggcacgtcagtcatcactcctctggatcccaccgctcagcttaggataatgccattgccggctggcggaccaagcatatcgcagggcctccccgcatcccgctataacacagctgccgacgctctggccgctctggtcgatgccgctgcgtccgccccacagatggacgtctcgaagacaaaagaatcgaaacatgaagccgctcggctggaagaaaatctgcgcagtcggagcgccgcagtttcagaacagcagcagctggagcaaaagaccctagaggtcgaaaaacgctccgtgcagtgcctctatacaagttcagcttttcctagcggcaaacctcagcctcacagctctgtagtgtactctgaggcgggaaaggacaagggccctccgccaaagagcaggtacgaggaggaactccgtactcgaggcaagaccaccattaccgctgcaaattttatcgatgtaattattacacgacaaatcgcaagtgacaaggatgcgagggagcgtggtagtcagagcagtgatagctcttcaagtttgtcttctcaccggtacgaaacgccctctgatgcgatcgaggtgatctcacccgcttcctcacccgctccaccccaggaaaagctgcagacttatcagcctgaagttgtcaaagccaaccaggccgaaaacgatcccacaaggcagtacgaagggcctctccaccactacaggccccaacaagagtcccctagcccccagcaacagttgcctccttcttcacaggcagaaggaatggggcaggtgcctcgtactcaccggctgattacactagccgaccacatttgccagatcattacccaggactttgcacgcaaccaggtgtcctcacagaccccccaacagcctcccacgagcactttccaaaactcaccatcagcactggtgtctactcctgttcgcaccaagaccagtaaccgctatagccccgaaagccaggcccagagtgtccaccaccaacggccaggctctcgagtcagtcccgaaaacctcgttgacaagtcccggggttctcgcccaggaaagagccctgagagaagccatgtaagcagcgagccatatgagcctatcagccccccacaggtgcctgtagtgcatgagaagcaagattcactactgttgctaagtcagcggggtgcagaacccgcagaacagcggaacgatgcgagatccccaggaagcatatcctatctgccatcatttttcaccaaattagagaacacgagcccgatggttaaatccaagaaacaggagatttttcgaaagttgaactctagcggaggaggggatagtgatatggccgcagctcagcccggaactgaaatcttcaacctaccagccgttaccacaagcggctctgtgtcctcacggggacatagctttgctgacccggcttccaatttaggactggaggatataattagaaaagccttaatggggtccttcgacgataaggtggaggatcacggggtggttatgagccagccaatgggggttgtgcctgggactgctaacacaagtgtggtcacatcaggagaaactagaagggaagagggtgatccaagcccgcactccggaggagtttgtaaaccaaaactgataagtaaaagtaatagccgtaaatcaaaatctcccattccaggccaggggtacctggggacagagagacccagcagcgtgagctccgtccattcggaaggagactaccatcgccagacccccggatgggcctgggaggaccgtccaagtagcaccggcagcactcagtttccctataatcctctgacaatgcggatgctgtcttccactccgcctaccccaattgcatgcgcacccagcgctgtgaatcaggcagccccacaccagcagaataggatttgggaaagagaacccgcacccctgctgtcagcccagtatgagactctctctgattcagacgattag

SEQ ID NO: 294242 - DNA, 6445 bp, Artificial Sequence
  derived and/or modified sequence
attcacaatgaatgtgaaattaaaagcatgatgtagtagtgacccaaaaggaatgtgaattctcctccagaacatgcagagacccatggatgaactgtgtttctagatttttcctccagctttcctgagagaaacaggtcaaaatgagcaagagacgcatgagcgtgggtcagcaaacatgggctcttctctgcaagaactgtctcaaaaaatggagaatgaaaagacagaccttgttggaatggctcttttcatttcttctggtactgtttctgtacctatttttctccaatttacatcaagttcatgacactcctcaaatgtcttcaatggatctgggacgtgtagatagttttaatgatactaattatgttattgcatttgcacctgaatccaaaactacccaagagataatgaacaaagtggcttcagccccattcctaaaaggaagaacaatcatggggtggcctgatgaaaaaagcatggatgaattggatttgaactattcaatagacgcagtgagagtcatctttactgataccttctcctaccatttgaagttttcttggggacatagaatccccatgatgaaagagcacagagaccattcagctcactgtcaagcagtgaatgaaaaaatgaagtgtgaaggttcagagttctgggagaaaggctttgtagcttttcaagctgccattaatgctgctatcatagaaatcgcaacaaatcattcagtgatggaacagctgatgtcagttactggtgtacatatgaagatattaccttttgttgcccaaggaggagttgcaactgattttttcattttcttttgcattatttctttttctacatttatatactatgtatcagtcaatgttacacaagaaagacaatacattacgtcattgatgacaatgatgggactccgagagtcagcattctggctttcctggggtttgatgtatgctggcttcatccttatcatggccactttaatggctcttattgtaaaatctgcacaaattgtcgtcctgactggttttgtgatggtcttcaccctctttctcctctatggcctgtctttgataactttagctttcctgatgagtgtgttgataaagaaacctttccttacgggcttggttgtgtttctccttattgtcttttgggggatcctgggattcccagcattgtatacacgtcttcctgcatttttggaatggactttgtgtcttcttagcccctttgccttcactgttgggatggcccagcttatacatttggactatgatgtgaattctaatgcccacttggattcttcacaaaatccatacctcataatagctactcttttcatgttggtttttgacacccttctgtatttggtattgacattatattttgacaaaattttgcccgctgaatatggacatcgatgttctcccttgtttttcctgaaatcctgtttttggtttcaacacggaagggctaatcatgtggtccttgagaatgaaacagattctgatcctacacctaatgactgttttgaaccagtgtctccagaattctgtgggaaagaagccatcagaatcaaaaatcttaaaaaagaatatgcagggaagtgtgagagagtagaagctttgaaaggtgtggtgtttgacatatatgaaggccagatcactgccctccttggtcacagtggagctggaaaaactaccctgttaaacatacttagtgggttgtcagttccaacatcaggttcagtcactgtctataatcacacactttcaagaatggctgatatagaaaatatcagcaagttcactggattttgtccacaatccaatgtgcaatttggatttctcactgtgaaagaaaacctcaggctgtttgctaaaataaaagggattttgccacatgaagtggagaaagaggtacaacgagttgtacaggaattagaaatggaaaatattcaagacatccttgctcaaaacttaagtggtggacaaaataggaaactaacttttgggattgccattttaggagatcctcaagttttgctattggatgaaccgactgctggattggatcctctttcaaggcaccgaatatggaatctcctgaaagaggggaaatcagacagagtaattctcttcagcacccagtttatagatgaggctgacattctggcggacaggaaggtgttcatatccaatgggaagctgaagtgtgcaggctcttctctgttccttaagaagaaatggggcataggctaccatttaagtttgcatctgaatgaaaggtgtgatccagagagtataacatcactggttaagcagcacatctctgatgccaaattgacagcacaaagtgaagaaaaacttgtatatattttgcctttggaaaggacaaacaaatttccagaactttacagggatcttgatagatgttctaaccaaggcattgaggattatggtgtttccataacaactttgaatgaggtgtttctgaaattagaaggaaaatcaactattgatgaatcagatattggaatttggggacaattacaaactgatggggcaaaagatataggaagccttgttgagctggaacaagttttgtcttccttccacgaaacaaggaaaacaatcagtggcgtggcgctctggaggcagcaggtctgtgcaatagcaaaagttcgcttcctaaagttaaagaaagaaagaaaaagcctgtggactatattattgctttttggtattagctttatccctcaacttttggaacatctattctacgagtcatatcagaaaagttacccgtgggaactgtctccaaatacatacttcctctcaccaggacaacaaccacaggatcctctgacccatttactggtcatcaataagacagggtcaaccattgataactttttacattcactgaggcgacagaacatagctatagaagtggatgcctttggaactagaaatggcacagatgacccatcttacaatggtgctatcattgtgtcaggtgatgaaaaggatcacagattttcaatagcatgtaatacaaaacggctgaattgctttcctgtcctcctggatgtcattagcaatggactacttggaatttttaattcgtcagaacacattcagactgacagaagcacattttttgaagagcatatggattatgagtatgggtaccgaagtaacaccttcttctggataccgatggcagcctctttcactccatacattgcaatgagcagcattggtgactacaaaaaaaaagctcattcccagctacggatttcaggcctctacccttctgcatactggtttggccaagcactggtggatgtttccctgtactttttgatcctcctgctaatgcaaataatggattatatttttagcccagaggagattatatttataattcaaaacctgttaattcaaatcctgtgtagtattggctatgtctcatctcttgttttcttgacatatgtgatttcattcatttttcgcaatgggagaaaaaatagtggcatttggtcatttttcttcttaattgtggtcatcttctcgatagttgctactgatctaaatgaatatggatttctagggctattttttggcaccatgttaatacctcccttcacattgattggctctctattcattttttctgagatttctcctgattccatggattacttaggagcttcagaatctgaaattgtatacctggcactgctaataccttaccttcattttctcatttttcttttcattctgcgatgcctagaaatgaactgcaggaagaaactaatgagaaaggatcctgtgttcagaatttctccaagaagcaacgctatttttccaaacccagaagagcctgaaggagaggaggaagatatccagatggaaagaatgagaacagtgaatgctatggctgtgcgagactttgatgagacacccgtcatcattgccagctgtctacggaaggaatatgcaggcaaaaagaaaaattgcttttctaaaaggaagaaaaaaattgccacaagaaatgtctctttttgtgttaaaaaaggtgaagttataggactgttaggacacaatggagctggtaaaagtacaactattaagatgataactggagacacaaaaccaactgcaggacaggtgattttgaaagggagcggtggaggggaacccctgggcttcctggggtactgccctcaggagaatgcgctgtggcccaacctgacagtgaggcagcacctggaggtgtacgctgccgtgaaaggtctcaggaaaggggacgcaatgatcgccatcacacggttagtggatgcgctcaagctgcaggaccagctgaaggctcccgtgaagaccttgtcagagggaataaagcgaaagctgtgctttgtgctgagcatcctggggaacccgtcagtggtgcttctggatgagccgtcgaccgggatggaccccgaggggcagcagcaaatgtggcaggtgattcgggccacctttagaaacacggagaggggcgccctcctgaccacccactacatggcagaggctgaggcggtgtgtgaccgagtggccatcatggtgtcaggaaggctgagatgtattggttccatccaacacctgaaaagcaaatttggcaaagactacctgctggagatgaagctgaagaacctggcacaaatggagcccctccatgcagagatcctgaggcttttcccccaggctgctcagcaggaaaggttctcctccctgatggtctataagttgcctgttgaggatgtgcgacctttatcacaggctttcttcaaattagagatagttaaacagagtttcgacctggaggagtacagcctctcacagtctaccctggagcaggttttcctggagctctccaaggagcaggagctgggtgatcttgaagaggactttgatccctcggtgaagtggaaactcctcctgcaggaagagccttaaagctccaaataccctatatctttctttaatcctgtgactcttttaaagataatattttatagccttaatatgccttatatcagaggtggtacaaaatgcatttgaaactcatgcaataattatcctcagtagtatttcttacagtgagacaacaggcgatgtcagtgagggcgatcatagggcataagcctaagccataccatgcagcctttgtgccagcaaccaaatcccatgtttcctactgtgttaagtttaaaaatgcatttattatagaattgtctacatttctgaggatgtcatggagaatgcttaattttctttctctgaacttcaaaatattaaatattttcttatttatttttttgattaaagtataaattaagacaccctattgacttccgggtaaggggagtcaattgattacccagcagcacagtatttgctttttataattccctttttaaatacttgttcttaattcactggttttccttttctgtcatttttcagagtttagattgtgagtccatgttttgtctgttgtgcctataaaggaaatttgaaatctgtatcattctactataaagacacatgcacacgtatgtttattgcagcactgtttacaatagcaaagacttggaaccaaccaaaatacccacaaatgatagaccggataaagaaaacgtgacacatatacaccatggaatactatgcagccatagaaaaggatgagttcatattcttcacagggacatggatgaagctggaaaccatcatcctcagcaaactaacacaggaacagaaaaccaaacaccgcatgttctcactcataagtgggaattgaacaatgagaatacatggacacagggaggggaacaccacaccctggggcctgttggggggatgggggctaggggagggatagcattaggagaaatacctgatgtagatgatgggttgatgggtgcagcaaagtaccatggcacatgtatacctgtgtaacaaacctgcacattcagcacatgtatcccagaacttaaagtataataaaaataaataaataatttcagtaagaacctgatcaagttgaacatgtatatatatgttatacacaagtttgaaacatatttctgtttttatatgttttcttatgatgcaagggcatactcttatgcaaataattaaaacttcataggtcttaatttcccatatctctatatattattatgacctatccaactggtaaccctatgaacaccttaaaataaacttgtatactcttatttaggtgagtttttcttgttaatactattattattgctatctaattgaatacttgaaggaagttgtgtgaaagaccttggctttgattttagttcttatattcttctagtttttgaaaataaaacacttccatcaacccgtaa

SEQ ID NO: 294243 - DNA, 2792 bp, Artificial Sequence
  derived and/or modified sequence
tctttcgcgggcacttcgaattctagtcccctccaggtgggtggtgaagccgcggagtgtgagaggcatctccgtgctcatccgtgaccccagctgtactccaagggaaggcatctccagggaagagcagcttggtcccgcaaaagctggactgaaagaaggactttgtgacttgggatgtgacgggcacggagatggagtggggggtggtggcagcgcaaggtgtgcaggtgacagcagggggacacccccaaggcaggagcccgggccgacggagaggacttaacgacactatcggaccctctgggaaaagaggggagacgtcgtgacccaggccccgccccaccttgccgcctcgtgcccggcgctaagacccagcgggcgcgccgcccgcccggggcccggccctgtccccttccgtccgcggggcagccagctcagctccggagagccggcggcgcggcgggcatggctcgggtggcgtgggggctgctgtggttgctgctgggcagcgccggggcgcagtacgagaagtacagcttccggggcttcccgcccgaggacctgatgccgctggccgcggcgtacgggcacgctctggagcagtacgagggagagagctggcgcgagagcgcgcgctacctggaggcggcgctgcggctgcaccggctcctgcgcgacagcgaggccttctgccacgccaactgcagcggccccgcgcccgcggccaagcccgatcccgacggcggccgcgcagacgagtgggcctgcgagctgcggctcttcggccgcgtcctggagcgagccgcctgcctgcggcgctgcaagcggacgctgcccgccttccaggtgccctacccgccgcggcagctgctgcgtgacttccagagccgcctgccctaccagtacctgcactacgcgctgttcaaggctaaccggctggagaaggcggtggcggcggcctacaccttcctccagaggaacccgaagcacgagctgaccgccaagtatctcaactactatcaggggatgctggacgtcgccgacgagtccctcacggacctagaggcccagccctacgaggccgtgttcctccgggctgtgaagctctacaacagcggggatttccgcagcagcacggaggacatggagcgggccttgtcagagtacctggcagtctttgcccggtgcctggccggctgtgaaggggcccatgagcaggtggacttcaaggacttctacccggccatagcagatctctttgcagagtccctgcagtgcaaggtggactgtgaggccaatttgacccccaatgtgggtggctacttcgtggacaagttcgtggccaccatgtaccactacctgcagtttgcctactataagttgaatgatgtgcgccaggctgcccgcagcgccgccagctacatgctcttcgaccccaaggacagcgtcatgcagcagaacctggtgtattaccggttccaccgggctcgctggggcctggaagaggaggacttccagccccgggaggaggccatgctctaccacaaccagaccgccgagctgcgggagctgctggagttcacccacatgtacctgcagtcagatgatgagatggagctggaggagacagaaccgcccctggagcctgaggatgccctatctgacgccgagtttgagggggagggtgactacgaggagggcatgtatgctgactggtggcaggagccggatgccaagggtgacgaggccgaggctgagccagagcctgaactcgcatgagaaggggacaccccacaccgctcaagcttgggaagcctggtgccgatggccccaccctcaccagcctgggcagcagcaagaactatttattaaaaacttaagatgggccaggtgcggtggctcacacctgtaatcccagcattttgggaggccaaggtgggtggatcacttgaggccaggagttcaagaccagcctggccaacatgatgagacctccgtctctactaaaatacataaattagccgggtgtggtggcaggcgcctgaaatcccagctactcaagaggctgaggcaggagaatcgcttgaacctgggaggcaaaggttgcagtgaactgagattgcgccaccgcactccagcctgggcgacagagcgagactccatctttaaaaaaaaacaagacgggccggcacggtggctcacgcctgtaatcccagcactgagaggccgatcacttgaggtcaggagttcaagaccagcctggccaacatggtgaaaccccatctctactaaaaaatacaaaaattagccaggcatggtggcacacacctgtaatcgtagctgaggcaggagaatcgcctgaacccaggaggcggagcttgcagtgagccgagatcgtgccactgcactccagcctgggcgacagagtgagactccatctcaaaaaaaaaaaaaaaaacttaagatggacacagctgactggacccccatcctgcctcacccatgggtgctgcaccccagacccatcctgccacttctatgtctctggaccacaggatggtggtggcattgcaggttggcaagtgggctgatggggtccgccctcctcactgctgagctcctcacctggacagtctcctggacaaggagtttccagctgctggctggagtctcaggccaaattgcagagggtcctccagggtcctgaagagcactggactaagagtctagtggttccagggccctgaccagtaggtgctcaataaatgtttgttgttgaatgagtcata

SEQ ID NO: 294244 - DNA, 2601 bp, Artificial Sequence
  derived and/or modified sequence
gcttcctgggcttcccatctctggcgggaagcgctccccgacgcattctctacctaggggacacccccaaggcaggagcccgggccgacggagaggacttaacgacactatcggaccctctgggaaaagaggggagacgtcgtgacccaggccccgccccaccttgccgcctcgtgcccggcgctaagacccagcgggcgcgccgcccgcccggggcccggccctgtccccttccgtccgcggggcagccagctcagctccggagagccggcggcgcggcgggcatggctcgggtggcgtgggggctgctgtggttgctgctgggcagcgccggggcgcagtacgagaagtacagcttccggggcttcccgcccgaggacctgatgccgctggccgcggcgtacgggcacgctctggagcagtacgagggagagagctggcgcgagagcgcgcgctacctggaggcggcgctgcggctgcaccggctcctgcgcgacagcgaggccttctgccacgccaactgcagcggccccgcgcccgcggccaagcccgatcccgacggcggccgcgcagacgagtgggcctgcgagctgcggctcttcggccgcgtcctggagcgagccgcctgcctgcggcgctgcaagcggacgctgcccgccttccaggtgccctacccgccgcggcagctgctgcgtgacttccagagccgcctgccctaccagtacctgcactacgcgctgttcaaggctaaccggctggagaaggcggtggcggcggcctacaccttcctccagaggaacccgaagcacgagctgaccgccaagtatctcaactactatcaggggatgctggacgtcgccgacgagtccctcacggacctagaggcccagccctacgaggccgtgttcctccgggctgtgaagctctacaacagcggggatttccgcagcagcacggaggacatggagcgggccttgtcagagtacctggcagtctttgcccggtgcctggccggctgtgaaggggcccatgagcaggtggacttcaaggacttctacccggccatagcagatctctttgcagagtccctgcagtgcaaggtggactgtgaggccaatttgacccccaatgtgggtggctacttcgtggacaagttcgtggccaccatgtaccactacctgcagtttgcctactataagttgaatgatgtgcgccaggctgcccgcagcgccgccagctacatgctcttcgaccccaaggacagcgtcatgcagcagaacctggtgtattaccggttccaccgggctcgctggggcctggaagaggaggacttccagccccgggaggaggccatgctctaccacaaccagaccgccgagctgcgggagctgctggagttcacccacatgtacctgcagtcagatgatgagatggagctggaggagacagaaccgcccctggagcctgaggatgccctatctgacgccgagtttgagggggagggtgactacgaggagggcatgtatgctgactggtggcaggagccggatgccaagggtgacgaggccgaggctgagccagagcctgaactcgcatgagaaggggacaccccacaccgctcaagcttgggaagcctggtgccgatggccccaccctcaccagcctgggcagcagcaagaactatttattaaaaacttaagatgggccaggtgcggtggctcacacctgtaatcccagcattttgggaggccaaggtgggtggatcacttgaggccaggagttcaagaccagcctggccaacatgatgagacctccgtctctactaaaatacataaattagccgggtgtggtggcaggcgcctgaaatcccagctactcaagaggctgaggcaggagaatcgcttgaacctgggaggcaaaggttgcagtgaactgagattgcgccaccgcactccagcctgggcgacagagcgagactccatctttaaaaaaaaacaagacgggccggcacggtggctcacgcctgtaatcccagcactgagaggccgatcacttgaggtcaggagttcaagaccagcctggccaacatggtgaaaccccatctctactaaaaaatacaaaaattagccaggcatggtggcacacacctgtaatcgtagctgaggcaggagaatcgcctgaacccaggaggcggagcttgcagtgagccgagatcgtgccactgcactccagcctgggcgacagagtgagactccatctcaaaaaaaaaaaaaaaaacttaagatggacacagctgactggacccccatcctgcctcacccatgggtgctgcaccccagacccatcctgccacttctatgtctctggaccacaggatggtggtggcattgcaggttggcaagtgggctgatggggtccgccctcctcactgctgagctcctcacctggacagtctcctggacaaggagtttccagctgctggctggagtctcaggccaaattgcagagggtcctccagggtcctgaagagcactggactaagagtctagtggttccagggccctgaccagtaggtgctcaataaatgtttgttgttgaatg

SEQ ID NO: 294245 - protein, 45 aa, Artificial Sequence
  derived and/or modified sequence
KGKKGKKGKKGKKGKKGKKGKKGKKGKKGKKGKKGKKGKKGKKGK

SEQ ID NO: 294246 - protein, 199 aa, Artificial Sequence
  derived and/or modified sequence
MYPATAVPQINITILKGEKGDRGDRGLQGKYGKTGSAGARGHTGPKGQKGSMGAPGERCKSHYAAFSVGRKKPMHSNHYYQTVIFDTEFVNLYDHFNMFTGKFYCYVPGLYFFSLNVHTWNQKETYLHIMKNEEEVVILFAQVGDRSIMQSQSLMLELREQDQVWVRLYKGERENAIFSEELDTYITFSGYLVKHATEP

SEQ ID NO: 294247 - protein, 281 aa, Artificial Sequence
  derived and/or modified sequence
MGSRGQGLLLAYCLLLAFASGLVLSRVPHVQGEQQEWEGTEELPSPPDHAERAEEQHEKYRPSQDQGLPASRCLRCCDPGTSMYPATAVPQINITILKGEKGDRGDRGLQGKYGKTGSAGARGHTGPKGQKGSMGAPGERCKSHYAAFSVGRKKPMHSNHYYQTVIFDTEFVNLYDHFNMFTGKFYCYVPGLYFFSLNVHTWNQKETYLHIMKNEEEVVILFAQVGDRSIMQSQSLMLELREQDQVWVRLYKGERENAIFSEELDTYITFSGYLVKHATEP

SEQ ID NO: 294248 - protein, 291 aa, Artificial Sequence
  derived and/or modified sequence
MMSATGPGRKMGSRGQGLLLAYCLLLAFASGLVLSRVPHVQGEQQEWEGTEELPSPPDHAERAEEQHEKYRPSQDQGLPASRCLRCCDPGTSMYPATAVPQINITILKGEKGDRGDRGLQGKYGKTGSAGARGHTGPKGQKGSMGAPGERCKSHYAAFSVGRKKPMHSNHYYQTVIFDTEFVNLYDHFNMFTGKFYCYVPGLYFFSLNVHTWNQKETYLHIMKNEEEVVILFAQVGDRSIMQSQSLMLELREQDQVWVRLYKGERENAIFSEELDTYITFSGYLVKHATEP

SEQ ID NO: 294249 - protein, 291 aa, Artificial Sequence
  derived and/or modified sequence
VLSASGPGRKMGSRGQGLLLAYCLLLAFASGLVLSRVPHVQGEQQEWEGTEELPSPPDHAERAEEQHEKYRPSQDQGLPASRCLRCCDPGTSMYPATAVPQINITILKGEKGDRGDRGLQGKYGKTGSAGARGHTGPKGQKGSMGAPGERCKSHYAAFSVGRKKPMHSNHYYQTVIFDTEFVNLYDHFNMFTGKFYCYVPGLYFFSLNVHTWNQKETYLHIMKNEEEVVILFAQVGDRSIMQSQSLMLELREQDQVWVRLYKGERENAIFSEELDTYITFSGYLVKHATEP

SEQ ID NO: 294250 - DNA, 1485 bp, Artificial Sequence
  derived and/or modified sequence
gcacttggctgtggtgtgtgctgcagggagcgggaggacatgggaggacgtgctccaggaggcctctccagcacctgccaaccggggaggagggaaccaagacagggagatgggagccgaggtctgaggacaagcagaagcttccccaccctccctcttagagctgcagagctggagaggcccctagagtccacccaacaacaacagtggcaatcatcatcaccatcatcatcatcatcaccatcatcatcatcatcatgatgtcagccacagggcccggcaggaagatgggctcccgtggacagggactcttgctggcgtactgcctgctccttgcctttgcctctggcctggtcctgagtcgtgtgccccatgtccagggggaacagcaggagtgggaggggactgaggagctgccgtcgcctccggaccatgccgagagggctgaagaacaacatgaaaaatacaggcccagtcaggaccaggggctccctgcttcccggtgcttgcgctgctgtgaccccggtacctccatgtacccggcgaccgccgtgccccagatcaacatcactatcttgaaaggggagaagggtgaccgcggagatcgaggcctccaagggaaatatggcaaaacaggctcagcaggggccaggggccacactggacccaaagggcagaagggctccatgggggcccctggggagcggtgcaagagccactacgccgccttttcggtgggccggaagaagcccatgcacagcaaccactactaccagacggtgatcttcgacacggagttcgtgaacctctacgaccacttcaacatgttcaccggcaagttctactgctacgtgcccggcctctacttcttcagcctcaacgtgcacacctggaaccagaaggagacctacctgcacatcatgaagaacgaggaggaggtggtgatcttgttcgcgcaggtgggcgaccgcagcatcatgcaaagccagagcctgatgctggagctgcgagagcaggaccaggtgtgggtacgcctctacaagggcgaacgtgagaacgccatcttcagcgaggagctggacacctacatcaccttcagtggctacctggtcaagcacgccaccgagccctagctggccggccacctcctttcctctcgccaccttccacccctgcgctgtgctgaccccaccgcctcttccccgatccctggactccgactccctggctttggcattcagtgagacgccctgcacacacagaaagccaaagcgatcggtgctcccagatcccgcagcctctggagagagctgacggcagatgaaatcaccagggcggggcacccgcgagaaccctctgggaccttccgcggccctctctgcacacatcctcaagtgaccccgcacggcgagacgcgggtggcggcagggcgtcccagggtgcggcaccgcggctccagtccttggaaataattaggcaaattct

SEQ ID NO: 294251 - DNA, 876 bp, Artificial Sequence
  derived and/or modified sequence
atgatgtccgccacaggccctggtagaaagatgggctcaagaggtcaaggcctcctcctcgcctactgcttattactggcctttgcttccgggctcgtgctcagccgtgtacctcacgtccagggcgagcagcaagaatgggaagggacagaggagttacccagccctccagaccacgctgaacgcgcagaagagcagcatgagaaatacaggcctagtcaggaccaaggcctgccagcctctcggtgtcttcggtgctgcgaccctggtacaagcatgtacccggctacagcagtcccccagataaacatcacaatcttaaaaggagaaaagggagaccggggtgatcgtggcttacagggcaaatacgggaagacagggagcgccggtgcgagggggcatacgggacccaagggacaaaagggatccatgggcgcacccggtgagagatgtaaatctcattatgcagctttctccgtgggcagaaagaagccaatgcacagcaatcactactaccagacggtaatttttgacaccgaattcgtgaacctgtatgaccactttaacatgtttactggcaaattctattgctacgtaccagggctgtacttcttctctctcaacgttcatacatggaaccagaaagagacgtacctccatattatgaagaacgaagaggaggtggttatcctgtttgcccaagtgggggaccgttcaattatgcagtcccagtcactgatgttggaactccgagagcaggaccaagtgtgggtgagactgtacaagggcgaacgagagaatgccatattcagcgaagaattggatacatatatcacatttagtgggtacctcgtcaaacacgcgaccgagccttag

SEQ ID NO: 294252 - DNA, 876 bp, Artificial Sequence
  derived and/or modified sequence
gtgttgagtgctagcggccctgggaggaagatgggctcccgaggacagggtctgttgcttgcctattgtctgctgcttgcatttgctagtggcctcgtcttgtctcgtgttccccatgttcaaggcgagcagcaggaatgggagggcacggaagaactgcctagcccacccgaccatgctgagcgggctgaggagcaacacgagaagtatagaccatctcaagaccaagggttgcccgcttcacggtgcttgcgatgttgcgatccaggaacaagcatgtatccagccaccgctgtaccccagattaatattactatcttaaaaggtgaaaaaggcgatcggggagaccggggtttgcagggcaaatatggaaagactggctctgccggtgcaagagggcatactggccctaagggtcagaaagggtcaatgggagccccaggtgagcggtgcaaaagccattacgccgctttcagcgttgggcgaaaaaagcctatgcactccaaccactattaccagacagttatatttgacactgagtttgtaaatctgtacgaccactttaacatgtttactgggaagttctattgctacgtccccggactgtacttctttagcttgaatgttcacacgtggaaccagaaggaaacttatttacatattatgaagaatgaggaagaggtggtgattctgtttgcacaggttggcgacagaagcatcatgcagagccagagtctgatgttagagctgcgagaacaagatcaagtatgggtgagactctacaagggagaacgggagaacgccatcttttccgaagagctagatacatatatcacgttttctggttacttggtgaagcatgccactgagccatag

SEQ ID NO: 294253 - DNA, 876 bp, Artificial Sequence
  derived and/or modified sequence
atgatgtcagccactgggccgggaagaaagatgggatccagaggccaagggcttcttctggcttattgcctccttttagcctttgccagtggcctcgtgctgagccgtgtcccgcacgtgcaaggtgagcagcaagagtgggaagggacagaggaattaccatcgcctcctgaccacgccgagagggcagaagaacagcatgagaaataccgaccatcacaggaccagggattgccagctagccgttgtttaagatgctgtgatccgggcacgtcaatgtacccagccaccgccgtcccccaaatcaatatcaccatactcaagggcgagaagggagatcgaggcgacaggggcctacagggcaagtacggcaagaccggatccgccggggccagaggccacactggacccaagggtcagaaaggaagcatgggcgcacctggcgaaaggtgcaagtcccactatgcagccttctcagtcggacggaaaaagccaatgcattccaaccattactatcagacggtcatcttcgataccgaattcgtcaatctatatgaccatttcaacatgtttactggaaaattctattgctatgtacctgggctgtatttcttttcattgaacgttcacacatggaaccagaaggagacgtatctccatatcatgaaaaacgaagaggaggtcgtaatattgtttgcacaggtgggagacaggagtataatgcagtctcagtccctgatgttggagctaagagagcaggaccaggtgtgggttcgattatacaagggggagagagagaatgccatcttcagtgaagaactggatacgtatatcacttttagcgggtatctcgtcaagcacgcaaccgaaccttag

SEQ ID NO: 294254 - DNA, 876 bp, Artificial Sequence
  derived and/or modified sequence
gttctcagcgcctcaggacctggaagaaaaatgggaagccgaggtcaggggctcttgctggcatattgtctgctccttgccttcgcttcaggcctggtactcagcagagtgccacacgtccagggtgagcaacaggaatgggaaggaaccgaggagctaccatctccaccagaccacgctgagagagcagaagagcagcacgagaagtatcgaccatcccaggaccaaggtttgccagcctctagatgcctgcggtgctgcgatcccggaacctcgatgtatccagctacggccgtaccccagatcaacattactattctaaagggagaaaagggggataggggcgatcgagggttacaaggtaagtatgggaaaactggcagtgccggagccagaggccatacgggcccaaagggacaaaaaggttcaatgggggcgcctggcgaacgatgcaagagtcactatgcagcctttagcgtgggacgcaaaaagcctatgcattctaatcactactatcagaccgtcatcttcgatactgagtttgtcaatctgtatgatcacttcaatatgttcaccgggaaattctactgctatgtgcccggcctgtactttttttccctgaatgtacacacatggaatcagaaagagacttatctacatattatgaaaaatgaggaagaagtcgttatactttttgcccaggtgggggaccgctcaataatgcagagccaatcattgatgttagagttaagagagcaagaccaggtttgggtgaggctctacaaaggcgaaagggaaaacgcaatcttttctgaagaactcgacacttatatcacattttccggctacctggtgaaacatgccacggagccatag

SEQ ID NO: 294255 - DNA, 876 bp, Artificial Sequence
  derived and/or modified sequence
atgatgtcagccactgggccgggaagaaagatgggatccagaggccaagggcttcttctggcttattgcctccttttagcctttgccagtggcctcgtgctgagccgtgtcccgcacgtgcaaggtgagcagcaagagtgggaagggacagaggaattaccatcgcctcctgaccacgccgagagggcagaagaacagcatgagaaataccgaccatcacaggaccagggattgccagctagccgttgtttaagatgctgtgatccgggcacgtcaatgtacccagccaccgccgtcccccagattaacattaccatccttaagggagagaagggagataggggcgaccggggactgcaaggcaagtacggcaaaacgggatcagccggcgccagaggccacacaggaccaaagggacagaagggcagcatgggagcacccggagaaaggtgcaaatctcattacgccgcatttagtgtcggccggaaaaaacctatgcacagcaaccattattaccaaactgtgatctttgacaccgagttcgttaacctgtacgaccactttaacatgtttacaggaaaattctactgctatgtgcctggtctgtattttttctctctcaacgtgcacacatggaaccagaaggagacctacctgcatatcatgaaaaatgaagaggaagtggtcatattgttcgctcaggtaggggacaggtcgatcatgcaaagccaatctctcatgttggagttaagagaacaagatcaagtgtgggtgagactttataagggggaacgcgaaaatgctatcttttcagaggagctcgacacatacataactttttctggctatctcgtcaagcacgccaccgaaccttag

SEQ ID NO: 294256 - DNA, 876 bp, Artificial Sequence
  derived and/or modified sequence
gtgctcagcgcatctggaccaggccgaaaaatggggagcaggggccaaggcttgctactggcttactgtttacttctcgcctttgccagtggactggtgttaagcagagtgccccacgtgcaaggagagcaacaggagtgggagggaacagaagagcttcctagcccacctgatcacgcggagcgcgccgaggaacaacacgagaagtatcgcccttcacaggatcaaggacttccagcctcccgctgtttaagatgctgcgatcccgggacaagcatgtacccggccactgccgtaccacagatcaatataacaatcctaaagggagaaaagggcgatcgaggtgatagaggcttgcagggaaaatacggaaagactggatcagccggcgctcgagggcacacgggccccaaaggacagaagggcagtatgggagcaccaggagagcgctgtaagtcacactacgcagcctttagcgtcggacgaaagaagccaatgcattcgaatcattattaccagaccgtcatattcgacactgagttcgtcaacctctatgatcattttaatatgtttacggggaagttttattgctacgtgccaggcctgtactttttttccctgaatgtacacacatggaatcagaaagagacttatctacatattatgaaaaatgaggaagaagtcgttatactttttgcccaggtgggggaccgctcaataatgcagagccaatcattgatgttagagttaagagagcaagaccaggtttgggtgaggctctacaaaggcgaaagggaaaacgcaatcttttctgaagaactcgacacttatatcacattttccggctacctggtgaaacatgccacggagccatag

SEQ ID NO: 294257 - DNA, 876 bp, Artificial Sequence
  derived and/or modified sequence
atgatgagcgccaccggccccggcagaaagatgggcagcagaggccagggcctgctgctggcctactgcctgctgctggccttcgccagcggcctggtgctgagcagagtgccccacgtgcagggcgagcagcaggagtgggagggcaccgaggagctgcccagcccccccgaccacgccgagagagccgaggagcagcacgagaagtacagacccagccaggaccagggcctgcccgccagcagatgcctgagatgctgcgaccccggcaccagcatgtaccccgccaccgccgtgccccagatcaacatcaccatcctgaagggcgagaagggcgacagaggcgacagaggcctgcagggcaagtacggcaagaccggcagcgccggcgccagaggccacaccggccccaagggccagaagggcagcatgggcgcccccggcgagagatgcaagagccactacgccgccttcagcgtgggcagaaagaagcccatgcacagcaaccactactaccagaccgtgatcttcgacaccgagttcgtgaacctgtacgaccacttcaacatgttcaccggcaagttctactgctacgtgcccggcctgtacttcttcagcctgaacgtgcacacctggaaccagaaggagacctacctgcacatcatgaagaacgaggaggaggtggtgatcctgttcgcccaggtgggcgacagaagcatcatgcagagccagagcctgatgctggagctgagagagcaggaccaggtgtgggtgagactgtacaagggcgagagagagaacgccatcttcagcgaggagctggacacctacatcaccttcagcggctacctggtgaagcacgccaccgagccctag

SEQ ID NO: 294258 - DNA, 876 bp, Artificial Sequence
  derived and/or modified sequence
gtgctgagcgccagcggccccggcagaaagatgggcagcagaggccagggcctgctgctggcctactgcctgctgctggccttcgccagcggcctggtgctgagcagagtgccccacgtgcagggcgagcagcaggagtgggagggcaccgaggagctgcccagcccccccgaccacgccgagagagccgaggagcagcacgagaagtacagacccagccaggaccagggcctgcccgccagcagatgcctgagatgctgcgaccccggcaccagcatgtaccccgccaccgccgtgccccagatcaacatcaccatcctgaagggcgagaagggcgacagaggcgacagaggcctgcagggcaagtacggcaagaccggcagcgccggcgccagaggccacaccggccccaagggccagaagggcagcatgggcgcccccggcgagagatgcaagagccactacgccgccttcagcgtgggcagaaagaagcccatgcacagcaaccactactaccagaccgtgatcttcgacaccgagttcgtgaacctgtacgaccacttcaacatgttcaccggcaagttctactgctacgtgcccggcctgtacttcttcagcctgaacgtgcacacctggaaccagaaggagacctacctgcacatcatgaagaacgaggaggaggtggtgatcctgttcgcccaggtgggcgacagaagcatcatgcagagccagagcctgatgctggagctgagagagcaggaccaggtgtgggtgagactgtacaagggcgagagagagaacgccatcttcagcgaggagctggacacctacatcaccttcagcggctacctggtgaagcacgccaccgagccctag

SEQ ID NO: 294259 - DNA, 2885 bp, Artificial Sequence
  derived and/or modified sequence
acatctggctgggcttcgctccttgcgcgtctgtcccactttctccctctcttcctttactttcgagaaaccgcgcttccgcttctggtcgcagagacctcggagaccgcgccggggagacggaggtgctgtgggtgggggggacctgtggctgctcgtaccgccccccaccctcctcttctgcactgccgtcctccggaagaccttttcccctgctctgtttccttcaccgagtctgtgcatcgccccggacctggccgggaggaggcttggccggcgggagatgctctacgggcggcgcgggaggagcggccggcgggacggagggcccggcaggaagatgggctcccgtggacagggactcttgctggcgtactgcctgctccttgcctttgcctctggcctggtcctgagtcgtgtgccccatgtccagggggaacagcaggagtgggaggggactgaggagctgccgtcgcctccggaccatgccgagagggctgaagaacaacatgaaaaatacaggcccagtcaggaccaggggctccctgcttcccggtgcttgcgctgctgtgaccccggtacctccatgtacccggcgaccgccgtgccccagatcaacatcactatcttgaaaggggagaagggtgaccgcggagatcgaggcctccaagggaaatatggcaaaacaggctcagcaggggccaggggccacactggacccaaagggcagaagggctccatgggggcccctggggagcggtgcaagagccactacgccgccttttcggtgggccggaagaagcccatgcacagcaaccactactaccagacggtgatcttcgacacggagttcgtgaacctctacgaccacttcaacatgttcaccggcaagttctactgctacgtgcccggcctctacttcttcagcctcaacgtgcacacctggaaccagaaggagacctacctgcacatcatgaagaacgaggaggaggtggtgatcttgttcgcgcaggtgggcgaccgcagcatcatgcaaagccagagcctgatgctggagctgcgagagcaggaccaggtgtgggtacgcctctacaagggcgaacgtgagaacgccatcttcagcgaggagctggacacctacatcaccttcagtggctacctggtcaagcacgccaccgagccctagctggccggccacctcctttcctctcgccaccttccacccctgcgctgtgctgaccccaccgcctcttccccgatccctggactccgactccctggctttggcattcagtgagacgccctgcacacacagaaagccaaagcgatcggtgctcccagatcccgcagcctctggagagagctgacggcagatgaaatcaccagggcggggcacccgcgagaaccctctgggaccttccgcggccctctctgcacacatcctcaagtgaccccgcacggcgagacgcgggtggcggcagggcgtcccagggtgcggcaccgcggctccagtccttggaaataattaggcaaattctaaaggtctcaaaaggagcaaagtaaaccgtggaggacaaagaaaagggttgttatttttgtctttccagccagcctgctggctcccaagagagaggccttttcagttgagactctgcttaagagaagatccaaagttaaagctctggggtcaggggaggggccgggggcaggaaactacctctggcttaattcttttaagccacgtaggaactttcttgagggataggtggaccctgacatccctgtggccttgcccaagggctctgctggtctttctgagtcacagctgcgaggtgatgggggctggggccccaggcgtcagcctcccagagggacagctgagccccctgccttggctccaggttggtagaagcagccgaagggctcctgacagtggccagggacccctgggtcccccaggcctgcagatgtttctatgaggggcagagctcctggtacatccatgtgtggctctgctccacccctgtgccaccccagagccctggggggtggtctccatgcctgccaccctggcatcggctttctgtgccgcctcccacacaaatcagccccagaaggccccggggccttggcttctgttttttataaaacacctcaagcagcactgcagtctcccatctcctcgtgggctaagcatcaccgcttccacgtgtgttgtgttggttggcagcaaggctgatccagaccccttctgcccccactgccctcatccaggcctctgaccagtagcctgagaggggctttttctaggcttcagagcaggggagagctggaaggggctagaaagctcccgcttgtctgtttctcaggctcctgtgagcctcagtcctgagaccagagtcaagaggaagtacacgtcccaatcacccgtgtcaggattcactctcaggagctgggtggcaggagaggcaatagcccctgtggcaattgcaggaccagctggagcagggttgcggtgtctccacggtgctctcgccctgcccatggccaccccagactctgatctccaggaaccccatagcccctctccacctcaccccatgttgatgcccagggtcactcttgctacccgctgggcccccaaacccccgctgcctctcttccttccccccatcccccacctggttttgactaatcctgcttccctctctgggcctggctgccgggatctggggtccctaagtccctctctttaaagaacttctgcgggtcagactctgaagccgagttgctgtgggcgtgcccggaagcagagcgccacactcgctgcttaagctcccccagctctttccagaaaacattaaactcagaattgtgttttcagc

SEQ ID NO: 294260 - DNA, 876 bp, Artificial Sequence
  derived and/or modified sequence
atgatgagcgctaccggacctggccgcaaaatgggcagtaggggtcagggcctgctgcttgcttactgtcttctcttggcttttgcatccggcttggtactttcgcgggtgccgcacgtgcagggcgaacaacaggagtgggaagggacagaagagctgccatcgccccccgaccatgccgaacgagccgaggaacagcatgaaaaatataggccaagtcaggaccagggattaccagcctctcggtgcctgcgctgctgcgacccaggcacatctatgtaccccgctaccgccgtaccccagattaacatcacgattctaaagggggagaaaggtgacaggggagacagaggactccagggaaaatatgggaagacaggatctgccggagccagaggccatacaggtccaaagggacaaaaagggtctatgggagcccctggtgagagatgcaaatcccactatgccgccttctcagtgggcaggaagaaaccaatgcactccaaccactattatcagacagtgatattcgacactgaattcgttaacttgtacgaccattttaatatgttcaccggtaaattctattgttacgtgcctggcctttactttttcagtctgaatgttcacacctggaaccagaaggagacctacttgcatatcatgaagaatgaagaggaggtggtgatcctgttcgcacaggtgggcgatcgatctattatgcagagccagtctttgatgctggaactgagggaacaggaccaggtgtgggtgagactttacaagggagagcgcgagaacgcaatcttctccgaagaactggatacctatatcacattctctggctacttagtgaagcatgcaacggagccttag

SEQ ID NO: 294261 - DNA, 876 bp, Artificial Sequence
  derived and/or modified sequence
gtgttgtcggcttcaggcccggggagaaagatggggtcccggggtcagggcctgctgttggcctattgccttcttttagccttcgcatccggacttgtgttaagtagagtgccgcacgtacagggcgagcagcaggaatgggaggggacagaggagctaccgtccccccctgaccacgccgagcgggctgaagagcagcatgagaaataccgcccaagccaggatcagggattaccagcatcacggtgtctgagatgttgtgaccccggaacttcaatgtatccagccactgctgtgcctcagattaatatcacaatactgaaaggcgaaaaaggagacaggggggaccgtggtttgcagggaaagtatggaaaaacaggctctgccggcgcccgtggacacaccggacccaagggccaaaaaggctcgatgggggcccccggcgaaaggtgcaagagtcactatgccgctttctctgtgggccgaaagaaaccaatgcattcaaaccactattaccagaccgtcatctttgacacagaattcgtgaacctctacgaccatttcaatatgttcaccggaaagttctactgctatgtccctggtctgtattttttttcgctcaacgttcatacttggaaccaaaaggaaacatatctgcatatcatgaagaatgaagaggaggtggttatcctgtttgctcaagtgggcgacagatccataatgcagtcacagtcactgatgctggaattaagggaacaggaccaggtgtgggtgagactctataaaggtgagagagaaaacgctatattctctgaggagctcgacacgtacattaccttcagtgggtacctcgtcaaacatgcaacagagccctag

SEQ ID NO: 294262 - DNA, 876 bp, Artificial Sequence
  derived and/or modified sequence
atgatgtctgccactggacctggcaggaagatgggcagccggggccagggcctgctgctggcctactgcctgctgctggcctttgccagcggcctggtgctgagccgggtgccccacgtgcagggcgagcagcaggagtgggagggcacagaggagctgcccagccccccagaccacgccgagagagctgaggagcagcacgagaagtaccggcccagccaggaccagggcctgcctgccagccgctgcctgcgctgctgtgaccccggcacctccatgtacccagccacagctgtgccccagatcaacatcaccatcctgaagggggagaagggggacagaggagaccggggcctgcagggcaagtatggcaagacaggcagcgctggggcccggggccacacaggccccaagggccagaagggctccatgggcgcccctggagagcgctgcaagagccactacgccgccttctctgtgggcaggaagaagcccatgcacagcaaccactactaccagaccgtcatctttgacacagaatttgtgaacctgtatgaccacttcaacatgttcaccgggaagttctactgctacgtgcccggcctgtacttcttcagcctgaatgtgcacacctggaaccagaaggagacctacctgcacatcatgaagaatgaggaggaggtggtgatcctgtttgcccaggtgggggacaggagcatcatgcagagccagagcctgatgctggagctgcgggagcaggaccaggtgtgggtgcggctgtacaagggggagcgggagaatgccatcttcagcgaggagctggacacctacatcaccttcagcggctacctggtgaagcacgccacagagccctag

SEQ ID NO: 294263 - DNA, 876 bp, Artificial Sequence
  derived and/or modified sequence
gtgctgagcgccagcggccctggcaggaagatgggcagccggggccagggcctgctgctggcctactgcctgctgctggcctttgccagcggcctggtgctgagccgggtgccccacgtgcagggcgagcagcaggagtgggagggcacagaggagctgcccagccccccagaccacgccgagagagctgaggagcagcacgagaagtaccggcccagccaggaccagggcctgcctgccagccgctgcctgcgctgctgtgaccccggcacctccatgtacccagccacagctgtgccccagatcaacatcaccatcctgaagggggagaagggggacagaggagaccggggcctgcagggcaagtatggcaagacaggcagcgctggggcccggggccacacaggccccaagggccagaagggctccatgggcgcccctggagagcgctgcaagagccactacgccgccttctctgtgggcaggaagaagcccatgcacagcaaccactactaccagaccgtcatctttgacacagaatttgtgaacctgtatgaccacttcaacatgttcaccgggaagttctactgctacgtgcccggcctgtacttcttcagcctgaatgtgcacacctggaaccagaaggagacctacctgcacatcatgaagaatgaggaggaggtggtgatcctgtttgcccaggtgggggacaggagcatcatgcagagccagagcctgatgctggagctgcgggagcaggaccaggtgtgggtgcggctgtacaagggggagcgggagaatgccatcttcagcgaggagctggacacctacatcaccttcagcggctacctggtgaagcacgccacagagccctag

SEQ ID NO: 294264 - DNA, 876 bp, Artificial Sequence
  derived and/or modified sequence
atgatgagcgccaccggccccggccggaagatgggcagccggggccagggcctgctgttggcctactgtttactcctcgcttttgcatctggcctagtcttaagccgcgtgccccacgtccagggcgagcagcaggagtgggagggcacggaagagttgccctctccaccagatcacgcggaacgagccgaagaacaacatgaaaaatatagacctagccaagatcaggggctcccagcatcacgttgcctgcggtgttgtgacccaggcacatccatgtaccctgctaccgcagtgccccagattaatattacgatcctgaagggagaaaaaggcgacaggggtgaccggggactgcaggggaagtacgggaagaccggatccgctggtgcacggggccatacggggcccaagggtcagaaggggtcaatgggcgcacctggagagcgatgcaagtcacattatgctgccttcagcgtcggcaggaaaaaaccaatgcacagtaaccactactatcagactgtcattttcgatacagaattcgtcaatctgtacgaccacttcaacatgttcacaggtaaattttattgctacgtacccggcctgtattttttctcactgaacgtccacacctggaaccaaaaagagacctacctacacatcatgaagaatgaagaggaagttgttatcttatttgcacaggtgggcgatcgttccataatgcaaagccagtcactgatgctggagctgcgggagcaggaccaggtgtgggtccggctatacaaaggggagcgagaaaacgctatctttagcgaggaactggacacgtatattaccttcagtggatacctagtcaaacacgctacagagccatag

SEQ ID NO: 294265 - DNA, 876 bp, Artificial Sequence
  derived and/or modified sequence
gtgctgagcgccagcggccccggccggaagatgggcagccggggccaaggcctgctgctcgcctactgcctgcttcttgccttcgcatccggcctagtgctatctcgggtcccgcacgtgcagggggagcagcaggaatgggaaggaacagaggagctccctagccccccagaccatgccgaacgcgccgaagaacagcacgaaaagtataggcccagccaagatcaggggttgcccgcatcccggtgccttcgctgttgtgatcctgggacgagtatgtatcctgccaccgctgtcccccagataaacataaccatcttgaagggagagaagggcgataggggcgatagaggcctacaggggaaatacggaaaaactgggagcgctggcgctcggggacacactggcccaaaaggacaaaaagggagtatgggcgccccgggcgagcgttgtaaaagccactacgccgctttctctgtgggaagaaagaagcctatgcacagtaatcactattaccagacagtgatattcgatacagagttcgtaaacctctacgaccatttcaacatgttcacgggaaagttctattgttatgtgcccggcctctacttcttctcactgaacgtccacacatggaatcagaaggaaacttatctccacatcatgaagaacgaggaggaggtcgtcatcctgtttgctcaggttggcgatcgatcaatcatgcagagccagtctctcatgcttgagcttcgtgagcaggaccaggtctgggttcgactgtacaagggagaacgtgaaaacgcaatcttttcagaagaacttgatacctatatcacgttcagcggatatctagtgaaacacgctaccgagccctag

SEQ ID NO: 294266 - DNA, 2704 bp, Artificial Sequence
  derived and/or modified sequence
ctttgtttccactgggacggaatcggagctctggaggctgggctggccaagcgccccgaaggcccgatgcctgacggctcatgcggcctccttgtttgcagggcctgggcaaaaatttacactgagtcccactcttcgctccagggcccggcaggaagatgggctcccgtggacagggactcttgctggcgtactgcctgctccttgcctttgcctctggcctggtcctgagtcgtgtgccccatgtccagggggaacagcaggagtgggaggggactgaggagctgccgtcgcctccggaccatgccgagagggctgaagaacaacatgaaaaatacaggcccagtcaggaccaggggctccctgcttcccggtgcttgcgctgctgtgaccccggtacctccatgtacccggcgaccgccgtgccccagatcaacatcactatcttgaaaggggagaagggtgaccgcggagatcgaggcctccaagggaaatatggcaaaacaggctcagcaggggccaggggccacactggacccaaagggcagaagggctccatgggggcccctggggagcggtgcaagagccactacgccgccttttcggtgggccggaagaagcccatgcacagcaaccactactaccagacggtgatcttcgacacggagttcgtgaacctctacgaccacttcaacatgttcaccggcaagttctactgctacgtgcccggcctctacttcttcagcctcaacgtgcacacctggaaccagaaggagacctacctgcacatcatgaagaacgaggaggaggtggtgatcttgttcgcgcaggtgggcgaccgcagcatcatgcaaagccagagcctgatgctggagctgcgagagcaggaccaggtgtgggtacgcctctacaagggcgaacgtgagaacgccatcttcagcgaggagctggacacctacatcaccttcagtggctacctggtcaagcacgccaccgagccctagctggccggccacctcctttcctctcgccaccttccacccctgcgctgtgctgaccccaccgcctcttccccgatccctggactccgactccctggctttggcattcagtgagacgccctgcacacacagaaagccaaagcgatcggtgctcccagatcccgcagcctctggagagagctgacggcagatgaaatcaccagggcggggcacccgcgagaaccctctgggaccttccgcggccctctctgcacacatcctcaagtgaccccgcacggcgagacgcgggtggcggcagggcgtcccagggtgcggcaccgcggctccagtccttggaaataattaggcaaattctaaaggtctcaaaaggagcaaagtaaaccgtggaggacaaagaaaagggttgttatttttgtctttccagccagcctgctggctcccaagagagaggccttttcagttgagactctgcttaagagaagatccaaagttaaagctctggggtcaggggaggggccgggggcaggaaactacctctggcttaattcttttaagccacgtaggaactttcttgagggataggtggaccctgacatccctgtggccttgcccaagggctctgctggtctttctgagtcacagctgcgaggtgatgggggctggggccccaggcgtcagcctcccagagggacagctgagccccctgccttggctccaggttggtagaagcagccgaagggctcctgacagtggccagggacccctgggtcccccaggcctgcagatgtttctatgaggggcagagctcctggtacatccatgtgtggctctgctccacccctgtgccaccccagagccctggggggtggtctccatgcctgccaccctggcatcggctttctgtgccgcctcccacacaaatcagccccagaaggccccggggccttggcttctgttttttataaaacacctcaagcagcactgcagtctcccatctcctcgtgggctaagcatcaccgcttccacgtgtgttgtgttggttggcagcaaggctgatccagaccccttctgcccccactgccctcatccaggcctctgaccagtagcctgagaggggctttttctaggcttcagagcaggggagagctggaaggggctagaaagctcccgcttgtctgtttctcaggctcctgtgagcctcagtcctgagaccagagtcaagaggaagtacacgtcccaatcacccgtgtcaggattcactctcaggagctgggtggcaggagaggcaatagcccctgtggcaattgcaggaccagctggagcagggttgcggtgtctccacggtgctctcgccctgcccatggccaccccagactctgatctccaggaaccccatagcccctctccacctcaccccatgttgatgcccagggtcactcttgctacccgctgggcccccaaacccccgctgcctctcttccttccccccatcccccacctggttttgactaatcctgcttccctctctgggcctggctgccgggatctggggtccctaagtccctctctttaaagaacttctgcgggtcagactctgaagccgagttgctgtgggcgtgcccggaagcagagcgccacactcgctgcttaagctcccccagctctttccagaaaacattaaactcagaattgtgttttcagca

SEQ ID NO: 294267 - DNA, 2575 bp, Artificial Sequence
  derived and/or modified sequence
gtgttgagtgcatcagggcccggcaggaagatgggctcccgtggacagggactcttgctggcgtactgcctgctccttgcctttgcctctggcctggtcctgagtcgtgtgccccatgtccagggggaacagcaggagtgggaggggactgaggagctgccgtcgcctccggaccatgccgagagggctgaagaacaacatgaaaaatacaggcccagtcaggaccaggggctccctgcttcccggtgcttgcgctgctgtgaccccggtacctccatgtacccggcgaccgccgtgccccagatcaacatcactatcttgaaaggggagaagggtgaccgcggagatcgaggcctccaagggaaatatggcaaaacaggctcagcaggggccaggggccacactggacccaaagggcagaagggctccatgggggcccctggggagcggtgcaagagccactacgccgccttttcggtgggccggaagaagcccatgcacagcaaccactactaccagacggtgatcttcgacacggagttcgtgaacctctacgaccacttcaacatgttcaccggcaagttctactgctacgtgcccggcctctacttcttcagcctcaacgtgcacacctggaaccagaaggagacctacctgcacatcatgaagaacgaggaggaggtggtgatcttgttcgcgcaggtgggcgaccgcagcatcatgcaaagccagagcctgatgctggagctgcgagagcaggaccaggtgtgggtacgcctctacaagggcgaacgtgagaacgccatcttcagcgaggagctggacacctacatcaccttcagtggctacctggtcaagcacgccaccgagccctagctggccggccacctcctttcctctcgccaccttccacccctgcgctgtgctgaccccaccgcctcttccccgatccctggactccgactccctggctttggcattcagtgagacgccctgcacacacagaaagccaaagcgatcggtgctcccagatcccgcagcctctggagagagctgacggcagatgaaatcaccagggcggggcacccgcgagaaccctctgggaccttccgcggccctctctgcacacatcctcaagtgaccccgcacggcgagacgcgggtggcggcagggcgtcccagggtgcggcaccgcggctccagtccttggaaataattaggcaaattctaaaggtctcaaaaggagcaaagtaaaccgtggaggacaaagaaaagggttgttatttttgtctttccagccagcctgctggctcccaagagagaggccttttcagttgagactctgcttaagagaagatccaaagttaaagctctggggtcaggggaggggccgggggcaggaaactacctctggcttaattcttttaagccacgtaggaactttcttgagggataggtggaccctgacatccctgtggccttgcccaagggctctgctggtctttctgagtcacagctgcgaggtgatgggggctggggccccaggcgtcagcctcccagagggacagctgagccccctgccttggctccaggttggtagaagcagccgaagggctcctgacagtggccagggacccctgggtcccccaggcctgcagatgtttctatgaggggcagagctcctggtacatccatgtgtggctctgctccacccctgtgccaccccagagccctggggggtggtctccatgcctgccaccctggcatcggctttctgtgccgcctcccacacaaatcagccccagaaggccccggggccttggcttctgttttttataaaacacctcaagcagcactgcagtctcccatctcctcgtgggctaagcatcaccgcttccacgtgtgttgtgttggttggcagcaaggctgatccagaccccttctgcccccactgccctcatccaggcctctgaccagtagcctgagaggggctttttctaggcttcagagcaggggagagctggaaggggctagaaagctcccgcttgtctgtttctcaggctcctgtgagcctcagtcctgagaccagagtcaagaggaagtacacgtcccaatcacccgtgtcaggattcactctcaggagctgggtggcaggagaggcaatagcccctgtggcaattgcaggaccagctggagcagggttgcggtgtctccacggtgctctcgccctgcccatggccaccccagactctgatctccaggaaccccatagcccctctccacctcaccccatgttgatgcccagggtcactcttgctacccgctgggcccccaaacccccgctgcctctcttccttccccccatcccccacctggttttgactaatcctgcttccctctctgggcctggctgccgggatctggggtccctaagtccctctctttaaagaacttctgcgggtcagactctgaagccgagttgctgtgggcgtgcccggaagcagagcgccacactcgctgcttaagctcccccagctctttccagaaaacattaaactcagaattgtgttttcagc

SEQ ID NO: 294268 - RNA, 876 nt, Artificial Sequence
  derived and/or modified sequence
augaugucagccacugggccgggaagaaagaugggauccagaggccaagggcuucuucuggcuuauugccuccuuuuagccuuugccaguggccucgugcugagccgugucccgcacgugcaaggugagcagcaagagugggaagggacagaggaauuaccaucgccuccugaccacgccgagagggcagaagaacagcaugagaaauaccgaccaucacaggaccagggauugccagcuagccguuguuuaagaugcugugauccgggcacgucaauguacccagccaccgccgucccccaaaucaauaucaccauacucaagggcgagaagggagaucgaggcgacaggggccuacagggcaaguacggcaagaccggauccgccggggccagaggccacacuggacccaagggucagaaaggaagcaugggcgcaccuggcgaaaggugcaagucccacuaugcagccuucucagucggacggaaaaagccaaugcauuccaaccauuacuaucagacggucaucuucgauaccgaauucgucaaucuauaugaccauuucaacauguuuacuggaaaauucuauugcuauguaccugggcuguauuucuuuucauugaacguucacacauggaaccagaaggagacguaucuccauaucaugaaaaacgaagaggaggucguaauauuguuugcacaggugggagacaggaguauaaugcagucucagucccugauguuggagcuaagagagcaggaccagguguggguucgauuauacaagggggagagagagaaugccaucuucagugaagaacuggauacguauaucacuuuuagcggguaucucgucaagcacgcaaccgaaccuuag

SEQ ID NO: 294269 - RNA, 876 nt, Artificial Sequence
  derived and/or modified sequence
guucucagcgccucaggaccuggaagaaaaaugggaagccgaggucaggggcucuugcuggcauauugucugcuccuugccuucgcuucaggccugguacucagcagagugccacacguccagggugagcaacaggaaugggaaggaaccgaggagcuaccaucuccaccagaccacgcugagagagcagaagagcagcacgagaaguaucgaccaucccaggaccaagguuugccagccucuagaugccugcggugcugcgaucccggaaccucgauguauccagcuacggccguaccccagaucaacauuacuauucuaaagggagaaaagggggauaggggcgaucgaggguuacaagguaaguaugggaaaacuggcagugccggagccagaggccauacgggcccaaagggacaaaaagguucaaugggggcgccuggcgaacgaugcaagagucacuaugcagccuuuagcgugggacgcaaaaagccuaugcauucuaaucacuacuaucagaccgucaucuucgauacugaguuugucaaucuguaugaucacuucaauauguucaccgggaaauucuacugcuaugugcccggccuguacuuuuuuucccugaauguacacacauggaaucagaaagagacuuaucuacauauuaugaaaaaugaggaagaagucguuauacuuuuugcccaggugggggaccgcucaauaaugcagagccaaucauugauguuagaguuaagagagcaagaccagguuugggugaggcucuacaaaggcgaaagggaaaacgcaaucuuuucugaagaacucgacacuuauaucacauuuuccggcuaccuggugaaacaugccacggagccauag

SEQ ID NO: 294270 - RNA, 876 nt, Artificial Sequence
  derived and/or modified sequence
augaugucagccacugggccgggaagaaagaugggauccagaggccaagggcuucuucuggcuuauugccuccuuuuagccuuugccaguggccucgugcugagccgugucccgcacgugcaaggugagcagcaagagugggaagggacagaggaauuaccaucgccuccugaccacgccgagagggcagaagaacagcaugagaaauaccgaccaucacaggaccagggauugccagcuagccguuguuuaagaugcugugauccgggcacgucaauguacccagccaccgccgucccccagauuaacauuaccauccuuaagggagagaagggagauaggggcgaccggggacugcaaggcaaguacggcaaaacgggaucagccggcgccagaggccacacaggaccaaagggacagaagggcagcaugggagcacccggagaaaggugcaaaucucauuacgccgcauuuagugucggccggaaaaaaccuaugcacagcaaccauuauuaccaaacugugaucuuugacaccgaguucguuaaccuguacgaccacuuuaacauguuuacaggaaaauucuacugcuaugugccuggucuguauuuuuucucucucaacgugcacacauggaaccagaaggagaccuaccugcauaucaugaaaaaugaagaggaaguggucauauuguucgcucagguaggggacaggucgaucaugcaaagccaaucucucauguuggaguuaagagaacaagaucaagugugggugagacuuuauaagggggaacgcgaaaaugcuaucuuuucagaggagcucgacacauacauaacuuuuucuggcuaucucgucaagcacgccaccgaaccuuag

SEQ ID NO: 294271 - RNA, 876 nt, Artificial Sequence
  derived and/or modified sequence
gugcucagcgcaucuggaccaggccgaaaaauggggagcaggggccaaggcuugcuacuggcuuacuguuuacuucucgccuuugccaguggacugguguuaagcagagugccccacgugcaaggagagcaacaggagugggagggaacagaagagcuuccuagcccaccugaucacgcggagcgcgccgaggaacaacacgagaaguaucgcccuucacaggaucaaggacuuccagccucccgcuguuuaagaugcugcgaucccgggacaagcauguacccggccacugccguaccacagaucaauauaacaauccuaaagggagaaaagggcgaucgaggugauagaggcuugcagggaaaauacggaaagacuggaucagccggcgcucgagggcacacgggccccaaaggacagaagggcaguaugggagcaccaggagagcgcuguaagucacacuacgcagccuuuagcgucggacgaaagaagccaaugcauucgaaucauuauuaccagaccgucauauucgacacugaguucgucaaccucuaugaucauuuuaauauguuuacggggaaguuuuauugcuacgugccaggccuguacuuuuuuucccugaauguacacacauggaaucagaaagagacuuaucuacauauuaugaaaaaugaggaagaagucguuauacuuuuugcccaggugggggaccgcucaauaaugcagagccaaucauugauguuagaguuaagagagcaagaccagguuugggugaggcucuacaaaggcgaaagggaaaacgcaaucuuuucugaagaacucgacacuuauaucacauuuuccggcuaccuggugaaacaugccacggagccauag

SEQ ID NO: 294272 - DNA, 1326 bp, Artificial Sequence
  derived and/or modified sequence
atgggcagccaggccagaccccacagcaccctgcagggcttcggctacagcaaggagcacggcagaaccggcagcgccggcgaggccttcctgagcaccatccagaaggccgccgaggtggtggccagcgccatgagacccggccccgagagccccagcaccagaagactgctgcccagaggcgacacctaccagcccgccatgatgcccagcgccagccacggcccccccaccctgggcaacctgctgcccggcgccatccccggccccagagccgtgagacaccagcccggccaggccggcggcggctgggacgagctggacagcggccccagcagccagaacagcagccagaacagcgacctgagcagagtgagcgacagcggcagccacagcggcagcgacagccacagcggcgccagcagagagcccggcgacctggccgagagagtggaggtggtggccctgagcgactgccagcaggagctgagcctggtgagaaccgtgaccagaggccccagagccttcctgagcagagaggaggcccagcacttcatcaaggcctgcggcctgctgaactgcgaggccgtgctgcagctgctgacctgccacctgagaggcaccagcgagtgcacccagctgagagccctgtgcgccatcgccagcctgggcagcagcgacctgctgccccaggagcacatcctgctgagaaccagaccctggctgcaggagctgagcatgggcagccccggccccgtgaccaacaaggccaccaagatcctgagacacttcgaggccagctgcggccagctgagccccgccagaggcaccagcgccgagcccggccccaccgccgccctgcccggccccagcgacctgctgaccgacgccgtgcccctgcccggcagccaggtgttcctgcagcccctgagcagcacccccgtgagcagcagaagccccgcccccagcagcggcatgcccagcagccccgtgcccacccccccccccgacgccagccccatccccgcccccggcgaccccagcgaggccgaggccagactggccgagagcagaagatggagacccgagagaatccccggcggcaccgacagccccaagagaggccccagcagctgcgcctggagcagagacagcctgttcgccggcatggagctggtggcctgccccagactggtgggcgccggcgccgccgccggcgagagctgccccgacgcccccagagccccccagaccagcagccagagaaccgccgccaaggagccccccggcagcgagcccagcgccttcgccttcctgaacgcctag

SEQ ID NO: 294273 - DNA, 1326 bp, Artificial Sequence
  derived and/or modified sequence
atgggttcgcaggctcgtccccactctacacttcagggtttcgggtactccaaggagcatgggcggacaggtagtgccggggaggccttcctttctactatccagaaggccgccgaggtggtggcaagcgcgatgcggccagggccggagagccctagtactcgtcgcttgctcccccgcggcgacacctaccagcccgccatgatgccgtccgcgtcacatggtcccccgaccctcggcaatctgctgccaggcgccatacccggcccccgagctgttcggcatcagcctgggcaggccggaggcggatgggacgagctggattccggcccctcgtctcagaacagttcccaaaactctgacctgtctcgtgtctcagactcaggctcacatagtggctcggactcgcacagcggtgcctcccgggaaccaggagacctggccgagcgggtcgaagtagtggcgctgtcagactgccagcaggagctgtccctggtgaggacagtgacacggggacccagggccttcctgagccgcgaagaggcacaacactttatcaaggcctgtggtctcttaaactgtgaagctgtgcttcagctccttacctgtcacctgagaggaacttcagagtgtacccaactgcgggccttgtgcgcgatcgcgtccctggggagcagcgatctactgccacaggagcacatcttgttaagaaccagaccctggctacaagagttgtctatggggagtcctggcccggtgacaaataaggctaccaagattctgaggcacttcgaggcttcctgtggccagctcagcccggcccggggtacgtccgctgagccaggtccaacagccgcactgcccggcccttccgacctgcttacagacgcggttcccctgccaggctcccaggtcttcttgcagcccttaagttccactcctgtgagctcaagatcgcctgccccctcttccggaatgcccagtagccctgtacccaccccccccccggatgcttcgccgataccagcccctggggacccaagcgaggctgaagccagattggcagagtcacgtcgttggcgaccggagcgcatccctggcggcaccgatagcccaaagcgcggcccgtcctcttgtgcctggtccagggattccctgttcgctggaatggagctggtggcgtgtcctagactggttggggccggtgcagccgcaggcgaaagttgtcctgacgcgcccagagctccgcagactagctctcagaggacggccgccaaagagccaccaggcagcgagcctagtgctttcgcatttcttaacgcatag

SEQ ID NO: 294274 - DNA, 1326 bp, Artificial Sequence
  derived and/or modified sequence
atgggcagccaggcccggccccacagcaccctgcagggcttcggctacagcaaggagcacggccgcactggatctgctggggaggccttcctgagcaccatccagaaggctgctgaggtggtggccagcgccatgaggcctggccctgagagccccagcacccggcggctgctgcccaggggggacacctaccagcctgccatgatgcccagcgccagccacggcccccccaccctgggcaacctgctgcccggggccatccctggccccagggctgtgcgccaccagcccggccaggccggcggcggctgggatgagctggacagcggccccagcagccagaacagcagccagaacagcgacctgagccgggtgtctgacagcggcagccacagcggcagtgacagccacagcggggccagccgggagcccggggacctggccgagcgggtggaggtggtggccctgagtgactgccagcaggagctgagcctggtgaggacagtgacccggggcccccgggccttcctgagccgggaggaggcccagcacttcatcaaggcctgtggcctgctgaactgtgaggccgtgctgcagctgctgacctgccacctgcggggcaccagcgagtgcacccagctgcgggccctgtgtgccatcgccagcctgggcagcagtgacctgctgccccaggagcacatcctgctgcggacccggccctggctgcaggagctgtccatgggcagccctggccctgtgaccaacaaggccaccaagatcctgcggcactttgaggccagctgtggccagctgagccctgcccggggcaccagcgctgagcccggccccacagctgccctgcccggccccagcgacctgctgacagatgctgtgcccctgcccggcagccaggtgttcctgcagcccctgagcagcacccctgtgagcagccgcagccctgcccccagcagcggcatgcccagcagccctgtgcccaccccacctccagatgccagccccatcccagcccctggggaccccagcgaggccgaggcccggctggccgagagccgccgctggaggcctgagcgcatccctgggggcacagacagccccaagaggggccccagcagctgtgcctggagccgggacagcctgtttgctggcatggagctggtggcctgcccccggctggtgggcgctggagctgctgctggggagagctgcccagatgccccccgggccccccagaccagcagccagaggacagctgccaaggagcccccaggcagcgagcccagcgcctttgccttcctgaatgcctag

SEQ ID NO: 294275 - DNA, 1326 bp, Artificial Sequence
  derived and/or modified sequence
atgggcagccaggcccggccccacagcaccctgcagggcttcggctactccaaggaacacggacggaccggttcagctggagaagcgtttctgagcacaatccagaaagctgctgaggtcgtcgcgtctgctatgcgacccggacctgaatcccctagtactcggagattgcttccacggggagacacctaccagcccgcaatgatgccgagcgcctctcacggtcctccaaccctaggaaatttgctgcccggtgccatcccgggaccgcgagccgtgcgccatcaacctggacaggcaggtggcgggtgggatgagctggattctggccccagcagccaaaattcatcccagaattcggacctgtcccgggtttcagacagcggaagtcactctggatctgacagtcactccggggcctcccgtgaacccggagacctggctgagcgtgtggaagtcgtggcactgagtgactgccagcaggaattgagtctggtgcggactgtgaccagaggcccccgggcgtttctgtctcgtgaggaggcacagcacttcatcaaggcatgcggcctgctgaactgcgaagctgtacttcagcttttaacctgtcatctcaggggaacatcagagtgcacacagctgagagccctttgtgcaatcgcctctctgggcagctcagacctactgccgcaggagcacatcttgctacgaacacgcccgtggctgcaagagttgtctatgggcagccctggaccggtgacaaacaaggctactaagattttgcgccactttgaggcatcttgtggtcagctgtcacctgctcgcggcaccagcgccgaacctggacctacagcagcactgccaggccctagcgatctgctcacggacgcggtccccctgccaggatcccaagtttttcttcagccccttagttcaacgcccgtgtcatcccggtcacctgcaccctcatcgggcatgccctcgagcccagtgcccaccccgccccccgatgccagtcccattcctgcccctggtgacccatcggaggccgaggcacgcctggctgagtccaggagatggagacccgaacgcatccctgggggaacagactctcccaaacgcggaccatcgagctgtgcttggtctcgggattccctgtttgcaggtatggaattggtcgcttgcccacgactggttggcgcgggcgcagcagcaggcgaatcatgtccagacgcaccaagagccccccagacaagttcacagaggaccgctgctaaagagcccccggggtcagagccatcagcttttgctttcctgaatgcttag

SEQ ID NO: 294276 - DNA, 1326 bp, Artificial Sequence
  derived and/or modified sequence
atgggctcacaggctcggcctcattccactctgcagggcttcggatacagcaaggagcatggtcgcaccgggtctgctggtgaggcatttttatcgacgattcagaaagcggcagaagtcgtcgcctccgcaatgcgcccagggccagaaagcccttccactcgaaggctgctgccgaggggagacacataccaacctgctatgatgccttccgcctcccatggccctcctacgcttggcaacttattacctggagcgatccctggtcccagagcagtgcgacaccaacccggacaagcaggaggcggttgggatgaactcgactccggccctagctcccagaacagttcccaaaatagtgacctgtccagagtctctgattcaggatctcattcagggtccgactcccactcgggggcaagcagagagcctggagaccttgccgaaagggtagaagtagtggctcttagcgattgccagcaagaactttccctcgtccggaccgtgacccgaggcccaagagcatttttatcgcgagaagaagcccagcattttattaaggcgtgtggattgctgaactgcgaagcagtcctgcagctgctgacatgccacctcagaggcacaagcgagtgcactcaactacgagcattatgcgccattgctagcctgggctcttccgacctcctcccacaggaacatatacttttgaggacccgcccatggttgcaggagttatctatgggaagcccgggacccgtgactaataaagctacaaagattttgcggcactttgaggccagctgtggccagcttagccccgctcgaggcacctctgctgaaccaggaccaactgccgcactgcctgggccttccgacctcctcactgatgctgtgcctctccctggtagtcaggtcttcctacagccacttagctccacccccgttagctcgagatctcccgctccaagctccggaatgcctagttcaccagtcccaaccccccctcctgatgcttcccctatccctgccccaggagatccatccgaggccgaggccaggcttgcagaatcccgcaggtggaggcccgagcgcatacccggtggcactgactctcccaaacggggaccctcaagctgcgcctggtcacgagactccctgtttgccggaatggaactggtggcgtgtccacgcctggtgggcgctggcgcagccgctggagagagttgtccagatgccccaagggcccctcagacttcatctcaaagaacggccgctaaggagccccctggaagcgagccgtctgccttcgcattcctaaacgcctag

SEQ ID NO: 294277 - DNA, 396 bp, Artificial Sequence
  derived and/or modified sequence
atggattccactcaccctcagcactgtgcctgcaacagccagataagacctaggtgggattgtgttgcccactgtttcctttgggcacccggattaccttcacgcgatgatcctggagccgacaagggagaggcctccgggggtgtcggaaccgtgagcttgactctgtctcagcctcgggaacgctctttgcaggtgaaaaaagttttcgtcaaaggcatgaagaaggagcgggcactgggggaaggagccgcatggtggcagagccagcggcttgtatcgcccggaaagcacgaccgcgtttctacccaccgcaaatcacaatctgtatttaccggcgtctctgctggtgacaagcaatttactactacgttctcaatcgtgtttactatctag

SEQ ID NO: 294278 - DNA, 1881 bp, Artificial Sequence
  derived and/or modified sequence
aggactctgctctcctgcggccatgggccagggttgggctactgcaggacttcccagcctcctcttcctgctgctctgctacgggcaccctctgctggtccccagccaggaggcatcccaacagacctggtgactgatgaggctgaggccagcaagtttgtggaggaatatgaccggacatcccaggtggtgtggaacgagtatgccgaggccaactggaactacaacaccaacatcaccacagagaccagcaagattctgctgcagaagaacatgcaaatagccaaccacaccctgaagtacggcacccaggccaggaagtttgatgtgaaccagttgcagaacaccactatcaagcggatcataaagaaggttcaggacctagaacgggcagcactgcctgcccaggagctggaggagtacaacaagatcctgttggatatggaaaccacctacagcgtggccactgtgtgccacccgaatggcagctgcctgcagctcgagccagatctgacgaatgtgatggccacgtcccggaaatatgaagacctgttatgggcatgggagggctggcgagacaaggcggggagagccatcctccagttttacccgaaatacgtggaactcatcaaccaggctgcccggctcaatgggaacatgtgggcgcagacctggtccaacatctatgacttggtggtgcccttcccttcagccccctcgatggacaccacagaggctatgctaaagcagggctggacgcccaggaggatgtttaaggaggctgatgatttcttcacctccctggggctgctgcccgtgcctcctgagttctggaacaagtcgatgctggagaagccaaccgacgggcgggaggtggtctgccacgcctcggcctgggacttctacaacggcaaggacttccggatcaagcagtgcaccaccgtgaacttggaggacctggtggtggcccaccacgaaatgggccacatccagtatttcatgcagtacaaagacttacctgtggccttgagggagggtgccaaccccggcttccatgaggccattggggacgtgctagccctctcagtgtctacgcccaagcacctgcacagtctcaacctgctgagcagtgagggtggcagcgacgagcatgacatcaactttctgatgaagatggcccttgacaagatcgcctttatccccttcagctacctcgtcgatcagtggcgctggagggtatttgatggaagcatcaccaaggagaactataaccaggagtggtggagcctcaggctgaagtaccagggcctctgccccccagtgcccaggactcaaggtgactttgacccaggggccaagttccacattccttctagcgtgccttacatcaggaccgccatgaagctgggcttcagtaggccgtggccggaagccatgcagctgatcacgggccagcccaacatgagcgcctcggccatgttgagctacttcaagccgctgctggactggctccgcacggagaacgagctgcatggggagaagctgggctggccgcagtacaactggacgccgaactccgctcgctcagaagggcccctcccagacagcggccgcgtcagcttcctgggcctggacctggatgcgcagcaggcccgcgtgggccagtggctgctgctcttcctgggcatcgccctgctggtagccaccctgggcctcagccagcggctcttcagcatccgccaccgcagcctccaccggcactcccacgggccccagttcggctccgaggtggagctgagacactcctgaggtgacccggctgggtcggccctgcccaagggcctcccaccagagactgggatgggaacactggtgggcagc

SEQ ID NO: 294279 - protein, 889 aa, Artificial Sequence
  derived and/or modified sequence
MAADVVGDVYVLVEHPFEYTGKDGRRVAIRPNERYRLLRRSTEHWWHVRREPGGRPFYLPAQYVRELPALGNPAAAAPPGPHPSPAAPEPLAYDYRFVSAAATAGPDGAPEESGGRASSLCGPAQRGAATQRSSLAPGLPACLYLRPAAPVRPAQSLNDLACAAVSPPAGLLGSSGSFKACSVAGSWVCPRPLARSDSENVYEVIQDLHVPPPEESAEQVDDPPEPVYANIERQPRATSPGAAAAPLPSPVWETHTDAGTGRPYYYNPDTGVTTWESPFEAAEGAASPATSPASVDSHVSLETEWGQYWDEESRRVFFYNPLTGETAWEDEAENEPEEELEMQPGLSPGSPGDPRPPTPETDYPESLTSYPEEDYSPVGSFGEPGPTSPLTTPPGWSCHVSQDKQMLYTNHFTQEQWVRLEDPHGKPYFYNPEDSSVRWELPQVPVPAPRSIHKSSQDGDTPAQASPPEEKVPAELDEVGSWEEVSPATAAVRTKTLDKAGVLHRTKTADKGKRLRKKHWSASWTVLEGGVLTFFKDSKTSAAGGLRQPSKFSTPEYTVELRGATLSWAPKDKSSRKNVLELRSRDGSEYLIQHDSEAIISTWHKAIAQGIQELSAELPPEESESSRVDFGSSERLGSWQEKEEDARPNAAAPALGPVGLESDLSKVRHKLRKFLQRRPTLQSLREKGYIKDQVFGCALAALCERERSRVPRFVQQCIRAVEARGLDIDGLYRISGNLATIQKLRYKVDHDERLDLDDGRWEDVHVITGALKLFFRELPEPLFPFSHFRQFIAAIKLQDQARRSRCVRDLVRSLPAPNHDTLRMLFQHLCRVIEHGEQNRMSVQSVAIVFGPTLLRPEVEETSMPMTMVFQNQVVELILQQCADIFPPH

SEQ ID NO: 294280 - protein, 862 aa, Artificial Sequence
  derived and/or modified sequence
MAADVVGDVYVLVEHPFEYTGKDGRRVAIRPNERYRLLRRSTEHWWHVRREPGGRPFYLPAQYVRELPALGNPAAAAPPGPHPSPAAPEPLAYDYRFVSAAATAGPDGAPEESGGRASSLCGPAQRGAATQRSSLAPGLPACLYLRPAAPVRPAQSLNDLACAAVSPPAGLLGSSGSFKACSVAGSWVCPRPLARSDSENVYEVIQDLHVPPPEESAEQVDDPPEPVYANIERQPRATSPGAAAAPLPSPVWETHTDAGTGRPYYYNPDTGVTTWESPFEAAEGAASPATSPASVDSHVSLETEWGQYWDEESRRVFFYNPLTGETAWEDEAENEPEEELEMQPGLSPGSPGDPRPPTPETDYPESLTSYPEEDYSPVGSFGEPGPTSPLTTPPGWSCHVSQDKQMLYTNHFTQEQVPVPAPRSIHKSSQDGDTPAQASPPEEKVPAELDEVGSWEEVSPATAAVRTKTLDKAGVLHRTKTADKGKRLRKKHWSASWTVLEGGVLTFFKDSKTSAAGGLRQPSKFSTPEYTVELRGATLSWAPKDKSSRKNVLELRSRDGSEYLIQHDSEAIISTWHKAIAQGIQELSAELPPEESESSRVDFGSSERLGSWQEKEEDARPNAAAPALGPVGLESDLSKVRHKLRKFLQRRPTLQSLREKGYIKDQVFGCALAALCERERSRVPRFVQQCIRAVEARGLDIDGLYRISGNLATIQKLRYKVDHDERLDLDDGRWEDVHVITGALKLFFRELPEPLFPFSHFRQFIAAIKLQDQARRSRCVRDLVRSLPAPNHDTLRMLFQHLCRVIEHGEQNRMSVQSVAIVFGPTLLRPEVEETSMPMTMVFQNQVVELILQQCADIFPPH

SEQ ID NO: 294281 - DNA, 1647 bp, Artificial Sequence
  derived and/or modified sequence
atgcagcccggcctgagccccggcagccccggcgaccccagaccccccacccccgagaccgactaccccgagagcctgaccagctaccccgaggaggactacagccccgtgggcagcttcggcgagcccggccccaccagccccctgaccaccccccccggctggagctgccacgtgagccaggacaagcagatgctgtacaccaaccacttcacccaggagcagtgggtgagactggaggacccccacggcaagccctacttctacaaccccgaggacagcagcgtgagatgggagctgccccaggtgcccgtgcccgcccccagaagcatccacaagagcagccaggacggcgacacccccgcccaggccagcccccccgaggagaaggtgcccgccgagctggacgaggtgggcagctgggaggaggtgagccccgccaccgccgccgtgagaaccaagaccctggacaaggccggcgtgctgcacagaaccaagaccgccgacaagggcaagagactgagaaagaagcactggagcgccagctggaccgtgctggagggcggcgtgctgaccttcttcaaggacagcaagaccagcgccgccggcggcctgagacagcccagcaagttcagcacccccgagtacaccgtggagctgagaggcgccaccctgagctgggcccccaaggacaagagcagcagaaagaacgtgctggagctgagaagcagagacggcagcgagtacctgatccagcacgacagcgaggccatcatcagcacctggcacaaggccatcgcccagggcatccaggagctgagcgccgagctgccccccgaggagagcgagagcagcagagtggacttcggcagcagcgagagactgggcagctggcaggagaaggaggaggacgccagacccaacgccgccgcccccgccctgggccccgtgggcctggagagcgacctgagcaaggtgagacacaagctgagaaagttcctgcagagaagacccaccctgcagagcctgagagagaagggctacatcaaggaccaggtgttcggctgcgccctggccgccctgtgcgagagagagagaagcagagtgcccagattcgtgcagcagtgcatcagagccgtggaggccagaggcctggacatcgacggcctgtacagaatcagcggcaacctggccaccatccagaagctgagatacaaggtggaccacgacgagagactggacctggacgacggcagatgggaggacgtgcacgtgatcaccggcgccctgaagctgttcttcagagagctgcccgagcccctgttccccttcagccacttcagacagttcatcgccgccatcaagctgcaggaccaggccagaagaagcagatgcgtgagagacctggtgagaagcctgcccgcccccaaccacgacaccctgagaatgctgttccagcacctgtgcagagtgatcgagcacggcgagcagaacagaatgagcgtgcagagcgtggccatcgtgttcggccccaccctgctgagacccgaggtggaggagaccagcatgcccatgaccatggtgttccagaaccaggtggtggagctgatcctgcagcagtgcgccgacatcttccccccccactag

SEQ ID NO: 294282 - DNA, 1647 bp, Artificial Sequence
  derived and/or modified sequence
atgcagccagggcttagtcccggcagccccggggatccccgacctcctacccccgagacagattaccccgaatctctgacatcctaccccgaggaagattacagtccggtgggcagtttcggtgagcctggccctacatctccactaactaccccccctgggtggagctgccacgtttcccaggacaaacaaatgttatacacaaatcactttacccaggagcagtgggtgcgcttggaagacccacatggtaagccgtatttttataatccagaggattcttcagttcgatgggaacttccccaggttcctgtgcccgcaccccgcagcattcacaagagttctcaggacggagatactccagctcaggctagtccacccgaggaaaaggtgcccgcggagttggatgaggtaggctcttgggaagaggtatctccggctacagccgctgttcggaccaagacccttgataaggccggagtgctacacaggactaagacagcagacaaggggaagcgcctcagaaaaaagcactggagtgcctcctggactgtgcttgagggaggtgtgctcaccttcttcaaagattcaaagacaagtgccgcgggcgggttgcggcagccctccaaattttctaccccggaatacactgtcgagctccggggcgcgactctttcatgggccccgaaggacaaatcatctaggaagaatgttctcgagcttaggtccagggacgggagtgagtatctcattcagcatgattctgaagctattatcagtacatggcacaaggcaatcgctcagggaatacaggagctcagtgctgaactccctcccgaggaatctgaatcaagccgggttgacttcggaagcagcgaacgactaggtagctggcaggagaaggaagaggacgcacgccctaacgcggccgcccctgctcttggaccagtaggcctcgaatcagacctgtcgaaggtgaggcataaattgagaaaattccttcagagacgtcccacactccagagcctgcgcgagaaagggtacattaaggatcaagtattcggctgcgcactggctgccctgtgtgaacgagagaggtctagagtgccgcggtttgtccagcagtgtatacgggccgtggaggcacgaggcctggatatcgatggcctttataggatttcaggaaaccttgctaccatccaaaaactacggtacaaggtggatcatgacgaacgattggatctcgacgatggacgctgggaagatgtccacgtgataacgggggcgctcaagctgtttttcagagaactgccagagccccttttcccatttagtcacttcagacaatttattgccgcaatcaaactgcaagatcaggcccggaggagcagatgtgtacgcgatcttgttagatcgttaccagcaccaaatcacgacacactacgtatgcttttccagcatctgtgcagagtgattgaacatggggagcagaatcgcatgagtgtccagagcgtggccatcgtgttcggacctacgctgcttagaccagaggtcgaagagacctctatgcccatgaccatggtttttcagaaccaggtagtcgaactgattctccagcagtgtgcagatattttcccaccccattag

SEQ ID NO: 294283 - DNA, 1647 bp, Artificial Sequence
  derived and/or modified sequence
atgcagccaggtctgtcccccggcagtcctggcgacccaagaccacccactcccgagacagattaccccgaaagtttaaccagttaccccgaagaagactatagcccagttggaagcttcggcgagcctggcccaaccagccccctgacgaccccccctggttggtcttgccacgtatcccaggataaacagatgttgtacaccaatcacttcactcaagagcagtgggtgcgcctggaagatccccacggaaaaccatacttttataatcctgaggattcctcagtgagatgggaactgccccaagttcctgtaccggcccctcgttctatccataagtcgtctcaagatggcgatacgcccgcgcaagcttcccctcctgaggagaaggttcctgcggaactcgatgaggttggcagttgggaagaagtctcacctgccacagccgccgttcggactaagacactggataaggctggtgttcttcaccgaactaagacggcagacaaaggcaaaagacttagaaagaagcattggtctgcctcttggactgtcctggaaggtggcgtgttgacattctttaaggatagtaaaactagtgccgccggcggattacgtcaaccaagcaagttttccaccccggaatacactgtcgagcttcggggagcaactctgtcttgggctcccaaagataagtcctcacggaaaaatgtgctggaattaagatcccgtgacggatccgagtatctcatccagcatgacagcgaggcaataataagcacctggcacaaagctatcgcccaagggatccaggaacttagcgctgaactccctccggaagaatcagagtcctctagggttgacttcggcagctcagagaggctcggcagttggcaggagaaggaagaggacgctagacctaacgcggcagccccagcgctgggtcccgtcgggctggagtccgatctctcaaaagtgcgtcacaaactcagaaagtttctccagcgtcggccaactctgcagtcgctcagggagaagggctatattaaagatcaggttttcggctgtgccctcgctgccctctgtgagagagagagatctcgcgttccccggtttgtgcagcagtgcatacgtgctgtagaggcgagaggcctggatatcgatggtctctatcgaatctctggcaacctcgcgaccatccagaagcttcggtacaaggtggatcacgatgagcggctggatctggacgatggtcggtgggaggatgtccacgtgataacgggcgcactcaaactctttttccgcgagcttccagaaccactttttccattcagccactttaggcagtttatagctgccattaagttgcaagatcaggcccgtcgctctaggtgtgtgcgagacctggtccggtctctccctgccccaaatcacgacacactgcgcatgctttttcagcatctctgcagggtgatcgagcacggtgaacagaacagaatgtctgtccagagcgtggccatcgtgttcggccctacactgctacgccccgaagtggaggagacctctatgccaatgactatggtgttccaaaaccaggtggtcgaattgatcctccagcagtgcgctgatatatttcctccccattag

SEQ ID NO: 294284 - DNA, 1647 bp, Artificial Sequence
  derived and/or modified sequence
atgcagcccggcctgagccctggcagccctggggaccccaggcctcccaccccagagacagactacccagagagcctgaccagctacccagaggaggactacagccctgtgggcagctttggagagcccggccccaccagccccctgaccaccccacctggctggagctgccacgtgtcccaggacaagcagatgctgtacaccaaccacttcacccaggagcagtgggtgcggctggaggacccccacggcaagccctacttctacaaccctgaggacagctctgtgcgctgggagctgccccaggtgcctgtgcctgcccccaggagcatccacaagagcagccaggatggagacaccccagcccaggccagccccccagaggagaaggtgcctgctgagctggatgaggtgggctcctgggaggaggtgtccccagccacagctgctgtgaggaccaagaccctggacaaggccggcgtgctgcacaggaccaagacagctgacaagggcaagaggctgaggaagaagcactggagcgcctcctggacagtgctggagggcggcgtgctgaccttcttcaaggacagcaagaccagcgctgctgggggcctgcggcagcccagcaagttcagcaccccagagtacacagtggagctgcggggggccaccctgtcctgggcccccaaggacaagagcagcaggaagaatgtgctggagctgcggagcagagatggcagcgagtacctgatccagcatgattctgaggccatcatcagcacctggcacaaggccatcgcccagggcatccaggagctgtctgctgagctgcccccagaggagagcgagagcagccgggtggactttggcagcagcgagcggctgggctcctggcaggagaaggaggaggatgcccggcccaatgctgctgccccagccctgggccctgtgggcctggagagtgacctgagcaaggtgcgccacaagctgaggaagttcctgcagaggcggcccaccctgcagagcctgcgggagaagggctacatcaaggaccaggtgtttggctgtgccctggccgccctgtgtgagcgggagaggagccgggtgcccaggtttgtgcagcagtgcatccgggctgtggaggcccggggcctggacattgatggcctgtaccgcatcagcggcaacctggccaccatccagaagctgcgctacaaggtggaccatgatgagcggctggacctggatgatggccgctgggaggatgtgcacgtgatcactggagccctgaagctgttcttccgggagctgcctgagcccctcttccccttcagccacttccggcagttcatcgccgccatcaagctgcaggaccaggcccggcgcagccgctgtgtgcgggacctggtgcgcagcctgcctgcccccaaccacgacaccctgaggatgctgttccagcacctgtgcagggtcatcgagcacggggagcagaacaggatgtctgtgcagagcgtggccatcgtgtttggccccaccctgctgcggcctgaggtggaggagacctccatgcccatgaccatggtgttccagaaccaggtggtggagctgatcctgcagcagtgtgccgacatcttccccccccactag

SEQ ID NO: 294285 - DNA, 1647 bp, Artificial Sequence
  derived and/or modified sequence
atgcagcccggcctgagccccggcagccccggcgacccccggccccccacacctgagactgactatcctgagtctctcactagttatcccgaggaggactacagcccggttgggagctttggagagccgggccccacatctccgcttaccacacctcctggatggagctgccacgtctcccaggacaaacagatgctatataccaatcatttcacacaagagcagtgggttagattggaggatcctcacggcaagccttacttttataatcccgaagactccagtgttcgttgggagttaccccaggttcccgtacccgcccctaggagcatccataagagctcacaggacggggataccccggcccaagcctcacccccggaggaaaaggtgccggccgagttggatgaagtcggtagctgggaggaggttagtccagcaactgctgcagttagaacaaagactctggacaaagccggcgtgctgcatagaaccaagacggctgataagggaaagcgtctgcgcaagaaacattggtcagcttcgtggactgtcttggaagggggcgttctcacattcttcaaggattctaagacctccgctgccgggggcttgcgacaaccatctaagttctcaacacccgagtacaccgtggaacttcgcggggctacattgagttgggccccaaaggataagtcatcacgaaaaaatgtgctcgaactgagaagtcgcgacggaagtgagtacctgatccagcatgatagcgaggccattatctccacatggcacaaagctattgcccagggcattcaggagctatctgcagaactgcctcccgaggagagcgaatcaagtcgtgtggatttcggttcgagcgagagactgggctcttggcaggaaaaggaggaggacgccagacccaacgcagcagccccagcccttggacccgtgggcttggaatccgaccttagcaaggtacgccataaactccgtaaatttttgcagcggcgcccaacattacagtctctgagggagaagggatacataaaagatcaggtatttggatgcgctctggctgccctgtgtgaacgcgaacgatctagagtgcccaggtttgtgcagcagtgtatcagagccgttgaggcgcgaggcctcgacatcgacgggctctaccggatctccggtaatctcgcaacaatccagaaattgcggtataaggtggaccatgacgaacgactggatttagacgacggacggtgggaagacgtgcacgtgattaccggggctctcaagcttttcttccgcgagttgcccgagcccttgttccctttctctcatttcaggcagttcattgccgccatcaagcttcaggaccaggcccgccgctcaagatgcgttagggatttggttcgaagtctccccgccccaaatcacgataccctgcggatgctgtttcagcacttatgtcgagtgatcgaacacggtgagcagaaccggatgagcgttcaatccgtcgcgatcgtctttggacctactctgttacgtccagaggtcgaggagacaagcatgcctatgactatggtcttccagaaccaggtggtagagttaatcctgcaacagtgcgccgacatttttccccctcattag

SEQ ID NO: 294286 - DNA, 1647 bp, Artificial Sequence
  derived and/or modified sequence
atgcagcccggcctgagccccggcagccccggcgacccccggccccctacgcccgaaacagactatcccgagagtctgactagctaccccgaagaagactatagccctgtagggagcttcggcgagccgggccctacaagtcccctgacaaccccccctggatggtcatgccacgtctcacaggacaaacaaatgctatacactaaccacttcacccaggagcagtgggtgcggctggaggaccctcatggcaaaccatatttctacaatcctgaggactcgagcgtgcggtgggaactaccgcaagttcccgttcctgctccacgatcaattcataaatcatctcaagacggcgatacgccagcccaggcaagccccccagaggaaaaagtgcccgccgaactcgacgaagtcggaagctgggaagaggtgagccccgctacagcagccgttcgaactaaaacgctggacaaggctggggtgctccaccgcacaaaaacggctgataagggaaaaaggctcagaaagaagcactggtctgcctcatggacagtgcttgagggtggagtgctgacattcttcaaagatagtaagactagtgccgccggaggtctgaggcagccttctaaattcagtacgcctgagtacacggtggaattgcgcggcgctacactcagctgggcccctaaggataagtcctccagaaaaaacgtgcttgagttgcgtagccgcgacggatctgagtacttgatccagcacgattctgaagcaatcatatctacatggcacaaagctatcgctcagggaattcaggagctgtccgctgagcttccgccagaggaatcagagtcttcgagagtggatttcgggtccagtgaacgtctggggtcttggcaagaaaaggaggaggacgcccggccaaatgcggcagcaccggccctaggacccgtgggcctggagtccgatctgtccaaggttcgccacaaactgaggaaattcctacagagaaggccaacacttcagtctttgcgagagaaaggctacatcaaagatcaagttttcggatgtgcccttgccgctctgtgcgagcgagaacgaagcagggtgcccagattcgtgcaacagtgtatccgggccgtcgaggccagaggcctcgatattgacgggctgtacagaatcagcggtaacctcgccaccatccagaagctccgctataaggtggaccacgacgagagattggacctggacgatgggaggtgggaggacgttcatgtgataaccggtgccctgaaacttttttttcgggagctgcccgagcctctgttcccattcagtcatttcaggcaattcattgcagccatcaaactccaggatcaagcccgacgatctaggtgcgtgagggacttagtccggtcacttccagctcccaaccacgacaccctgcgaatgctgtttcaacacctttgtcgagtgatcgaacacggagagcaaaaccgcatgtcagtgcagagcgttgcaatcgtgttcggccccacacttctgaggccagaagtggaggagacatccatgccaatgaccatggtcttccagaatcaggtcgtggaactgattctgcagcaatgcgccgatatcttcccgccccattag

SEQ ID NO: 294287 - DNA, 1647 bp, Artificial Sequence
  derived and/or modified sequence
atgcagcccggtctgagccccggttccccgggagaccccagaccgccaacgcctgaaacagattatcccgagagcttaacctcctaccccgaggaagactactcccctgtgggcagtttcggcgagcccggacctacctctccactaaccaccccccctggatggtcatgtcatgtgtctcaggataagcagatgctctataccaatcattttacccaggagcagtgggtcagattggaggatccccatggcaagccgtacttctacaacccagaagactcgtcggtacggtgggagctaccacaggttcctgtcccagctcccagatcaatccataaaagcagtcaggatggtgatactccggcacaagccagtcccccagaggaaaaggtgccagcagagctggatgaggtgggatcatgggaggaagtgagtccagctacggctgcagtgcgtaccaaaactcttgacaaggccggagtactgcatcggacgaagaccgctgacaaggggaaacgtctgcgtaagaagcattggtccgcctcatggactgtgctagaggggggagtgttgacattctttaaagattctaagactagtgccgctggtgggctccggcagcccagcaagttcagcactccggagtatacagtggagctgcgtggtgctacactgtcttgggccccaaaggataagtctagtcggaaaaatgttctcgagttgaggtcccgagatggctccgagtatctgattcaacatgatagtgaagcaataatttctacttggcataaagctatagcgcaggggatccaggaactgtccgctgagctccctcccgaagagtctgaatcttcacgggtggatttcggcagcagtgaaaggctgggcagctggcaagagaaagaagaggatgcaagaccaaatgccgcagcgcctgctctgggccctgtgggccttgaatccgacttgagcaaggtgagacacaaactcaggaagtttttacagcgaagaccaacactgcaaagcctgcgtgagaaaggctatataaaggaccaggtgttcgggtgcgctctggcagcgttgtgtgagcgggagaggagccgcgtgccacgctttgtgcagcaatgcattcgggcagtcgaggccagagggcttgatatagatggactgtatcgaatcagcgggaatctggccacaatacagaagctgaggtacaaggtggatcacgatgagcggctcgatttggacgatggaagatgggaggatgtgcacgtgataactggcgcacttaagctgttttttcgcgaactccctgaacctcttttcccattcagtcacttcagacagtttatcgcagccatcaaacttcaggaccaggccaggcgttcaagatgcgtgcgggatttagtgaggtccctgcccgcaccaaaccatgataccctacggatgctgttccaacatctgtgtcgcgtgatcgagcacggcgagcagaatcgtatgagtgttcagagtgtcgccatcgtctttggcccaaccctgctcagacctgaagtggaggagaccagcatgcctatgacaatggtattccaaaatcaagtggtagagctgatactacagcaatgcgcagacatcttcccgccacattag

SEQ ID NO: 294288 - DNA, 1647 bp, Artificial Sequence
  derived and/or modified sequence
atgcagccagggttgtcaccgggatcacctggcgatccgaggcctccaactccggagacagattatcctgaatctttaacatcctatcccgaagaagattacagccccgtcggctcattcggcgagcctggcccaacttctcccttgacgacgcccccaggatggtcgtgccacgtgagccaggacaaacagatgctgtacacaaaccatttcacccaggagcaatgggtcaggttagaggacccccacgggaaaccctatttttacaatccagaagactctagcgtgagatgggagctgccacaggtccccgttcctgctccacgcagcattcataagtccagtcaggatggagacaccccagctcaggcctctcctcctgaagagaaggtgcccgcagagctcgatgaggtcgggtcttgggaagaagtttctccggctactgccgctgtgcgcaccaaaactttggataaggctggtgtattgcacagaacaaaaactgccgacaaggggaagagacttagaaagaagcattggtccgcctcatggactgttctcgagggcggagtgctgacttttttcaaagactcaaagacgagtgccgctggtgggcttagacagccctccaagttttccacacccgaatacacagtcgagctccgtggagctactctttcctgggctccgaaagataagagtagcaggaagaacgtgttggagttgcgatcacgcgatgggtcagaatacctgatccagcatgactccgaggctattattagcacgtggcacaaagctattgctcagggcattcaggagctgagcgctgaactgcctccagaggagtctgagagctcccgtgttgatttcggatcatcagaacgactcggcagttggcaagagaaggaggaagatgcacgccctaatgcggcagcacctgcacttgggcctgtgggcctggagtcagacctcagtaaagtgagacacaagcttcgtaaatttctacagcggagaccaactctccagtcccttagagagaaagggtacattaaagatcaggtgttcggctgcgctttggcggctttgtgcgagagggagaggagcagagtaccgagattcgtgcagcagtgcatccgtgcagtggaagcacgaggcctggatattgatgggctatatcgaatatctgggaacctggccacgatacagaaactgaggtataaagttgatcacgatgagcgcctcgatctggatgatgggaggtgggaagacgtgcacgtgatcacaggagcattgaaactgtttttccgagagctgccggagccattatttccatttagtcactttcgccaattcatcgccgctattaagcttcaggatcaagcacgtcgatctcggtgcgtgagggacctggtcaggtcactgccggctcccaaccacgacacacttcgtatgctgttccagcatctctgtagggttatcgagcacggggaacaaaataggatgtccgttcaaagtgtagccatcgtatttgggccaaccctgctgcggccagaagtggaagaaacctcaatgccaatgacaatggtattccaaaatcaggttgtggagctgattttacagcagtgcgccgacatctttcccccacattag

SEQ ID NO: 294289 - DNA, 3649 bp, Artificial Sequence
  derived and/or modified sequence
ccccggaggcgctgcacatgagcaggcagccccgactggaaggagcccggggccctcattccttctcctccactgggaactgagtggacgacccaccggagcccgtgtacgcgaacatagagaggcagccccgggccacttcaccgggcgccgctgcagccccccttcccagcccggtgtgggagacgcacacggacgcgggcaccgggcgcccctactactacaacccagacacgggagttaccacctgggagtcgccctttgaggctgccgagggtgccgccagcccagccacctcccctgcctcggtggacagccacgtgagccttgagaccgagtggggccagtactgggatgaggagagccgcagggtgttcttctacaacccgctgacgggcgagacggcctgggaggacgaggccgagaacgagcccgaggaggagttggagatgcagccgggcctgagccctggcagcccaggggacccgcggccccccactcccgagacggactaccccgagtcgctgaccagttaccccgaggaggactattctcccgtgggctctttcggtgagcccggccctacctctcccttgaccacaccccccggctggtcttgtcatgtcagccaggacaagcagatgctctacaccaaccacttcactcaggagcagtgggtgaggctggaggacccccacgggaagccatacttctacaatccagaggactcctctgttcgatgggagctgccccaggtccctgtccctgcccctcgaagcatccataaatccagccaggatggtgacaccccagcccaggccagccctccagaggagaaggtcccagcagagctggatgaggttgggagctgggaggaagtctctcctgccacagctgctgtgaggaccaagaccttggacaaggcaggggtgctccatcgcaccaagacggcagacaagggaaagcggctccggaagaagcactggagtgcctcctggactgtgctggagggtggcgtcctgacattcttcaaggactcaaagacctcggctgcaggcggcctgaggcagccttccaagttttccacccctgagtacacagtggagctgaggggggccactctctcctgggcccccaaagacaaatccagtaggaagaatgtgctggagctacggagccgagatggctctgagtacctgatccagcacgactcggaggccatcatcagcacctggcataaggccattgctcagggcatccaggagctgtccgcagagctgcccccagaggagagcgagagcagcagagtggacttcgggtcgagcgagcgcttgggaagctggcaggagaaagaggaggacgcgcgaccgaatgcagccgcgcccgccctgggccccgtgggcctggagagcgacttgagcaaggtccggcacaagctccgcaagttcctccagaggcggcccacactgcagtcgctgcgggagaagggctacatcaaagaccaggtgttcggctgcgcgctggccgcgctgtgtgagcgcgagaggagccgggtgccacgcttcgtgcagcagtgcatccgcgccgtcgaggcccgcgggctggacatcgacgggctgtaccgcatcagtggaaacctggccaccatccagaagctacgctataaggtggaccacgatgagcgccttgacctggatgacgggcgctgggaggacgtccacgttatcaccggagccctgaagctcttctttcgggagctgcccgagcccctcttccccttctcgcacttccgccagttcattgcggccatcaagttgcaggaccaggcccggcgcagccgctgtgtgcgtgacttggtgcgctcgctgcccgctcccaaccacgacactctgcggatgctcttccagcacctctgccgggtgatcgagcacggcgagcagaaccgcatgtcggtgcagagcgtggccattgtgttcgggcccacgctgctgcggcccgaggtggaagagaccagcatgcccatgaccatggtgttccagaaccaggtggtggagctcatcctgcagcagtgcgcggacatcttcccgccgcactgactgctggcctgtgactggggcggcggccgcggtcctgccacacaagctgggcggcggaggccacgcagccgggccttcttctctctgggaccctccgccagcgcatagccgcaggccggtgtgacttctgcaccctcggttctgagggtacggtgacccctagtgggcagtttgcaaaatgtgattccttcttcccaactccccatccccccttcccttcccgtcacgtcctgtttgggggttaattcggttttttctctgttgcatcgcgcctactgtgcgtgtgcgatagcgtgtgtgggggtgagagtttgttttctggaatggtaggtgctgggaggaggagtttgatggagggcttcctggctgcttctggccctcacctcgtggaggccttcacagagaccctgtgggccctggccctgtgctggcactgtgccagtcatgaggcagctctgatcacttccccactgtggaaacaggactgacccagccttcagtgtgggctgctgaagctatcctcctcaggcctcagggatgacctcctgcctgagcctctcacaggctggctgtgggccagtttcatctgctttcctgttgggggtcccgggcctctgctgtccttgacccactggtgttctgtgcaaggcttcttcccattcaccaagtgcacaccttgcatctgccgctcggcatgcaccagttccacacaccatcccattttacagacaaggacgctgaggcctgcagcagcagtgtgacttgctcaaggtccagtgagtgacctcattccccagaaaaggctcctcccacaccagagtacagcctgggtagggggaaaatcagttctttcagctaccacccatccaacctttgggcctatgtgaaaagaaaggaactaagctgggtgtgttctgtctggacctggggaggcccctgaaggcaaagagggaaactgtcccagctgttctgtcctaggggagggggacatagccctagcaggagctcccagcccctcttggcactctgacacacaagtacacccatctggggcccgctttgccacgaagagctgggcaggcctgcagggtgtggggaaggaggacacaacctcaagaaaggaagcgtgaaccccagggaacagcgggtcccttccctcctcagacacaagccacctcagcttgtggctcttggcccccagccccaccaacccacctgttcatttattcaacagacaatgacagctgatatttattggacatttgcaccatgccaagcattcggcttggattatcccatttgtttctcacagccggtatttattgtctgctcctctgtgccaggtgctgtgctctgggcaggggcactgcatgggctgcctgccctggtggagcttgtggtctgatgggtgaggctgacccaagcccaccccattgccaacagggccagggcaagagtacacacaggggcctcataccatatgtctaaatatttaaaagttatcaatcaagctaacaactgttaaataaaatatgttctattctcctactttg

SEQ ID NO: 294290 - DNA, 1647 bp, Artificial Sequence
  derived and/or modified sequence
atgcagccaggccttagccctgggagtcctggggatccccgcccacccacgcccgagactgactatcccgagtccctcaccagctatcccgaggaggactacagcccggtgggcagcttcggagagccaggccctactagtcctctaactactccccctggctggtcctgtcatgtgagccaagataaacagatgctctacactaaccactttacccaggaacaatgggttaggctggaagacccgcacggaaagccctacttctataatccagaggattcttccgtacggtgggaactgccgcaggtgcccgtgcccgcaccgagatcaatccataagtcttcccaggacggggacacccctgcacaggctagccctcctgaagagaaggtcccagccgagttagatgaggtgggatcttgggaagaggtttcccccgccactgccgccgtgcggactaagactctggacaaagcaggcgtgctgcaccgaaccaagacggccgataaaggcaagcggttgaggaaaaagcactggagcgcttcttggaccgtgctcgagggcggcgtgctgacattttttaaagactctaaaacgagtgccgcgggtggccttcgccagccctcaaaattcagcacgcccgagtatacagtggagctgagaggtgccacactaagttgggcccctaaagataagtctagtagaaaaaacgtgctggagctgagaagtagggacggatctgagtatctgatccaacatgactcagaggccatcatctcaacctggcacaaagctatcgcccaaggtatccaagaacttagcgcagagttaccacccgaagaatccgagtcctcgcgggtagactttggcagcagcgaaagactcgggagctggcaagaaaaggaggaagacgcccgccccaatgcggccgctccggccctcggccctgtggggctggagagcgacctgtctaaggtacgccataaattgcgaaagttcctgcagaggcgcccaacactgcagtcgctcagagagaaaggctacatcaaagatcaggtcttcgggtgtgcattggccgctttatgcgagcgggagcgtagccgagtcccgaggttcgtacagcagtgtattagggctgtggaagcccggggcctggatattgacggactgtatcgcatcagcggcaacctcgccacgatccagaaacttagatacaaagtcgaccacgatgagagactggacctcgacgatggtcgttgggaagatgtgcacgttatcaccggtgccctcaaattattttttcgcgagcttccagaacccctgtttccgttctcccactttaggcagtttattgctgcaataaaactgcaggatcaggccaggcgcagtcgttgtgtcagagatctggttcgttcgctcccggctccaaatcatgatacgctgagaatgctgttccaacacctgtgtcgcgtcattgagcatggcgaacagaacaggatgtctgtgcagtctgtagccattgtgtttggtccaaccctcctgcgacctgaggtggaagagaccagtatgccaatgacaatggtcttccagaatcaggtggtcgagttgatcctgcagcagtgtgccgacatttttcctccacattag

SEQ ID NO: 294291 - DNA, 2670 bp, Artificial Sequence
  derived and/or modified sequence
atggctgccgacgtggttggagatgtgtacgtgttagttgaacatccttttgagtacacgggcaaggatggaaggagggttgccatccgacctaacgagaggtacagactgttgagacggtcaaccgaacattggtggcacgtgcgaagagagcccggaggacgccccttctatttaccagctcaatacgttcgcgaacttccagcgttagggaatcccgccgcagccgcacctcccggcccgcatccttcgccggccgccccagagcctctcgcttatgactacagatttgtgagcgccgctgcaaccgccggccctgacggcgcgcctgaagagagcggtggcagggcatcctccttgtgcggtccagctcagcggggcgccgccactcagcgaagcagcttggcacctggtcttcccgcttgcttatacttgagacctgcagctccggtgcgcccggcccagagcttaaacgatctggcgtgcgcagccgtgtctccgccagctgggctgcttgggagctcgggaagttttaaggcctgtagcgtcgcagggtcctgggtgtgccctaggccactggccaggagtgattcggagaatgtgtatgaggtgattcaagacctccatgtcccccctcccgaagagagcgcggagcaggtggacgacccacccgagcctgtttacgcaaacatagagcgccagcccagggccaccagccctggcgctgcggcggcacctctgccctctcctgtttgggaaactcatacagacgctggcacagggagaccatactactacaacccagacacaggtgtcacgacatgggagtctccctttgaggcagccgaaggagccgcctctccagctacatcccctgcttctgtcgactcgcatgtcagtcttgaaacggaatggggccaatactgggacgaggagagcaggagggtgttcttctacaatcctcttacaggcgaaaccgcgtgggaagacgaagcggaaaacgagcctgaggaagagctggaaatgcagcctgggttatccccaggtagtccaggcgaccctagacctcccacccccgagacggattatccagagagcctgacctcataccctgaagaggactattccccagtgggaagttttggcgagcctgggcccactagccccctcacaaccccgccaggttggtcttgccacgtgagccaggacaaacagatgctttacacaaatcacttcacccaggagcagtgggtccgcctggaagatcctcatggtaagccctatttttacaatcctgaagatagtagcgtgaggtgggagcttcctcaagtgcccgtgcctgcccccagaagtattcacaaatcttcacaggatggcgatacgcccgcacaggcctctcctccggaagagaaagtccctgctgagcttgatgaggtgggctcatgggaagaagtttcccctgccactgcggccgtgagaaccaaaacactggacaaggccggggtcctccatcgcaccaagacggctgataaagggaagagactgcgcaaaaagcactggagcgccagttggacagtgctggagggtggcgtcctgacattttttaaggatagcaaaacgagtgccgcaggcggtcttcggcagccatccaagttcagtacaccggagtacaccgtagagctgagaggggcgacactgagttgggcccccaaggataagagtagtcgaaagaacgtgcttgagctccgcagccgtgacggttccgaatacctcatccagcatgactcagaggccataataagtacatggcacaaagccattgcacaaggcatccaggagctctcggccgagctcccacctgaagaaagcgagagtagccgcgtggactttggctcctcagagagattggggagttggcaggagaaggaggaagacgctagacccaatgctgccgctcctgcgctgggtccagtaggactggagtcggatctgtcaaaggtgaggcacaagctgcgtaagttcttgcaacggcggcccaccctccagagcttgagagaaaagggctacatcaaggatcaggtttttggttgcgcccttgcagctctgtgtgagagagaaagaagcagagtcccccgatttgtgcagcagtgtatcagagcggtcgaggccaggggactcgacattgacggtctgtacagaatttctggtaacctcgccacaatccagaaactgcgctacaaggtggaccatgacgaaagactggatttggatgacggccgctgggaggacgtgcatgtcattacaggagcactaaagctgtttttccgcgaactgccagagcccctctttccctttagccatttcagacagtttatcgctgcgatcaagcttcaggaccaggcacggagatcgcgctgtgttcgcgatctggtcagatccttgcccgcgccaaaccatgatactcttcgtatgctgtttcagcatctgtgtcgcgtgattgagcacggtgagcagaaccgaatgtccgtgcagtctgtcgccatcgtgtttggacctacattactgcgtccggaggtcgaagaaacttctatgcccatgactatggtgtttcaaaaccaggtggtggagttaatcctccagcaatgtgcagacatcttccccccacattag

SEQ ID NO: 294292 - DNA, 2589 bp, Artificial Sequence
  derived and/or modified sequence
atggcagcggatgttgtcggcgatgtttacgttctggtcgagcacccatttgaatatactggcaaggacggacggcgagtggccatccgacctaacgagagatatcgcctgctcagacgcagcaccgaacattggtggcatgtgcgccgggagcctgggggacgccccttttatctccctgcgcaatacgtgagggagctgccagcactgggtaaccctgccgccgccgcccctcctgggccccatccatcacctgctgcaccagaaccactcgcgtacgactatcgattcgtatcagccgcagccactgccggccctgatggcgccccagaggagagcggggggcgagcgtcctccctctgcggcccagcccagagaggagctgcgactcaacgcagtagtttggcgccagggttacctgcctgcttatacctgcggccggcagcacctgtcaggcccgctcagtcgctcaatgacttggcgtgcgcagccgtgtcccccccagccggactcctgggctctagcggatcatttaaggcgtgctcggttgccgggtcctgggtgtgtccgcgacccctagcccgttccgactccgaaaatgtatacgaggtgatccaggacttgcacgtgcctcctccagaggaatctgccgaacaggtggatgacccgcctgagccggtctacgcaaatatcgagaggcagcctagggccacttcgcccggggctgctgccgcccctctcccttctcccgtttgggagacccacactgacgccgggacaggacgcccgtattactacaaccccgatacaggagttaccacctgggagagcccattcgaagcggccgaaggggctgcatcaccagcgaccagccccgcgagcgtggacagccatgtgagcctcgagactgaatgggggcagtattgggatgaggaatcaagacgggttttcttctacaatcctctcacgggcgaaactgcctgggaagacgaggccgaaaacgaacctgaggaggagctcgaaatgcaacctgggctctctcccggatccccaggcgatcctcggcctcctactccagaaacggactaccctgaatctttaacaagctatcccgaggaggactatagccccgtcggctccttcggcgagccgggccccactagccccttgaccactccacccggatggtcatgtcatgtcagccaggataagcagatgctgtacaccaatcactttacgcaggaacaggtgccagtgcctgctccgcggtctatccataagagcagtcaagatggcgacactccagcccaggcatctcccccagaagagaaggtacctgctgaactcgacgaagttggcagttgggaggaagttagtcctgccaccgcagccgtacgaacaaaaaccctcgacaaagcgggggtgctccaccgaactaaaactgcagataagggcaagcgcctgaggaaaaagcactggtctgcctcctggaccgtcttggagggtggggttctgacttttttcaaggattcaaaaacttccgctgccggagggttgaggcagccaagtaaatttagcaccccggagtacacagtcgagttacggggggctactttatcatgggccccaaaggacaaatctagtcgcaagaacgtgctggaattgaggtcacgcgacggcagcgagtacctaatccagcacgattcagaggctattatctccacatggcacaaggccatcgcccaaggcatccaggagctgtccgccgagctgcccccagaggaaagcgagagtagcagggtggactttgggtcctctgaacggctaggctcatggcaagaaaaggaggaagatgcccgacctaatgctgctgcccctgccctcgggccagtgggcttggaatccgatctcagcaaagtccgccacaaactgaggaagttcctgcagcgcagaccgacactgcagtcgctgcgagaaaaggggtatataaaggaccaggtgtttggctgcgctctcgccgccctatgtgagagagagaggtcccgtgtgcctcgtttcgttcaacagtgcatacgggccgtggaagcgcgagggttggacatcgacgggctctatagaataagtggtaatctggctacgatccaaaagcttcgatataaggttgatcatgatgaacggctcgacttagacgacgggcggtgggaagacgtacacgtgattaccggcgcccttaagctgttttttagggagttacctgagcctctgttcccattttcccacttccgtcagttcatagccgccattaagctacaggatcaagccaggagatcccgatgtgtgagggacttagtgcggagcctcccggcacctaaccatgacaccttaaggatgttgttccagcatttgtgtcgggtcatcgaacacggcgaacagaaccgcatgtcagtgcagagcgttgcaattgtatttggcccgactttgctgaggccggaagttgaggaaaccagcatgcccatgacaatggtgttccagaatcaggtagttgaattgatcttgcagcagtgcgccgatatctttcctccacattag

SEQ ID NO: 294293 - DNA, 1647 bp, Artificial Sequence
  derived and/or modified sequence
atgcagcccggcctttcgccaggaagcccgggtgaccccagaccgcccacaccggaaaccgactaccccgagagcctaacctcctaccccgaggaagattatagtcccgttggatcttttggtgagcccggaccgacctcacccctgactacccccccaggctggtcctgccacgtctcccaggacaagcagatgctgtacactaaccactttacacaagagcaatgggtccgattggaagacccccacggtaaaccatacttttataatcctgaggatagtagcgtacgatgggaactgccacaggtgccagtgccagccccgcgatccattcataaatcaagccaagatggggacacacccgcccaggctagcccacctgaagagaaggtgccagcggaactcgacgaagtgggatcctgggaagaggtttcccctgctacagcggcagtgcggactaaaactcttgataaagcaggggtgctgcacaggaccaaaacggccgataaaggtaaaagactaagaaaaaaacattggtcggcctcgtggaccgttctggaaggcggggttctgaccttttttaaagactcaaagacctcagccgccgggggccttagacagccttcgaaattctcgaccccagagtatacagtcgaacttcgaggggcaaccctgtcctgggcgcctaaggataaaagctcacggaaaaacgtgttggaactcagatcgagggacggctcagaataccttatccaacacgattccgaagccattatcagcacttggcacaaagctattgctcagggcatccaggaactcagcgcagagctgccgcccgaggaatccgagtcgtcacgagtagatttcggaagcagtgagcgccttgggagctggcaggagaaggaggaggacgccaggccaaacgcagctgcacctgctctgggaccggtgggactggagtcagatttaagcaaggttcgacataagcttcggaaatttctgcaacggcgccctaccctgcaatcactccgcgagaagggttacattaaggaccaggtttttggctgcgccctagcggctctgtgtgaaagagagcgatctagagttcctcggttcgtccagcaatgcattcgcgccgtggaggccagagggcttgatatcgatggattatataggataagcggaaacctggcgacgattcaaaagctgcgatataaggtcgaccatgatgagcgactggacttagatgatgggcgctgggaggatgtgcacgtcatcaccggcgcactaaagcttttttttcgtgagctgcccgaacctttattcccttttagtcactttcgacagtttatcgccgccatcaaacttcaggatcaggcccggcgtagtcggtgcgtgcgggacctagttcgcagcttacctgcacccaaccatgatacactgcgtatgctctttcagcacctgtgtagagtgattgaacacggtgagcagaatagaatgtccgtgcagtccgtggctatcgtctttggcccaacactccttcgacctgaagtggaagagacaagcatgcccatgaccatggtgtttcaaaatcaagtggtcgagctgatcctgcagcagtgcgcggacatctttccgcctcattag

SEQ ID NO: 294294 - DNA, 1566 bp, Artificial Sequence
  derived and/or modified sequence
atgcagcctggtctgtcaccaggatctccaggagatccacgaccacccacaccagaaacggactatccggagtctctgacttcctacccagaagaagattactccccagtcgggtccttcggcgagccaggtccaactagcccactgacaactcctcctggatggtcctgccacgtcagtcaagacaagcagatgctgtacaccaaccattttacacaggagcaagtgcccgtgccagcccctcgctcaatccacaaatcaagccaagatggtgatacccccgctcaagcgtctcctccagaggagaaggtgcctgctgagcttgacgaggttggaagttgggaggaggtatcccctgccaccgccgcagtgcgaaccaaaacgctggataaggccggcgtgctgcaccgcacaaaaaccgccgacaagggcaaaaggttaaggaaaaaacactggtccgcctcttggaccgtgctagaaggaggagtcctgacattcttcaaagacagcaaaaccagcgctgctggggggttgaggcagccatctaagttcagtacaccagaatacactgttgagttacgtggcgccaccctgagctgggcgcccaaagataagagtagccgcaagaatgttctcgaactccggagccgggatggctcagagtacctcattcagcatgattcagaggctataatttcaacgtggcacaaagctattgcacaggggatacaagagctctcagccgagctgccacctgaagaaagcgaatccagccgggtcgacttcggatcctccgagagactcggctcctggcaagagaaggaggaggacgcgcggcctaacgctgctgcccccgcgcttgggccggttgggcttgagtctgacctcagcaaggtgagacataaactccgaaagtttctgcagcgtcgcccaactttgcaatctctcagagagaaaggatacatcaaagaccaggttttcgggtgtgcattggcggcgttatgtgaaagggagaggtcccgcgtacccagattcgtgcagcagtgcatcagagctgtggaggctcgcggcttggacatagatgggctttatcggatttcaggcaacctagccactatccaaaaactccgatacaaggtggaccatgacgaaaggctggacttggacgacggccgctgggaggacgtgcacgtaatcacgggggctctgaaactgttcttccgagagctgcctgagcctctttttccatttagccatttcagacagtttatcgcagccattaagttacaggaccaggctcgtcgaagccgctgtgttagggacctggtcagaagtctgcctgcacccaatcatgacactcttaggatgctgtttcagcacttgtgtagggtgattgaacatggggaacagaataggatgagtgtccagtcagttgccattgtttttgggcctacgctgctgaggcccgaggtcgaagaaacatccatgcctatgaccatggtctttcagaaccaggttgttgagctgatcctgcagcagtgcgccgatatttttccaccccactag

SEQ ID NO: 294295 - DNA, 2670 bp, Artificial Sequence
  derived and/or modified sequence
atggctgctgatgtggtgggagatgtgtatgtgctggtggagcacccctttgagtacaccgggaaggatggaagaagagtggccatccggcccaatgaaagataccgcctgctgcggcgcagcacagagcactggtggcacgtgagaagagagcccggcggccggcccttctacctgcctgcccagtatgtgcgggagctgcctgccctgggcaacccagctgctgctgcccctcctggcccccaccccagccctgctgcccctgagcccctggcctatgactacagatttgtgtctgctgctgccacagctggcccagatggagcccctgaggagagcggcggccgggccagcagcctgtgtggccctgcccagagaggagctgccacccagaggagcagcctggcccctggcctgcctgcctgcctgtacctgcggcctgctgcccctgtgcggcctgcccagagcctgaatgacctggcctgtgccgctgtgtccccacctgctggcctgctgggcagcagcggcagcttcaaggcctgcagcgtggccggctcctgggtgtgcccccggcccctggcccggagtgacagtgaaaatgtgtatgaggtgatccaggacctgcacgtgcccccacctgaggagagcgctgagcaggtggatgatcctcctgagcctgtgtatgccaacatcgagcggcagccccgggccaccagccctggagctgctgctgcccccctgcccagccctgtgtgggagacccacacagatgctggcaccggccggccctactactacaacccagacaccggggtgaccacctgggagagcccctttgaagctgctgagggcgccgccagccctgccaccagccctgcctctgtggacagccacgtgtccctggagacagagtggggccagtactgggatgaggagagccggcgggtcttcttctacaaccccctgactggagaaacagcctgggaggatgaagcagaaaatgaacctgaggaggagctggagatgcagcccggcctgagccctggcagccctggggacccccggccccccaccccagagacagactacccagagagcctgaccagctacccagaggaggactacagccctgtgggcagctttggagagcccggccccaccagccccctgaccaccccacctggctggagctgccacgtgtcccaggacaagcagatgctgtacaccaaccacttcacccaggagcagtgggtgcggctggaggacccccacggcaagccctacttctacaaccctgaggacagctctgtgcgctgggagctgccccaggtgcctgtgcctgcccccaggagcatccacaagagcagccaggatggagacaccccagcccaggccagccccccagaggagaaggtgcctgctgagctggatgaggtgggctcctgggaggaggtgtccccagccacagctgctgtgaggaccaagaccctggacaaggccggcgtgctgcacaggaccaagacagctgacaagggcaagaggctgaggaagaagcactggagcgcctcctggacagtgctggagggcggcgtgctgaccttcttcaaggacagcaagaccagcgctgctgggggcctgcggcagcccagcaagttcagcaccccagagtacacagtggagctgcggggggccaccctgtcctgggcccccaaggacaagagcagcaggaagaatgtgctggagctgcggagcagagatggcagcgagtacctgatccagcacgacagcgaggccatcatcagcacctggcacaaggccatcgcccagggcatccaggagctgtctgctgagctgcccccagaggagagcgagagcagccgggtggactttggcagcagcgagcggctgggctcctggcaggagaaggaggaggatgcccggcccaatgctgctgccccagccctgggccctgtgggcctggagagtgacctgagcaaggtgcgccacaagctgaggaagttcctgcagaggcggcccaccctgcagagcctgcgggagaagggctacatcaaggaccaggtgtttggctgtgccctggccgccctgtgtgagcgggagaggagccgggtgcccaggtttgtgcagcagtgcatccgggctgtggaggcccggggcctggacattgatggcctgtaccgcatcagcggcaacctggccaccatccagaagctgcgctacaaggtggaccatgatgagcggctggacctggatgatggccgctgggaggatgtgcacgtgatcaccggggccctgaagctgttcttccgggagctgcctgagcccctcttccccttcagccacttccggcagttcatcgccgccatcaagctgcaggaccaggcccggcgcagccgctgtgtgcgggacctggtgcgcagcctgcctgcccccaaccacgacaccctgaggatgctgttccagcacctgtgccgggtgattgaacatggagagcagaacaggatgtctgtgcagagcgtggccatcgtgtttggccccaccctgctgcggcctgaggtggaggagacctccatgcccatgaccatggtgttccagaaccaggtggtggagctgatcctgcagcagtgtgccgacatcttccccccccactag

SEQ ID NO: 294296 - DNA, 2589 bp, Artificial Sequence
  derived and/or modified sequence
atggctgctgatgtggtgggagatgtgtatgtgctggtggagcacccctttgagtacaccgggaaggatggaagaagagtggccatccggcccaatgaaagataccgcctgctgcggcgcagcacagagcactggtggcacgtgagaagagagcccggcggccggcccttctacctgcctgcccagtatgtgcgggagctgcctgccctgggcaacccagctgctgctgcccctcctggcccccaccccagccctgctgcccctgagcccctggcctatgactacagatttgtgtctgctgctgccacagctggcccagatggagcccctgaggagagcggcggccgggccagcagcctgtgtggccctgcccagagaggagctgccacccagaggagcagcctggcccctggcctgcctgcctgcctgtacctgcggcctgctgcccctgtgcggcctgcccagagcctgaatgacctggcctgtgccgctgtgtccccacctgctggcctgctgggcagcagcggcagcttcaaggcctgcagcgtggccggctcctgggtgtgcccccggcccctggcccggagtgacagtgaaaatgtgtatgaggtgatccaggacctgcacgtgcccccacctgaggagagcgctgagcaggtggatgatcctcctgagcctgtgtatgccaacatcgagcggcagccccgggccaccagccctggagctgctgctgcccccctgcccagccctgtgtgggagacccacacagatgctggcaccggccggccctactactacaacccagacaccggggtgaccacctgggagagcccctttgaagctgctgagggcgccgccagccctgccaccagccctgcctctgtggacagccacgtgtccctggagacagagtggggccagtactgggatgaggagagccggcgggtcttcttctacaaccccctgactggagaaacagcctgggaggatgaagcagaaaatgaacctgaggaggagctggagatgcagcccggcctgagccctggcagccctggggacccccggccccccaccccagagacagactacccagagagcctgaccagctacccagaggaggactacagccctgtgggcagctttggagagcccggccccaccagccccctgaccaccccacctggctggagctgccacgtgtcccaggacaagcagatgctgtacaccaaccacttcacccaggagcaggtgcctgtgcctgcccccaggagcatccacaagagcagccaggatggagacaccccagcccaggccagccccccagaggagaaggtgcctgctgagctggatgaggtgggctcctgggaggaggtgtccccagccacagctgctgtgaggaccaagaccctggacaaggccggcgtgctgcacaggaccaagacagctgacaagggcaagaggctgaggaagaagcactggagcgcctcctggacagtgctggagggcggcgtgctgaccttcttcaaggacagcaagaccagcgctgctgggggcctgcggcagcccagcaagttcagcaccccagagtacacagtggagctgcggggggccaccctgtcctgggcccccaaggacaagagcagcaggaagaatgtgctggagctgcggagcagagatggcagcgagtacctgatccagcatgattctgaggccatcatcagcacctggcacaaggccatcgcccagggcatccaggagctgtctgctgagctgcccccagaggagagcgagagcagccgggtggactttggcagcagcgagcggctgggctcctggcaggagaaggaggaggatgcccggcccaatgctgctgccccagccctgggccctgtgggcctggagagtgacctgagcaaggtgcgccacaagctgaggaagttcctgcagaggcggcccaccctgcagagcctgcgggagaagggctacatcaaggaccaggtgtttggctgtgccctggccgccctgtgtgagcgggagaggagccgggtgcccaggtttgtgcagcagtgcatccgggctgtggaggcccggggcctggacattgatggcctgtaccgcatcagcggcaacctggccaccatccagaagctgcgctacaaggtggaccatgatgagcggctggacctggatgatggccgctgggaggatgtgcacgtgatcactggagccctgaagctgttcttccgggagctgcctgagcccctcttccccttcagccacttccggcagttcatcgccgccatcaagctgcaggaccaggcccggcgcagccgctgtgtgcgggacctggtgcgcagcctgcctgcccccaaccacgacaccctgaggatgctgttccagcacctgtgcagggtcatcgagcacggggagcagaacaggatgtctgtgcagagcgtggccatcgtgtttggccccaccctgctgcggcctgaggtggaggagacctccatgcccatgaccatggtgttccagaaccaggtggtggagctgatcctgcagcagtgtgccgacatcttccccccccactag

SEQ ID NO: 294297 - DNA, 1566 bp, Artificial Sequence
  derived and/or modified sequence
atgcagcccggcctgagccctggcagccctggggaccccaggcctcccaccccagagacagactacccagagagcctgaccagctacccagaggaggactacagccctgtgggcagctttggagagcccggccccaccagccccctgaccaccccacctggctggagctgccacgtgtcccaggacaagcagatgctgtacaccaaccacttcacccaggagcaggtgcctgtgcctgcccccaggagcatccacaagagcagccaggatggagacaccccagcccaggccagccccccagaggagaaggtgcctgctgagctggatgaggtgggctcctgggaggaggtgtccccagccacagctgctgtgaggaccaagaccctggacaaggccggcgtgctgcacaggaccaagacagctgacaagggcaagaggctgaggaagaagcactggagcgcctcctggacagtgctggagggcggcgtgctgaccttcttcaaggacagcaagaccagcgctgctgggggcctgcggcagcccagcaagttcagcaccccagagtacacagtggagctgcggggggccaccctgtcctgggcccccaaggacaagagcagcaggaagaatgtgctggagctgcggagcagagatggcagcgagtacctgatccagcacgacagcgaggccatcatcagcacctggcacaaggccatcgcccagggcatccaggagctgtctgctgagctgcccccagaggagagcgagagcagccgggtggactttggcagcagcgagcggctgggctcctggcaggagaaggaggaggatgcccggcccaatgctgctgccccagccctgggccctgtgggcctggagagtgacctgagcaaggtgcgccacaagctgaggaagttcctgcagaggcggcccaccctgcagagcctgcgggagaagggctacatcaaggaccaggtgtttggctgtgccctggccgccctgtgtgagcgggagaggagccgggtgcccaggtttgtgcagcagtgcatccgggctgtggaggcccggggcctggacattgatggcctgtaccgcatcagcggcaacctggccaccatccagaagctgcgctacaaggtggaccatgatgagcggctggacctggatgatggccgctgggaggatgtgcacgtgatcaccggggccctgaagctgttcttccgggagctgcctgagcccctcttccccttcagccacttccggcagttcatcgccgccatcaagctgcaggaccaggcccggcgcagccgctgtgtgcgggacctggtgcgcagcctgcctgcccccaaccacgacaccctgaggatgctgttccagcacctgtgccgggtgattgaacatggagagcagaacaggatgtctgtgcagagcgtggccatcgtgtttggccccaccctgctgcggcctgaggtggaggagacctccatgcccatgaccatggtgttccagaaccaggtggtggagctgatcctgcagcagtgtgccgacatcttccccccccactag

SEQ ID NO: 294298 - DNA, 1647 bp, Artificial Sequence
  derived and/or modified sequence
atgcagcccggcctgagccccggcagccccggcgacccccggccccccacaccagagaccgactatccagaatctctgacctcttacccagaagaagattactcccccgtgggatcttttggagagccaggtccgacaagccctttgaccacgcctcccggctggtcatgtcacgtcagtcaggataaacaaatgttgtatacaaatcatttcacccaggagcagtgggtacgcctggaggaccctcacggaaaaccatatttctacaacccagaggactccagtgtgcggtgggagctgcctcaggttcccgtccctgcgccaagatcaatccacaaatctagtcaagatggagacacgccagcacaggccagccctcccgaggagaaggtgcccgcagagttagacgaggtgggttcttgggaggaagtgtcgccagccacggcggcagttaggaccaaaacattggacaaggcaggggtgctgcaccggactaagacagcggacaagggcaagcggctgagaaagaaacattggtccgcctcctggacggtgctggaaggaggtgtgttgacattttttaaagactctaaaacttctgcagccggaggactgcgccaaccttccaaatttagcactccagaatacactgtcgaactgaggggtgcaacactatcatgggcacccaaagacaaatcctcccgcaaaaacgttttggaacttaggtctcgggatgggtccgagtacctcattcagcacgacagcgaggcaatcatctctacatggcataaggctatcgcccagggtattcaggagctgtcagctgagttgcctccggaggaatctgaaagctcccgcgtagacttcggtagctctgaacgattaggctcttggcaggaaaaggaagaggacgctagacccaacgctgccgctcccgccctggggcccgttgggttagagtctgacctgagtaaggttagacacaagcttagaaaatttcttcaacggcgacctactttgcaatccctccgtgaaaaaggctatatcaaggaccaagtgttcggatgtgccctggccgccttgtgcgagagagaaagatcccgagtgcctaggtttgttcagcaatgtatccgtgccgttgaagcaagaggactggacattgacggactctacagaatttctggaaatcttgcaacaattcagaagctccgctataaagtggaccatgatgaacggcttgacctggatgatggacgatgggaggacgtacacgtaatcactggtgccctgaaactattcttcagggaactcccagaacctctgtttccattctcacattttcggcagttcatcgcagccataaagctccaggaccaggcacggagaagcagatgtgttagagacctggttcgttcacttcctgcccccaaccatgatacactccgcatgctgttccagcacttatgccgggtcatagaacatggagagcagaacagaatgtccgtgcagagtgttgctatagtcttcgggcctactcttctgagaccagaggtggaagaaacctcgatgcctatgacgatggtctttcagaaccaggtagtggaactgattcttcagcagtgcgcggacatctttcccccccattag

SEQ ID NO: 294299 - DNA, 2670 bp, Artificial Sequence
  derived and/or modified sequence
atggccgccgacgtggtgggcgacgtgtacgtgctggtggagcacccatttgaatacacaggcaaggacgggcgcagggtagcaataagacctaacgagaggtatagactgctcagaaggagtacggagcactggtggcacgtccgccgcgagccaggcggtcgacctttctatttgcccgctcagtatgtcagggaacttcctgcactcggcaacccagctgccgcagccccacctggcccgcaccccagcccagcagcccccgagcctctggcttacgactacaggttcgtttctgctgctgccacagcaggccctgacggcgcacctgaggagtccggcgggcgggcgtcttctttatgcggtcctgcccagcggggagcagccactcagcggagttcacttgctcccggcttaccggcttgcctgtatttacggcctgccgccccagtccgacccgctcaatcactcaacgatctggcctgcgcggccgtatccccacccgcaggactgctggggagtagcggcagttttaaggcttgttccgtcgcgggctcatgggtctgtccgaggcctctggcccggtcggactccgaaaacgtctatgaggtgatccaggacttgcacgtcccaccaccagaagaatccgctgagcaggtggacgaccccccggagcctgtctacgccaatattgagcggcagccacgcgccacatctccaggggccgcagcggccccacttcccagcccagtgtgggagacccataccgacgctggcacaggaaggccttactattacaacccagatactggcgtaacaacgtgggagagcccctttgaggccgccgagggcgctgcatcacctgcaacatctcccgcctccgttgatagccacgtgtccctggagacagagtggggccagtactgggacgaggagagccggagagtgttcttctataaccctttgacaggggaaacagcttgggaagatgaggccgagaatgagcctgaagaagagctcgagatgcagccaggactgtcccccggatcgcccggggaccctcgaccgccaacgccagaaacagactacccagagagcctgacctcttaccccgaggaggactatagtccagtgggaagctttggcgagcccggtcctacgtcaccactcaccaccccgcccggctggtcctgccatgtgtcacaggacaaacagatgctttataccaaccacttcacccaggaacaatgggttagactggaggacccccacggtaagccatacttctataaccctgaggattctagcgtccgatgggagctcccccaggtcccagtacccgccccccgctccatacataagagttctcaggacggcgatactcccgcgcaggcaagccctcctgaggagaaggtccccgcagagttggatgaggtggggtcatgggaggaggtgtcccccgccaccgccgccgtgagaactaaaaccttagataaagctggtgtcctgcatcgtaccaaaaccgctgataaggggaagcgcttgcggaaaaaacattggagcgctagctggacagttctggaaggaggagtcttaacctttttcaaggactccaaaacatccgccgctggaggcctgagacagcccagcaagttcagtacacccgaatacacggtagagctcagaggggcaacgctgtcttgggctcctaaggataaatcttctaggaaaaacgtgttagagctgcgttcgcgggacgggagtgagtatctcatccagcacgattccgaagctatcatctcaacctggcataaagcgattgcccaggggattcaagagttgtccgccgaattaccacctgaggaatcggagtcgtcccgagtggacttcggatcatccgagagactcggctcttggcaagaaaaagaagaagacgctaggcctaacgcggccgcacccgcactgggcccagttgggctcgagagcgatctgtctaaggtacgacacaagctgcggaaattcctgcagagacgaccaacgttacagagcctccgggaaaaggggtacatcaaggatcaagtatttgggtgcgccctggccgccctctgtgagagagagcggagtcgagttcctcgcttcgtccagcagtgcattagggcagtcgaggccaggggactggacatcgatggactatacagaatcagtggtaacctggcgacgatccagaaactgaggtataaagttgatcatgacgagcgacttgacctggacgacggccggtgggaagacgttcatgtgatcactggcgcactcaagctgttcttccgcgaactccccgaaccgctgttccccttcagccacttcagacagttcattgccgccatcaagctacaggatcaagccagacggtcaagatgcgtccgggacctagtccgctccttacctgcccccaaccatgacacgctgaggatgctcttccagcacctctgtcgcgtcatcgaacatggggagcagaatagaatgtctgttcagtctgtagccatagtattcggccctacactgctgcgccctgaggtagaagagacatccatgcctatgactatggtatttcagaaccaggtggtcgaactgatcctacagcagtgcgccgacatctttcctccgcactag

SEQ ID NO: 294300 - DNA, 2589 bp, Artificial Sequence
  derived and/or modified sequence
atggccgccgacgtggtgggcgacgtgtacgtgctggtggagcaccccttcgagtataccggcaaagatggtcgtcgcgtggccatcaggccgaatgaacggtaccggctactccgcaggagtaccgaacactggtggcacgtgcgccgagaacccggcggacgccccttttacctgccagctcagtatgttagggagctgccggcgctgggtaaccccgccgcagccgcccctccaggtccccacccatctcccgcagctcctgagccactggcttacgactatagatttgtttcggcggcggctacagcaggacccgacggcgcccctgaggaatcaggaggccgggcatcatctctgtgtggtccagcccagagaggagccgcaacccagagatcgtccttggctccaggcttgcctgcttgtctttatctaagacccgccgccccagtacggccagcacagagtttgaacgacctagcatgtgccgccgtcagtcctcctgcaggtttgctgggttcctcaggcagctttaaagcatgttcagttgccggatcatgggtgtgtccccgcccactggcccggagtgactccgaaaacgtttatgaagttatacaggatttgcacgtgcctccaccggaagaaagtgcggagcaggtggacgaccccccagaaccagtctacgcgaacattgaacgccagcctcgggctacatcacccggtgctgctgccgcacctctcccctcccctgtgtgggagacacacacagatgctgggacaggtaggccttattattacaatccggataccggggtcacaacatgggaaagccccttcgaggctgcagaaggagccgcgtctcccgctacgtcacccgcgtcagttgacagccacgtttcgctcgagacagagtggggacagtattgggatgaggaaagcaggcgcgttttcttctacaatcccttaaccggagaaaccgcttgggaagacgaagctgaaaatgaacctgaagaggagctcgagatgcagccggggctttctccaggcagcccgggcgatccacggccacctacccctgagacagattatcccgaatcgctcacatcataccccgaggaggactattctcccgtgggctccttcggcgaaccagggcctacaagcccattgactaccccgcctggttggtcctgccatgtgtcacaagacaaacaaatgctctacacgaatcacttcacacaggagcaggtgccggttcctgcaccccggagcatccacaagtcatcacaggacggcgacacccccgcacaggcttctccgccagaggagaaagtgccagccgagcttgatgaggtgggctcctgggaggaagtgagtccggccaccgccgctgtgcgtactaagaccctagacaaggctggcgtgttgcatcgcaccaaaaccgccgataaggggaaacgtttgcgcaagaaacactggtccgcctcctggacagtgttggaaggaggagtgcttacattttttaaggacagcaaaacttctgcagcaggcggcctgcgtcaacctagcaagtttagcactcctgagtacacagtggaactgcgcggcgcgacgctttcttgggcaccaaaagacaaaagcagtcgcaagaacgtgctggagctgaggtcacgggacgggagtgaatatctgatacagcatgatagtgaggccatcatcagtacctggcataaagccatagcccagggaatccaggagctgtcagcagagctgcccccagaagagtcagaaagttcccgagtcgatttcggttccagtgaaaggttggggagctggcaggaaaaggaagaagatgcgagaccaaacgccgccgctcctgccttggggccagttgggctggaaagcgatctttctaaagtgcgacacaaactgcgcaaatttctgcaaagaagacccaccctgcagtctctgcgggagaagggttacatcaaggatcaagtgttcggttgcgctctggccgcactctgtgagagagagaggtctcgagtgcctcgcttcgtccagcaatgcatccgcgctgtggaggcaagggggctggacattgatgggctgtaccgcatctcaggaaatctggcaactatccagaaactacgttacaaagtcgaccacgatgaaagattggatctggacgacggaaggtgggaggacgttcatgttatcaccggtgctctaaaactcttcttccgggaacttcccgaacccctttttcccttttcccatttccgccaattcatagctgccatcaaactccaggaccaggctcgacggtccagatgtgtccgtgatctggtccggtctctccctgctcccaaccatgacacattgcgcatgctttttcagcatctgtgcagagtcattgaacatggggaacagaaccggatgtcagtgcagtcggtggccatcgtctttgggcccacgctcctgcgccccgaggtcgaggagacctcaatgcccatgacgatggtttttcagaatcaggttgtggagctgatcctgcagcaatgcgccgacattttccccccgcattag

SEQ ID NO: 294301 - DNA, 1647 bp, Artificial Sequence
  derived and/or modified sequence
atgcagcccggcctgagccccggcagccccggcgacccccggccccctacccccgagacagactacccagagtctctcacatcctatccagaggaggattactcgcccgtcggctcgttcggcgaacccggccctacgtccccactgaccactcctcccggatggtcttgccacgtcagtcaggacaagcagatgttgtataccaaccatttcacacaggaacagtgggtacgccttgaagacccgcatggaaagccttacttctataaccccgaagattctagtgttcgttgggaactgccacaggtaccagtacctgcccccagatccatccacaaatccagccaggacggcgatacaccagcacaggcaagtccacctgaagaaaaagtccccgccgaacttgacgaggtgggaagctgggaggaagtgagtcctgcgactgctgccgtgcgtaccaagactcttgataaggccggcgtgctccatcgcaccaagactgccgataagggtaaacgactacgaaagaaacattggtcagcttcttggaccgtgctagagggcggcgtcctgactttttttaaagactcaaagaccagcgccgcggggggcctgcgccaaccttcgaagttttctaccccagagtataccgtcgagcttaggggggctacactgagttgggctccgaaggataagtcatctcgcaaaaatgtattagagctcaggtcccgcgacggtagtgagtatctcatccagcacgattcagaggccatcattagcacttggcataaggccattgcccaggggattcaggagctgtcagccgagcttccgccggaggaaagtgaaagcagccgcgtcgattttgggtctagtgagagactggggagctggcaggaaaaggaagaagacgcaaggcctaacgccgctgcccctgctttgggccccgtaggcctggaaagtgacctcagtaaagtccgtcacaaactgcgcaaatttttgcagagacgaccaaccctgcagagtctgcgcgagaaagggtacattaaggatcaagtgttcggttgcgcgctggctgccttatgtgagcgggagcggtcacgcgtgcctagatttgtccagcaatgcattcgagctgtagaggcccgaggcctcgacatcgacggattgtaccgaataagcgggaacttggccactatccagaagctgaggtacaaggtggaccacgacgaaagactggacttggacgacggacgttgggaggatgtccacgtgatcacaggagcattgaaactgttcttccgcgagttgcctgagccactttttcctttctctcacttcagacagttcatcgcagccatcaagctgcaggaccaagctcggcggtctcgctgtgtgagagacctggtccggtccctgccggccccgaatcatgataccctgcgcatgttgtttcaacatctgtgtagagtcattgagcatggggagcagaataggatgtctgtgcagtcagtggccattgtgttcggaccaactctgctgcggccagaagtcgaggaaaccagcatgccaatgactatggttttccagaaccaagtcgtcgagctgatcctgcagcagtgcgcagatatcttccctccacattag

SEQ ID NO: 294302 - DNA, 1566 bp, Artificial Sequence
  derived and/or modified sequence
atgcagcccggcctgagccccggcagccccggcgacccccggccccccacacccgagactgactaccctgaatcactgacttcatacccagaagaagattattctcccgtcgggagtttcggcgagccagggccaacgagcccacttactacccccccaggctggagttgtcatgtctcccaggataaacagatgctatatactaatcactttacccaggaacaggtgcccgtccctgcaccccgatctattcataagtccagccaggatggcgatacacctgctcaggcttctcctcccgaggagaaagtcccagccgagctggacgaggtcgggtcttgggaggaggtgtcaccagctacagctgctgtccggacaaaaactctcgataaggctggcgtgctgcaccgaaccaaaactgctgacaagggaaagcgactgcgcaagaagcactggtccgcaagctggactgtactggaggggggtgtgctgaccttcttcaaagactctaaaactagtgctgcaggcggactgcgccaaccaagcaagtttagtactcctgagtacactgtggaattgaggggcgctaccctgtcatgggctccaaaggacaaaagtagccgaaagaacgtactcgaactccgcagccgtgacggttccgaatatctgattcaacatgacagtgaggctatcatctctacttggcataaggccattgcccagggtatacaggagctctccgcagagctgccacctgaagaatccgaaagttctagggtcgatttcggcagctccgagaggttgggcagttggcaggaaaaagaggaagacgctcgaccgaatgccgccgcaccggcacttggtcccgtgggccttgagagtgatctgagcaaggttcggcataagcttagaaaatttcttcagcgccggccaacacttcagtccctccgcgaaaagggctatatcaaggatcaggtcttcggctgcgctttagccgcgctgtgtgaaagggagcggtccagggttcctcgtttcgttcaacagtgtattcgagcagtggaggccaggggactcgatatagatggactctaccgcattagcggaaatctcgcaactatacagaaactgaggtataaagtggatcatgacgagaggctggatcttgacgacggccgctgggaagatgtgcacgtcatcacaggcgctctaaaactcttttttagagaattaccagagcccctttttccctttagccatttcagacagtttatcgctgccattaaattacaggaccaggcgcgtagatcaagatgtgtcagggatctcgtcaggagcctaccagcccctaatcacgataccttaaggatgcttttccagcacctctgccgggtcattgaacatggggaacagaatagaatgagtgttcagtctgtggctatcgtcttcggccccaccctgttaagacccgaagtcgaagagactagtatgccgatgactatggtgtttcagaatcaggtggtggaactaatactacaacaatgcgccgatatatttccaccgcattag

SEQ ID NO: 294303 - DNA, 1647 bp, Artificial Sequence
  derived and/or modified sequence
atgcaacccggactgtccccaggaagccctggcgatcccaggccacctacacccgagaccgattacccagagtccctaacctcttatcctgaggaggattactctccagtcgggtctttcggggagcccggaccaaccagcccactcaccacgccacctggctggtcatgtcacgtctcacaggacaagcagatgctctacaccaaccacttcactcaggagcagtgggtgcggctggaagatcctcacgggaagccttatttttataacccagaagactcctccgtcagatgggaactgccgcaagtcccagtacccgctcccaggtccatacacaagagttcccaggatggtgacactccggcacaggcctcccctccagaggaaaaagtgcctgctgagctggatgaagttggaagttgggaggaggtttcgccagcaaccgccgcagttagaacaaaaacactagataaggccggagtactccaccgaaccaaaaccgctgataagggaaaacgcttacgaaagaagcactggagcgccagctggaccgttctagagggcggagtgctcacattcttcaaagactccaagacgtccgcggctggcggactcaggcagcctagtaagttcagcacgcctgagtatacagtggagctgaggggggcaactttatcttgggctcccaaagataaatcaagtaggaaaaatgtcctggaactcagatcccgggacggctctgagtatctgatccaacacgatagcgaggctattatctccacatggcacaaggccattgcccaaggcatccaggaattatcagcagagctcccaccagaggaatctgaatccagtcgcgtggatttcgggtctagtgagcggttgggttcctggcaggagaaggaagaggatgcgaggcctaacgcagcagccccagccctggggcctgttgggttggagagcgatctttcgaaggttcggcataaactcaggaaattcctgcagcggaggcctaccttgcagtcactgcgggaaaaaggctatatcaaggatcaagtctttgggtgcgctctggcggcactttgcgagcgtgaacgatcccgtgtgccccgtttcgtgcagcaatgcattcgcgctgtggaggccagaggcctggatatcgacggcctttataggattagcgggaatctggccactatccaaaagttgcggtacaaagtggatcatgatgagagactggacctcgatgatggtcgttgggaggacgtgcatgttatcaccggggctctgaagctgttctttagagagctgcccgagccactttttccttttagccattttcgccaatttatcgcagctatcaagctccaggaccaggcccgacgcagtcgctgcgtccgtgacctcgtaaggtccctgcccgcacctaaccatgacactctgcgtatgcttttccagcatctctgccgggtgattgaacacggagagcagaataggatgagtgtccaatctgtagcgatagtctttggccctacgttgcttcggcctgaggtagaagagacaagcatgcctatgaccatggtgtttcagaatcaagtcgtggagctgatcctccaacaatgcgccgatatatttccaccacactag

SEQ ID NO: 294304 - DNA, 2670 bp, Artificial Sequence
  derived and/or modified sequence
atggccgcagacgtcgtgggtgatgtctacgtgctggtcgagcacccattcgagtacactggtaaggacgggagaagagtggcaattcgtcccaatgaacgttaccgcctgctgcggcgaagcacagaacactggtggcacgtgaggagagaaccgggtggtcgtccgttctacctacccgcacagtacgtgcgagaactgcccgcactgggcaatcctgctgctgcggctcccccaggtcctcacccgtccccggcagcaccggagcctctcgcctatgattatagatttgtaagtgcagccgcaacggcaggaccagatggagcaccagaagagtcaggagggcgtgcctctagtttatgtgggcctgctcagaggggggcagcgacacagcggagttctctggccccagggcttcctgcctgtctttatttgcgcccagccgcacccgtgaggccagcccagagcctgaacgacctggcctgtgccgctgtctcccctcccgctgggctgctcggctcttcaggttctttcaaggcctgcagcgtcgcagggtcctgggtgtgcccacggccacttgcgagaagtgatagtgaaaacgtgtacgaagtcatccaagaccttcacgtacctccgcctgaagaaagcgctgaacaagtggacgatccgcctgagcctgtgtatgcaaacatcgagcggcagccaagagcgacctcacctggtgcagccgctgcacctttgcctagcccagtctgggaaactcacacagatgctggtacaggcagaccttactattacaaccccgacacaggggtgacaacttgggagtcacctttcgaggccgctgaaggggctgcctcccctgcgacctctccagcttctgtggactcccacgttagtctggaaactgaatggggtcagtattgggatgaggagtcaagaagggtcttcttctataatcccctgacaggcgaaaccgcgtgggaagatgaggccgagaatgaaccagaagaggagttggaaatgcaacctgggcttagcccaggctcacctggggatccgcgtccgccaaccccagagaccgattaccccgaaagccttaccagttacccggaggaggattattctcctgttggaagttttggagagcctgggcctacatcgcctctgactacgccacccggatggagttgtcatgtttctcaggacaaacaaatgctgtacaccaatcattttacgcaagagcagtgggtccgcttggaggaccctcatggcaagccctatttttacaaccctgaggacagtagcgtccggtgggagctaccccaggtgccggtacccgcacccagatccatccacaagagtagtcaggacggtgacacaccagcccaggctagcccacccgaggagaaggtcccggcagagcttgatgaagtagggtcgtgggaggaagtatcacccgcaacggctgccgtgcgaactaagaccctcgacaaggccggagttttacaccggactaagacagccgataagggcaaacggctgcgaaaaaaacactggagtgctagctggaccgttcttgaggggggtgtcttaacgttctttaaagatagcaagacttccgccgctggaggcttacgacagcctagtaagttctcaactcccgagtacactgtcgagctcagaggagccaccctgtcatgggcccctaaggacaaatcgtctagaaaaaacgtgctggagctgcgatcacgcgatggtagtgagtatttaattcagcatgattccgaagccatcattagtacatggcacaaggccattgctcagggcatccaggaattgtccgcagaacttccaccagaggagagcgagtctagcagagtggacttcggctccagcgagcggctggggtcctggcaggagaaagaggaagacgcacggcctaatgctgcggctcctgctttagggcctgtgggactggaatctgatttgagcaaggtgcgccataagctgcgaaaattcctccagcggaggccaaccctacagtctctccgtgagaaagggtacattaaggatcaggtgttcgggtgcgccctggcagctctctgcgagcgggaaaggtcaagagttccgcgatttgtgcaacagtgtatcagggccgtcgaagccaggggtctggacatcgatggactttataggatctctggtaacctggcaaccatacagaagctccgctataaagtcgaccacgacgaaaggctggaccttgacgacggtagatgggaagatgtgcatgtgattacaggtgctcttaagctctttttccgggaactgcccgaacccttgttccctttctcccatttcagacagttcatcgccgctattaagctgcaggatcaagcccgacggtcccgttgtgtgcgggaccttgtgcgctccctcccggctccaaaccacgacaccctgagaatgctatttcagcatctgtgccgggtgatagaacacggagaacagaaccgtatgagcgtccagtcggttgccattgttttcggaccaacactactgaggcccgaagtagaagaaacaagtatgcctatgaccatggtatttcagaatcaggtcgtagagctcattctgcagcaatgcgcagacatcttccctccacactag

SEQ ID NO: 294305 - DNA, 2589 bp, Artificial Sequence
  derived and/or modified sequence
atggccgctgatgttgtgggagacgtgtacgtcctggtagagcacccgttcgaatacaccggaaaggatggcagaagagtggctattagaccgaacgagaggtatcgcctgcttcgcaggagcactgaacactggtggcacgtgcgcagagagcccggagggagacctttttacctgcctgctcaatatgtacgggaacttccggctttggggaacccagccgctgctgctcctcccggaccccatcccagtccagcagcccctgagccactcgcgtatgattataggtttgtgagtgccgcagcgactgcgggacccgatggagctcctgaagagtcaggcggtagagcctccagcttatgcggccctgcccagcggggagcagctacacagaggtctagtctcgcacccggactgcctgcctgtttgtacctgaggccagcagctcctgttagacccgcacagagtctgaacgacttagcttgcgcagccgtgtctcccccagctggactactgggcagctctggatccttcaaggcctgtagtgtcgctgggtcatgggtgtgtccacggccattggctagatcagattcagaaaatgtctatgaggtcatccaggatcttcacgttccccctccggaagagtccgcggagcaagtggacgacccacctgagcccgtgtatgctaacattgagcggcagcccagagcaaccagtccaggtgcagccgcagctccattgccgtcgcctgtatgggaaactcacacagatgcagggacaggaagaccatactattacaatcccgacacaggagtaacaacctgggaatccccctttgaagcagctgaaggcgctgcctctcccgctactagccccgcttctgtggattctcatgtgtccctggaaactgagtggggccagtactgggacgaggaatctcgcagagtgtttttctacaatccgctgaccggagagactgcttgggaggatgaagcagagaatgaacccgaagaagagctggagatgcagcccggactctctccaggctccccaggagatccaaggccacccacgccagaaacggactaccctgagagtctaacctcatacccggaggaggactatagtcccgtcggaagtttcggggaacctggacccacatctccattgactactcctccgggttggtcctgtcatgttagccaggacaaacagatgctgtatacaaaccactttacacaggaacaagttccggtacctgcccctcgtagtattcacaagagctcccaagacggggacacccctgcccaagcctctccccctgaggagaaagtccctgccgaattggacgaggtaggtagctgggaggaggtttcccctgccacagccgcagtgcggacaaagacacttgataaagcaggtgttttacacagaacgaagactgctgataagggcaagaggctccggaaaaaacattggagtgccagttggacagtgcttgagggcggagtgctaacattcttcaaggactcgaagacatcggctgctggaggtttacggcaaccctccaagttttctaccccagagtacacagtggaactgcgtggcgcaaccctgtcctgggcccctaaggataagagcagtcgaaaaaatgttctggaattgagatcgcgcgatgggtcagagtacctcattcagcacgattccgaagctatcataagcacttggcacaaggccattgctcagggcatccaggagctttccgcagaacttccccctgaggagtcagagtctagtagagtggattttggctcctcagaacgcctggggtcttggcaagaaaaagaagaggacgctagaccaaatgccgctgcaccagcgctgggtcccgtgggcttggaatcagatctttccaaggttcgccacaagctgagaaagtttttgcaacgtcgcccaacgctgcagtctctgcgggagaaggggtacataaaagatcaagttttcggttgcgctcttgcggctctgtgcgagcgcgagcgttctcgcgtcccccgatttgtgcagcagtgcattagggcagtcgaagcgaggggactggatatcgacggactgtaccgtatctctggaaacctggccacaatccaaaagcttcggtataaggttgaccatgatgagagactcgatctggacgacgggagatgggaagacgtccacgttatcaccggagctcttaagctcttctttagggagttgcctgaacccctgtttccctttagccacttcagacagttcatcgctgctatcaagctgcaggatcaggctcgcaggtcccgctgcgtgcgggatctggttcgctccctgcctgcgccaaatcacgacacactgagaatgctcttccaacatttatgtagggtcatcgagcacggcgagcagaatagaatgtccgtccagtccgtcgctattgtgttcggccctacactactgcgccctgaagtcgaggagactagcatgccaatgacaatggtcttccagaaccaggtggtggaacttatcctccagcagtgcgctgatatctttccaccccattag

SEQ ID NO: 294306 - DNA, 1647 bp, Artificial Sequence
  derived and/or modified sequence
atgcagcctggattatcgcctggctcccccggagaccccagacctcccacaccagaaacggactatccagagtctctgacatcctatcccgaggaggactattcacccgtagggtctttcggagagcccggtcctacttcccccttgactacacctcccggttggtcctgtcatgtgtcgcaggacaagcagatgctgtatacaaaccactttacccaggaacagtgggtcagactagaggatccgcatggtaaaccatacttctataatccagaagactcctcagtgagatgggaattgccccaggtacccgtacctgcaccccgttcaatacataaatcttctcaggacggagacactccagcacaggcatcgcctccagaggagaaggttcctgccgaactagacgaggtggggtcctgggaagaagttagtccagctaccgccgctgtcaggacaaaaaccctcgacaaggctggggtccttcaccgaacaaaaaccgccgacaagggtaagcggctgcgaaagaaacattggtcagcaagctggactgtcctggagggaggcgttctgacattcttcaaggatagcaaaacctcagccgcagggggactgaggcagcccagcaagttcagcaccccagaatatacagtcgaactaagaggggctactcttagttgggcacccaaagataagtcttcccggaagaatgtactcgagcttcgctctcgagatggaagtgagtatttgatccagcatgactcggaggctattatttccacctggcataaagccatcgcccaagggattcaggagttgagcgcagaattgccccctgaggaatctgaaagcagtagagtggactttggaagcagcgaacgtctgggctcatggcaggaaaaagaggaggacgctcgtccaaatgccgcagccccagctttgggacccgtcggcctggaaagcgacttgtccaaggtccgccacaaactgaggaaattcctccagcgtcggcctaccttgcagtcacttagggagaagggctacataaaggaccaggtctttggatgcgcattggccgctctctgtgagagggagagaagccgcgtcccgaggttcgtgcagcagtgtatcagagcagtggaagcccgagggcttgatatcgacgggctttaccggatctccggaaatctcgcgactatacagaaacttaggtataaggtggatcatgacgagagattagacttggacgatggcagatgggaggatgtgcatgtaatcaccggtgccttaaagctgttttttcgggagctgccagaacctctgttccctttctctcatttccgacaatttattgcagccatcaagctgcaagatcaagcacggagatccagatgcgttcgcgacctggtccgttccctccctgctccaaaccatgacaccctaaggatgttgttccagcatctgtgccgtgtcatagaacacggggagcagaaccgcatgagtgtccagagcgtggctattgtgtttggcccaacacttctaaggccagaagtggaggaaacttctatgcccatgacaatggtctttcagaaccaggtggtggagctgatcttgcagcaatgtgccgacatatttcctcctcactag

SEQ ID NO: 294307 - DNA, 1566 bp, Artificial Sequence
  derived and/or modified sequence
atgcagcccggactttccccgggatcccctggggaccctcgccctcccacaccagagactgactatcccgaatcactgacttcgtatcctgaggaggattactctcctgttggctcctttggcgagccagggccaactagcccccttacaaccccaccagggtggagctgccacgtgtcccaggacaagcagatgctgtataccaatcacttcacccaagaacaagttccggtgccagcgcctcgctccatccacaaatcttcgcaagacggtgacacaccggctcaggccagcccgccagaggaaaaggtgccagccgagctggacgaagtggggtcctgggaggaggtgagccccgctacagccgctgtccggactaaaaccctcgacaaagccggagtgcttcaccgcacaaaaactgccgacaaggggaaacgcttgcgcaagaagcattggtccgcttcgtggactgtgttggagggaggcgttttaacattctttaaggactccaaaacctcagcggctggaggcttgaggcaacccagcaagttctcaacacctgagtataccgttgagctgaggggagctacactgtcctgggccccaaaggataagtccagtcgcaaaaatgtgctggaacttagaagcagagatggttccgagtatctcatccagcatgactccgaagcgattatatctacttggcacaaagctattgcccaggggatccaggaactcagcgccgaactcccccctgaggaatccgagtcttcaagggtggacttcggctcctctgagaggctcggatcgtggcaggagaaagaggaagacgctcgccctaacgccgcagctcccgctttgggccctgtcggtctggaatcagacttgagtaaggttcggcacaagctgcggaaatttctacagcgcagacccactttacagtcactgcgagagaaaggctacatcaaagatcaggtatttggatgcgctctggcggcactgtgcgagagggaaagatcaagggtaccacgttttgtacaacagtgcatcagggctgtcgaagctagaggactagacatagacggcctgtaccggatctcgggcaatcttgccacaatccaaaaacttcggtataaggtggatcacgacgagaggcttgatctggacgacgggagatgggaagacgtgcatgtgattaccggagccctgaagctgttctttagagagttacctgagccattatttccattcagccatttcagacagtttattgcagctatcaaactgcaggaccaggctagacggagccgctgtgtgagagacctggtaaggagtttgcctgccccaaatcacgacaccctcagaatgctgttccagcacctttgtcgggttatcgaacacggcgagcaaaaccgaatgagtgtacaatctgtggccatagtattcgggccaactctgctacggccagaggtggaggaaacgtctatgccaatgaccatggtattccaaaatcaggtggtggagttgattttgcagcaatgtgctgatatattcccaccgcattag

SEQ ID NO: 294308 - DNA, 3628 bp, Artificial Sequence
  derived and/or modified sequence
acatgagcaggcagccccgactggaaggagcccggggccctcattccttctcctccactgggaactgagtggacgacccaccggagcccgtgtacgcgaacatagagaggcagccccgggccacttcaccgggcgccgctgcagccccccttcccagcccggtgtgggagacgcacacggacgcgggcaccgggcgcccctactactacaacccagacacgggagttaccacctgggagtcgccctttgaggctgccgagggtgccgccagcccagccacctcccctgcctcggtggacagccacgtgagccttgagaccgagtggggccagtactgggatgaggagagccgcagggtgttcttctacaacccgctgacgggcgagacggcctgggaggacgaggccgagaacgagcccgaggaggagttggagatgcagccgggcctgagccctggcagcccaggggacccgcggccccccactcccgagacggactaccccgagtcgctgaccagttaccccgaggaggactattctcccgtgggctctttcggtgagcccggccctacctctcccttgaccacaccccccggctggtcttgtcatgtcagccaggacaagcagatgctctacaccaaccacttcactcaggagcagtgggtgaggctggaggacccccacgggaagccatacttctacaatccagaggactcctctgttcgatgggagctgccccaggtccctgtccctgcccctcgaagcatccataaatccagccaggatggtgacaccccagcccaggccagccctccagaggagaaggtcccagcagagctggatgaggttgggagctgggaggaagtctctcctgccacagctgctgtgaggaccaagaccttggacaaggcaggggtgctccatcgcaccaagacggcagacaagggaaagcggctccggaagaagcactggagtgcctcctggactgtgctggagggtggcgtcctgacattcttcaaggactcaaagacctcggctgcaggcggcctgaggcagccttccaagttttccacccctgagtacacagtggagctgaggggggccactctctcctgggcccccaaagacaaatccagtaggaagaatgtgctggagctacggagccgagatggctctgagtacctgatccagcacgactcggaggccatcatcagcacctggcataaggccattgctcagggcatccaggagctgtccgcagagctgcccccagaggagagcgagagcagcagagtggacttcgggtcgagcgagcgcttgggaagctggcaggagaaagaggaggacgcgcgaccgaatgcagccgcgcccgccctgggccccgtgggcctggagagcgacttgagcaaggtccggcacaagctccgcaagttcctccagaggcggcccacactgcagtcgctgcgggagaagggctacatcaaagaccaggtgttcggctgcgcgctggccgcgctgtgtgagcgcgagaggagccgggtgccacgcttcgtgcagcagtgcatccgcgccgtcgaggcccgcgggctggacatcgacgggctgtaccgcatcagtggaaacctggccaccatccagaagctacgctataaggtggaccacgatgagcgccttgacctggatgacgggcgctgggaggacgtccacgttatcaccggagccctgaagctcttctttcgggagctgcccgagcccctcttccccttctcgcacttccgccagttcattgcggccatcaagttgcaggaccaggcccggcgcagccgctgtgtgcgtgacttggtgcgctcgctgcccgctcccaaccacgacactctgcggatgctcttccagcacctctgccgggtgatcgagcacggcgagcagaaccgcatgtcggtgcagagcgtggccattgtgttcgggcccacgctgctgcggcccgaggtggaagagaccagcatgcccatgaccatggtgttccagaaccaggtggtggagctcatcctgcagcagtgcgcggacatcttcccgccgcactgactgctggcctgtgactggggcggcggccgcggtcctgccacacaagctgggcggcggaggccacgcagccgggccttcttctctctgggaccctccgccagcgcatagccgcaggccggtgtgacttctgcaccctcggttctgagggtacggtgacccctagtgggcagtttgcaaaatgtgattccttcttcccaactccccatccccccttcccttcccgtcacgtcctgtttgggggttaattcggttttttctctgttgcatcgcgcctactgtgcgtgtgcgatagcgtgtgtgggggtgagagtttgttttctggaatggtaggtgctgggaggaggagtttgatggagggcttcctggctgcttctggccctcacctcgtggaggccttcacagagaccctgtgggccctggccctgtgctggcactgtgccagtcatgaggcagctctgatcacttccccactgtggaaacaggactgacccagccttcagtgtgggctgctgaagctatcctcctcaggcctcagggatgacctcctgcctgagcctctcacaggctggctgtgggccagtttcatctgctttcctgttgggggtcccgggcctctgctgtccttgacccactggtgttctgtgcaaggcttcttcccattcaccaagtgcacaccttgcatctgccgctcggcatgcaccagttccacacaccatcccattttacagacaaggacgctgaggcctgcagcagcagtgtgacttgctcaaggtccagtgagtgacctcattccccagaaaaggctcctcccacaccagagtacagcctgggtagggggaaaatcagttctttcagctaccacccatccaacctttgggcctatgtgaaaagaaaggaactaagctgggtgtgttctgtctggacctggggaggcccctgaaggcaaagagggaaactgtcccagctgttctgtcctaggggagggggacatagccctagcaggagctcccagcccctcttggcactctgacacacaagtacacccatctggggcccgctttgccacgaagagctgggcaggcctgcagggtgtggggaaggaggacacaacctcaagaaaggaagcgtgaaccccagggaacagcgggtcccttccctcctcagacacaagccacctcagcttgtggctcttggcccccagccccaccaacccacctgttcatttattcaacagacaatgacagctgatatttattggacatttgcaccatgccaagcattcggcttggattatcccatttgtttctcacagccggtatttattgtctgctcctctgtgccaggtgctgtgctctgggcaggggcactgcatgggctgcctgccctggtggagcttgtggtctgatgggtgaggctgacccaagcccaccccattgccaacagggccagggcaagagtacacacaggggcctcataccatatgtctaaatatttaaaagttatcaatcaagctaacaactgttaaataaaatatgttctattctcct

SEQ ID NO: 294309 - DNA, 2670 bp, Artificial Sequence
  derived and/or modified sequence
atggcggcggacgtggtgggggacgtgtacgtgctggtggagcaccccttcgagtacaccggcaaggacgggcgccgcgtggccatccggccgaatgagcgctaccggctgctgcggcgcagcaccgagcactggtggcacgtgcggcgtgagcccggcggccgccccttctacctgcctgcgcagtacgtgcgcgagctgcccgcgctgggcaaccctgccgccgccgcgccgccaggtccccacccgagccccgcggcccctgagccgctcgcctacgactaccggtttgtgagcgcggcggcgaccgcgggccccgacggcgcccccgaggagtccggaggccgagccagctccctgtgcggccctgcgcaacgcggcgccgcgacccagcgcagcagcctggcgcccggcctgccagcctgcctgtacctgcggcccgcggcgcccgtgcggcccgcgcagtccctgaacgacctggcctgcgccgccgtctcgcctcccgccggcctcctaggaagcagcggcagcttcaaggcctgcagcgtggcgggctcctgggtgtgcccgcggcctctggcgcgcagcgactcagagaacgtctacgaggtcatccaggacttgcacgtcccgccgccggaggagagcgcagagcaggtggacgacccaccggagcccgtgtacgcgaacatagagaggcagccccgggccacttcaccgggcgccgctgcagccccccttcccagcccggtgtgggagacgcacacggacgcgggcaccgggcgcccctactactacaacccagacacgggagttaccacctgggagtcgccctttgaggctgccgagggtgccgccagcccagccacctcccctgcctcggtggacagccacgtgagccttgagaccgagtggggccagtactgggatgaggagagccgcagggtgttcttctacaacccgctgacgggcgagacggcctgggaggacgaggccgagaacgagcccgaggaggagttggagatgcagccgggcctgagccctggcagcccaggggacccgcggccccccactcccgagacggactaccccgagtcgctgaccagttaccccgaggaggactattctcccgtgggctctttcggtgagcccggccctacctctcccttgaccacaccccccggctggtcttgtcatgtcagccaggacaagcagatgctctacaccaaccacttcactcaggagcagtgggtgaggctggaggacccccacgggaagccatacttctacaatccagaggactcctctgttcgatgggagctgccccaggtccctgtccctgcccctcgaagcatccataaatccagccaggatggtgacaccccagcccaggccagccctccagaggagaaggtcccagcagagctggatgaggttgggagctgggaggaagtctctcctgccacagctgctgtgaggaccaagaccttggacaaggcaggggtgctccatcgcaccaagacggcagacaagggaaagcggctccggaagaagcactggagtgcctcctggactgtgctggagggtggcgtcctgacattcttcaaggactcaaagacctcggctgcaggcggcctgaggcagccttccaagttttccacccctgagtacacagtggagctgaggggggccactctctcctgggcccccaaagacaaatccagtaggaagaatgtgctggagctacggagccgagatggctctgagtacctgatccagcacgactcggaggccatcatcagcacctggcataaggccattgctcagggcatccaggagctgtccgcagagctgcccccagaggagagcgagagcagcagagtggacttcgggtcgagcgagcgcttgggaagctggcaggagaaagaggaggacgcgcgaccgaatgcagccgcgcccgccctgggccccgtgggcctggagagcgacttgagcaaggtccggcacaagctccgcaagttcctccagaggcggcccacactgcagtcgctgcgggagaagggctacatcaaagaccaggtgttcggctgcgcgctggccgcgctgtgtgagcgcgagaggagccgggtgccacgcttcgtgcagcagtgcatccgcgccgtcgaggcccgcgggctggacatcgacgggctgtaccgcatcagtggaaacctggccaccatccagaagctacgctataaggtggaccacgatgagcgccttgacctggatgacgggcgctgggaggacgtccacgttatcaccggagccctgaagctcttctttcgggagctgcccgagcccctcttccccttctcgcacttccgccagttcattgcggccatcaagttgcaggaccaggcccggcgcagccgctgtgtgcgtgacttggtgcgctcgctgcccgctcccaaccacgacactctgcggatgctcttccagcacctctgccgggtgatcgagcacggcgagcagaaccgcatgtcggtgcagagcgtggccattgtgttcgggcccacgctgctgcggcccgaggtggaagagaccagcatgcccatgaccatggtgttccagaaccaggtggtggagctcatcctgcagcagtgcgcggacatcttcccgccgcactga

SEQ ID NO: 294310 - DNA, 2589 bp, Artificial Sequence
  derived and/or modified sequence
atggcggcggacgtggtgggggacgtgtacgtgctggtggagcaccccttcgagtacaccggcaaggacgggcgccgcgtggccatccggccgaatgagcgctaccggctgctgcggcgcagcaccgagcactggtggcacgtgcggcgtgagcccggcggccgccccttctacctgcctgcgcagtacgtgcgcgagctgcccgcgctgggcaaccctgccgccgccgcgccgccaggtccccacccgagccccgcggcccctgagccgctcgcctacgactaccggtttgtgagcgcggcggcgaccgcgggccccgacggcgcccccgaggagtccggaggccgagccagctccctgtgcggccctgcgcaacgcggcgccgcgacccagcgcagcagcctggcgcccggcctgccagcctgcctgtacctgcggcccgcggcgcccgtgcggcccgcgcagtccctgaacgacctggcctgcgccgccgtctcgcctcccgccggcctcctaggaagcagcggcagcttcaaggcctgcagcgtggcgggctcctgggtgtgcccgcggcctctggcgcgcagcgactcagagaacgtctacgaggtcatccaggacttgcacgtcccgccgccggaggagagcgcagagcaggtggacgacccaccggagcccgtgtacgcgaacatagagaggcagccccgggccacttcaccgggcgccgctgcagccccccttcccagcccggtgtgggagacgcacacggacgcgggcaccgggcgcccctactactacaacccagacacgggagttaccacctgggagtcgccctttgaggctgccgagggtgccgccagcccagccacctcccctgcctcggtggacagccacgtgagccttgagaccgagtggggccagtactgggatgaggagagccgcagggtgttcttctacaacccgctgacgggcgagacggcctgggaggacgaggccgagaacgagcccgaggaggagttggagatgcagccgggcctgagccctggcagcccaggggacccgcggccccccactcccgagacggactaccccgagtcgctgaccagttaccccgaggaggactattctcccgtgggctctttcggtgagcccggccctacctctcccttgaccacaccccccggctggtcttgtcatgtcagccaggacaagcagatgctctacaccaaccacttcactcaggagcaggtccctgtccctgcccctcgaagcatccataaatccagccaggatggtgacaccccagcccaggccagccctccagaggagaaggtcccagcagagctggatgaggttgggagctgggaggaagtctctcctgccacagctgctgtgaggaccaagaccttggacaaggcaggggtgctccatcgcaccaagacggcagacaagggaaagcggctccggaagaagcactggagtgcctcctggactgtgctggagggtggcgtcctgacattcttcaaggactcaaagacctcggctgcaggcggcctgaggcagccttccaagttttccacccctgagtacacagtggagctgaggggggccactctctcctgggcccccaaagacaaatccagtaggaagaatgtgctggagctacggagccgagatggctctgagtacctgatccagcacgactcggaggccatcatcagcacctggcataaggccattgctcagggcatccaggagctgtccgcagagctgcccccagaggagagcgagagcagcagagtggacttcgggtcgagcgagcgcttgggaagctggcaggagaaagaggaggacgcgcgaccgaatgcagccgcgcccgccctgggccccgtgggcctggagagcgacttgagcaaggtccggcacaagctccgcaagttcctccagaggcggcccacactgcagtcgctgcgggagaagggctacatcaaagaccaggtgttcggctgcgcgctggccgcgctgtgtgagcgcgagaggagccgggtgccacgcttcgtgcagcagtgcatccgcgccgtcgaggcccgcgggctggacatcgacgggctgtaccgcatcagtggaaacctggccaccatccagaagctacgctataaggtggaccacgatgagcgccttgacctggatgacgggcgctgggaggacgtccacgttatcaccggagccctgaagctcttctttcgggagctgcccgagcccctcttccccttctcgcacttccgccagttcattgcggccatcaagttgcaggaccaggcccggcgcagccgctgtgtgcgtgacttggtgcgctcgctgcccgctcccaaccacgacactctgcggatgctcttccagcacctctgccgggtgatcgagcacggcgagcagaaccgcatgtcggtgcagagcgtggccattgtgttcgggcccacgctgctgcggcccgaggtggaagagaccagcatgcccatgaccatggtgttccagaaccaggtggtggagctcatcctgcagcagtgcgcggacatcttcccgccgcactga

SEQ ID NO: 294311 - DNA, 2296 bp, Artificial Sequence
  derived and/or modified sequence
cacgggagttaccacctgggagtcgccctttgaggctgccgagggtgccgccagcccagccacctcccctgcctcggtggacagccacgtgagccttgagaccgagtggggccagtactgggatgaggagagccgcagggtgttcttctacaacccgctgacgggcgagacggcctgggaggacgaggccgagaacgagcccgaggaggagttggagatgcagccgggcctgagccctggcagcccaggggacccgcggccccccactcccgagacggactaccccgagtcgctgaccagttaccccgaggaggactattctcccgtgggctctttcggtgagcccggccctacctctcccttgaccacaccccccggctggtcttgtcatgtcagccaggacaagcagatgctctacaccaaccacttcactcaggagcaggtccctgtccctgcccctcgaagcatccataaatccagccaggatggtgacaccccagcccaggccagccctccagaggagaaggtcccagcagagctggatgaggttgggagctgggaggaagtctctcctgccacagctgctgtgaggaccaagaccttggacaaggcaggggtgctccatcgcaccaagacggcagacaagggaaagcggctccggaagaagcactggagtgcctcctggactgtgctggagggtggcgtcctgacattcttcaaggactcaaagacctcggctgcaggcggcctgaggcagccttccaagttttccacccctgagtacacagtggagctgaggggggccactctctcctgggcccccaaagacaaatccagtaggaagaatgtgctggagctacggagccgagatggctctgagtacctgatccagcacgactcggaggccatcatcagcacctggcataaggccattgctcagggcatccaggagctgtccgcagagctgcccccagaggagagcgagagcagcagagtggacttcgggtcgagcgagcgcttgggaagctggcaggagaaagaggaggacgcgcgaccgaatgcagccgcgcccgccctgggccccgtgggcctggagagcgacttgagcaaggtccggcacaagctccgcaagttcctccagaggcggcccacactgcagtcgctgcgggagaagggctacatcaaagaccaggtgttcggctgcgcgctggccgcgctgtgtgagcgcgagaggagccgggtgccacgcttcgtgcagcagtgcatccgcgccgtcgaggcccgcgggctggacatcgacgggctgtaccgcatcagtggaaacctggccaccatccagaagctacgctataaggtggaccacgatgagcgccttgacctggatgacgggcgctgggaggacgtccacgttatcaccggagccctgaagctcttctttcgggagctgcccgagcccctcttccccttctcgcacttccgccagttcattgcggccatcaagttgcaggaccaggcccggcgcagccgctgtgtgcgtgacttggtgcgctcgctgcccgctcccaaccacgacactctgcggatgctcttccagcacctctgccgggtgatcgagcacggcgagcagaaccgcatgtcggtgcagagcgtggccattgtgttcgggcccacgctgctgcggcccgaggtggaagagaccagcatgcccatgaccatggtgttccagaaccaggtggtggagctcatcctgcagcagtgcgcggacatcttcccgccgcactgactgctggcctgtgactggggcggcggccgcggtcctgccacacaagctgggcggcggaggccacgcagccgggccttcttctctctgggaccctccgccagcgcatagccgcaggccggtgtgacttctgcaccctcggttctgagggtacggtgacccctagtgggcagtttgcaaaatgtgattccttcttcccaactccccatccccccttcccttcccgtcacgtcctgtttgggggttaattcggttttttctctgttgcatcgcgcctactgtgcgtgtgcgatagcgtgtgtgggggtgagagtttgttttctggaatggtaggtgctgggaggaggagtttgatggagggcttcctggctgcttctggccctcacctcgtggaggccttcacagagaccctgtgggccctggccctgtgctggcactgtgccagtcatgaggcagctctgatcacttccccactgtggaaacaggactgacccagccttcagtgtgggctgctga

SEQ ID NO: 294312 - DNA, 2670 bp, Artificial Sequence
  derived and/or modified sequence
atggccgccgacgtggtgggcgacgtgtacgtgctggtggagcaccccttcgagtacaccggcaaggacggcagaagagtggccatcagacccaacgagagatacagactgctgagaagaagcaccgagcactggtggcacgtgagaagagagcccggcggcagacccttctacctgcccgcccagtacgtgagagagctgcccgccctgggcaaccccgccgccgccgccccccccggcccccaccccagccccgccgcccccgagcccctggcctacgactacagattcgtgagcgccgccgccaccgccggccccgacggcgcccccgaggagagcggcggcagagccagcagcctgtgcggccccgcccagagaggcgccgccacccagagaagcagcctggcccccggcctgcccgcctgcctgtacctgagacccgccgcccccgtgagacccgcccagagcctgaacgacctggcctgcgccgccgtgagcccccccgccggcctgctgggcagcagcggcagcttcaaggcctgcagcgtggccggcagctgggtgtgccccagacccctggccagaagcgacagcgagaacgtgtacgaggtgatccaggacctgcacgtgcccccccccgaggagagcgccgagcaggtggacgacccccccgagcccgtgtacgccaacatcgagagacagcccagagccaccagccccggcgccgccgccgcccccctgcccagccccgtgtgggagacccacaccgacgccggcaccggcagaccctactactacaaccccgacaccggcgtgaccacctgggagagccccttcgaggccgccgagggcgccgccagccccgccaccagccccgccagcgtggacagccacgtgagcctggagaccgagtggggccagtactgggacgaggagagcagaagagtgttcttctacaaccccctgaccggcgagaccgcctgggaggacgaggccgagaacgagcccgaggaggagctggagatgcagcccggcctgagccccggcagccccggcgaccccagaccccccacccccgagaccgactaccccgagagcctgaccagctaccccgaggaggactacagccccgtgggcagcttcggcgagcccggccccaccagccccctgaccaccccccccggctggagctgccacgtgagccaggacaagcagatgctgtacaccaaccacttcacccaggagcagtgggtgagactggaggacccccacggcaagccctacttctacaaccccgaggacagcagcgtgagatgggagctgccccaggtgcccgtgcccgcccccagaagcatccacaagagcagccaggacggcgacacccccgcccaggccagcccccccgaggagaaggtgcccgccgagctggacgaggtgggcagctgggaggaggtgagccccgccaccgccgccgtgagaaccaagaccctggacaaggccggcgtgctgcacagaaccaagaccgccgacaagggcaagagactgagaaagaagcactggagcgccagctggaccgtgctggagggcggcgtgctgaccttcttcaaggacagcaagaccagcgccgccggcggcctgagacagcccagcaagttcagcacccccgagtacaccgtggagctgagaggcgccaccctgagctgggcccccaaggacaagagcagcagaaagaacgtgctggagctgagaagcagagacggcagcgagtacctgatccagcacgacagcgaggccatcatcagcacctggcacaaggccatcgcccagggcatccaggagctgagcgccgagctgccccccgaggagagcgagagcagcagagtggacttcggcagcagcgagagactgggcagctggcaggagaaggaggaggacgccagacccaacgccgccgcccccgccctgggccccgtgggcctggagagcgacctgagcaaggtgagacacaagctgagaaagttcctgcagagaagacccaccctgcagagcctgagagagaagggctacatcaaggaccaggtgttcggctgcgccctggccgccctgtgcgagagagagagaagcagagtgcccagattcgtgcagcagtgcatcagagccgtggaggccagaggcctggacatcgacggcctgtacagaatcagcggcaacctggccaccatccagaagctgagatacaaggtggaccacgacgagagactggacctggacgacggcagatgggaggacgtgcacgtgatcaccggcgccctgaagctgttcttcagagagctgcccgagcccctgttccccttcagccacttcagacagttcatcgccgccatcaagctgcaggaccaggccagaagaagcagatgcgtgagagacctggtgagaagcctgcccgcccccaaccacgacaccctgagaatgctgttccagcacctgtgcagagtgatcgagcacggcgagcagaacagaatgagcgtgcagagcgtggccatcgtgttcggccccaccctgctgagacccgaggtggaggagaccagcatgcccatgaccatggtgttccagaaccaggtggtggagctgatcctgcagcagtgcgccgacatcttccccccccactag

SEQ ID NO: 294313 - DNA, 2589 bp, Artificial Sequence
  derived and/or modified sequence
atggccgccgacgtggtgggcgacgtgtacgtgctggtggagcaccccttcgagtacaccggcaaggacggcagaagagtggccatcagacccaacgagagatacagactgctgagaagaagcaccgagcactggtggcacgtgagaagagagcccggcggcagacccttctacctgcccgcccagtacgtgagagagctgcccgccctgggcaaccccgccgccgccgccccccccggcccccaccccagccccgccgcccccgagcccctggcctacgactacagattcgtgagcgccgccgccaccgccggccccgacggcgcccccgaggagagcggcggcagagccagcagcctgtgcggccccgcccagagaggcgccgccacccagagaagcagcctggcccccggcctgcccgcctgcctgtacctgagacccgccgcccccgtgagacccgcccagagcctgaacgacctggcctgcgccgccgtgagcccccccgccggcctgctgggcagcagcggcagcttcaaggcctgcagcgtggccggcagctgggtgtgccccagacccctggccagaagcgacagcgagaacgtgtacgaggtgatccaggacctgcacgtgcccccccccgaggagagcgccgagcaggtggacgacccccccgagcccgtgtacgccaacatcgagagacagcccagagccaccagccccggcgccgccgccgcccccctgcccagccccgtgtgggagacccacaccgacgccggcaccggcagaccctactactacaaccccgacaccggcgtgaccacctgggagagccccttcgaggccgccgagggcgccgccagccccgccaccagccccgccagcgtggacagccacgtgagcctggagaccgagtggggccagtactgggacgaggagagcagaagagtgttcttctacaaccccctgaccggcgagaccgcctgggaggacgaggccgagaacgagcccgaggaggagctggagatgcagcccggcctgagccccggcagccccggcgaccccagaccccccacccccgagaccgactaccccgagagcctgaccagctaccccgaggaggactacagccccgtgggcagcttcggcgagcccggccccaccagccccctgaccaccccccccggctggagctgccacgtgagccaggacaagcagatgctgtacaccaaccacttcacccaggagcaggtgcccgtgcccgcccccagaagcatccacaagagcagccaggacggcgacacccccgcccaggccagcccccccgaggagaaggtgcccgccgagctggacgaggtgggcagctgggaggaggtgagccccgccaccgccgccgtgagaaccaagaccctggacaaggccggcgtgctgcacagaaccaagaccgccgacaagggcaagagactgagaaagaagcactggagcgccagctggaccgtgctggagggcggcgtgctgaccttcttcaaggacagcaagaccagcgccgccggcggcctgagacagcccagcaagttcagcacccccgagtacaccgtggagctgagaggcgccaccctgagctgggcccccaaggacaagagcagcagaaagaacgtgctggagctgagaagcagagacggcagcgagtacctgatccagcacgacagcgaggccatcatcagcacctggcacaaggccatcgcccagggcatccaggagctgagcgccgagctgccccccgaggagagcgagagcagcagagtggacttcggcagcagcgagagactgggcagctggcaggagaaggaggaggacgccagacccaacgccgccgcccccgccctgggccccgtgggcctggagagcgacctgagcaaggtgagacacaagctgagaaagttcctgcagagaagacccaccctgcagagcctgagagagaagggctacatcaaggaccaggtgttcggctgcgccctggccgccctgtgcgagagagagagaagcagagtgcccagattcgtgcagcagtgcatcagagccgtggaggccagaggcctggacatcgacggcctgtacagaatcagcggcaacctggccaccatccagaagctgagatacaaggtggaccacgacgagagactggacctggacgacggcagatgggaggacgtgcacgtgatcaccggcgccctgaagctgttcttcagagagctgcccgagcccctgttccccttcagccacttcagacagttcatcgccgccatcaagctgcaggaccaggccagaagaagcagatgcgtgagagacctggtgagaagcctgcccgcccccaaccacgacaccctgagaatgctgttccagcacctgtgcagagtgatcgagcacggcgagcagaacagaatgagcgtgcagagcgtggccatcgtgttcggccccaccctgctgagacccgaggtggaggagaccagcatgcccatgaccatggtgttccagaaccaggtggtggagctgatcctgcagcagtgcgccgacatcttccccccccactag

SEQ ID NO: 294314 - DNA, 1566 bp, Artificial Sequence
  derived and/or modified sequence
atgcagcccggcctgagccccggcagccccggcgaccccagaccccccacccccgagaccgactaccccgagagcctgaccagctaccccgaggaggactacagccccgtgggcagcttcggcgagcccggccccaccagccccctgaccaccccccccggctggagctgccacgtgagccaggacaagcagatgctgtacaccaaccacttcacccaggagcaggtgcccgtgcccgcccccagaagcatccacaagagcagccaggacggcgacacccccgcccaggccagcccccccgaggagaaggtgcccgccgagctggacgaggtgggcagctgggaggaggtgagccccgccaccgccgccgtgagaaccaagaccctggacaaggccggcgtgctgcacagaaccaagaccgccgacaagggcaagagactgagaaagaagcactggagcgccagctggaccgtgctggagggcggcgtgctgaccttcttcaaggacagcaagaccagcgccgccggcggcctgagacagcccagcaagttcagcacccccgagtacaccgtggagctgagaggcgccaccctgagctgggcccccaaggacaagagcagcagaaagaacgtgctggagctgagaagcagagacggcagcgagtacctgatccagcacgacagcgaggccatcatcagcacctggcacaaggccatcgcccagggcatccaggagctgagcgccgagctgccccccgaggagagcgagagcagcagagtggacttcggcagcagcgagagactgggcagctggcaggagaaggaggaggacgccagacccaacgccgccgcccccgccctgggccccgtgggcctggagagcgacctgagcaaggtgagacacaagctgagaaagttcctgcagagaagacccaccctgcagagcctgagagagaagggctacatcaaggaccaggtgttcggctgcgccctggccgccctgtgcgagagagagagaagcagagtgcccagattcgtgcagcagtgcatcagagccgtggaggccagaggcctggacatcgacggcctgtacagaatcagcggcaacctggccaccatccagaagctgagatacaaggtggaccacgacgagagactggacctggacgacggcagatgggaggacgtgcacgtgatcaccggcgccctgaagctgttcttcagagagctgcccgagcccctgttccccttcagccacttcagacagttcatcgccgccatcaagctgcaggaccaggccagaagaagcagatgcgtgagagacctggtgagaagcctgcccgcccccaaccacgacaccctgagaatgctgttccagcacctgtgcagagtgatcgagcacggcgagcagaacagaatgagcgtgcagagcgtggccatcgtgttcggccccaccctgctgagacccgaggtggaggagaccagcatgcccatgaccatggtgttccagaaccaggtggtggagctgatcctgcagcagtgcgccgacatcttccccccccactag

SEQ ID NO: 294315 - protein, 417 aa, Artificial Sequence
  derived and/or modified sequence
MASSKLREPVDEVFDLDLAVPETARLDSSLHKARAQLLAKGRRHRPSRSRLRDSASSAEDGEGSDGPGGKVTDGCGSPLHRLRSPLHSGPGSPAGGSFCLDPPGLRRSLDEDEPPPSPLTRYRPLHNAASHEGLAAASCSPPRSAPSSDSSPSFVRRHPRAEPHSEDDSRDASPPEPASPTIGLDKKTRRKFLDLGVTLRRASTGKSRKEKGSNRLSMGSRESVEGSGRSGGSPFLPFSWFTDSGKGSASSGSTTSPTCSPKHEGFSPKKSASQESTLSDDSTPPSSSPKIPSGPWQEAKCSYPYHTLSQSSDEFLDEPLPPVHHWTSQQVGQWLQSLNLEQYAAEFAARQVDGPQLLQLDGSKLKSLGLSNSHDRALVKRKLKEMAAAAEKERKAQEKAARQREKLRRREQEAKKS

SEQ ID NO: 294316 - DNA, 1254 bp, Artificial Sequence
  derived and/or modified sequence
atggccagcagcaagctgagagagcccgtggacgaggtgttcgacctggacctggccgtgcccgagaccgccagactggacagcagcctgcacaaggccagagcccagctgctggccaagggcagaagacacagacccagcagaagcagactgagagacagcgccagcagcgccgaggacggcgagggcagcgacggccccggcggcaaggtgaccgacggctgcggcagccccctgcacagactgagaagccccctgcacagcggccccggcagccccgccggcggcagcttctgcctggacccccccggcctgagaagaagcctggacgaggacgagcccccccccagccccctgaccagatacagacccctgcacaacgccgccagccacgagggcctggccgccgccagctgcagcccccccagaagcgcccccagcagcgacagcagccccagcttcgtgagaagacaccccagagccgagccccacagcgaggacgacagcagagacgccagcccccccgagcccgccagccccaccatcggcctggacaagaagaccagaagaaagttcctggacctgggcgtgaccctgagaagagccagcaccggcaagagcagaaaggagaagggcagcaacagactgagcatgggcagcagagagagcgtggagggcagcggcagaagcggcggcagccccttcctgcccttcagctggttcaccgacagcggcaagggcagcgccagcagcggcagcaccaccagccccacctgcagccccaagcacgagggcttcagccccaagaagagcgccagccaggagagcaccctgagcgacgacagcaccccccccagcagcagccccaagatccccagcggcccctggcaggaggccaagtgcagctacccctaccacaccctgagccagagcagcgacgagttcctggacgagcccctgccccccgtgcaccactggaccagccagcaggtgggccagtggctgcagagcctgaacctggagcagtacgccgccgagttcgccgccagacaggtggacggcccccagctgctgcagctggacggcagcaagctgaagagcctgggcctgagcaacagccacgacagagccctggtgaagagaaagctgaaggagatggccgccgccgccgagaaggagagaaaggcccaggagaaggccgccagacagagagagaagctgagaagaagagagcaggaggccaagaagagctag

SEQ ID NO: 294317 - DNA, 1254 bp, Artificial Sequence
  derived and/or modified sequence
atggcttcaagcaagctgcgcgagccagtcgatgaggtgtttgatctcgacctcgccgttccagaaactgccaggttagattcttcattgcataaggcccgtgctcagctgcttgcgaaaggccgtcgacacagaccaagtaggagtaggttaagggatagcgcctcttcagccgaggatggcgaggggagtgacggacctggaggcaaagttaccgatggctgtggaagtcccctgcaccggttgcgctccccacttcacagtgggccaggtagtcctgctggaggatctttttgcctggaccctcccggcttgaggcgcagtctcgacgaagatgagcctccccccagtcctttgactcgttaccgaccgctgcacaatgcagccagtcacgaagggctggccgccgcaagctgctctccgccccggagcgccccaagcagtgatagcagccccagttttgtacgccgccatccacgggcagaaccccacagcgaggatgactctcgtgacgcctccccacctgagccagcaagtcccacgattggactagacaaaaaaacccgcaggaaatttctagacctgggcgttacattacgccgcgcctcaaccggcaaaagcaggaaagaaaagggctctaatagactctccatgggcagtcgagagtcggtagagggctcaggtaggtccggaggatcgccatttttaccgttctcctggttcaccgactccggcaagggtagtgcttcctccggttctacgacatctcctacctgtagccccaaacacgaggggttttccccaaaaaaatccgctagccaagagagtacgttatccgacgatagtactccccccagctccagccccaagatcccctcgggcccgtggcaggaggcaaaatgtagctacccgtatcacacactgtctcagtcctcagatgaattcctggatgagcctttgcctcccgttcatcattggacatcccagcaggtggggcagtggctgcagagcctcaacctcgagcagtatgccgccgaattcgccgccagacaggtcgatgggccccagctgctgcagcttgatgggtccaagttgaagtccctgggactgagtaacagccacgacagggccctggtaaagcggaagctgaaggagatggctgctgcagctgaaaaagagcgcaaagcccaggagaaagctgcccggcagcgagaaaagctgagacgccgtgagcaagaggccaagaaatcatag

SEQ ID NO: 294318 - DNA, 1254 bp, Artificial Sequence
  derived and/or modified sequence
atggccagcagcaagctgcgggagcctgtggatgaggtgtttgacctggacctggccgtgcctgagacagcccggctggacagcagcctgcacaaggcccgggcccagctgctggccaagggccgccgccaccggcccagccgcagccggctgcgggacagcgccagcagcgcagaagatggagagggcagtgatggccctgggggcaaggtgacagatggctgcggcagccccctgcaccggctgcggagccccctgcacagcggccctggcagccctgctgggggcagcttctgcctggaccccccaggcctgcggcgcagcctggatgaagatgagcccccacccagccccctgacccgctaccggcccctgcacaatgctgccagccatgagggcctggccgccgccagctgcagccccccaagaagtgcccccagcagtgacagcagccccagctttgtgcggcggcaccccagggctgagccccacagtgaagatgacagcagagatgccagccccccagagcccgccagccccaccatcggcctggacaagaagaccaggaggaagttcctggacctgggcgtgaccctgcggcgggccagcacaggcaagagcaggaaggagaagggcagcaaccggctgtccatgggcagccgggagagcgtggagggcagcggccgcagcggcggcagccccttcctgcccttctcctggttcacagacagcggcaagggcagcgccagcagcggcagcaccaccagccccacctgcagccccaagcatgagggcttcagccccaagaagagcgccagccaggagagcaccctgagtgatgacagcaccccacccagcagcagccccaagatccccagcggcccctggcaggaggccaagtgcagctacccctaccacaccctgagccagagcagtgatgagttcctggatgagcccctgccccctgtgcaccactggaccagccagcaggtgggccagtggctgcagagcctgaacctggagcagtatgctgctgagtttgctgcccggcaggtggatggcccccagctgctgcagctggatggcagcaagctgaagagcctgggcctgagcaacagccatgaccgggccctggtgaagaggaagctgaaggagatggctgctgctgctgagaaggagaggaaggcccaggagaaggccgcccggcagcgggagaagctgcggcggcgggagcaggaggccaagaagagctag

SEQ ID NO: 294319 - DNA, 1254 bp, Artificial Sequence
  derived and/or modified sequence
atggccagcagcaagctgcgggagcccgtggacgaggtgttcgacctggaccttgcggtgccagaaacggccagactggactccagcctgcacaaggctcgcgcacagcttttagccaagggccggaggcacaggccctcccgctctcggctgagagactccgccagcagcgccgaagacggggagggcagcgacggccccggcgggaaggtgacagacggctgtggtagtccgctacatcggctgcgcagcccattacacagcggacctgggagtcccgcaggaggatcgttttgtctcgatccacctgggctccggaggagtctggatgaagatgagccaccaccttccccgctcacaaggtataggcccctgcacaacgcagcatctcacgagggtctggctgcagctagctgttcccctcccaggtcggctcccagctctgacagctccccctccttcgtgagacggcatccccgggccgagcctcatagcgaggacgactctcgcgatgcctctccgccagagccagcatccccaaccataggcctggataagaaaacaaggcgtaaatttctggacttgggagtgacactcagaagggctagcactggtaagtcccgaaaggagaaggggtccaacagactctcaatggggtcaagggaaagcgtggagggcagcggacgcagtggaggctcgccattcctgccattcagttggttcaccgactccggcaaggggtcagcctccagtggctcaactacatcacccacctgttccccaaagcacgagggattctcccctaagaagagtgcttcacaggagtcaaccctgagcgacgattctacaccaccaagctcgagtcctaagatcccgagcgggccatggcaggaggccaagtgcagctacccttaccacacactttcccagagctctgatgaattcctcgatgaacccctccctcccgttcatcattggacctcacagcaagtggggcagtggttgcagtccttgaacctggagcagtatgctgccgagtttgccgcaagacaggttgacggtcctcaactgctacagttggacgggtcaaaattgaagtctctcggcctgtcgaactcacacgatcgcgctctcgtaaaacggaagctcaaggaaatggccgctgcagccgaaaaagaacgcaaggcacaggagaaggccgctaggcagagagagaagctaaggcggcgagaacaggaggccaagaaaagctag

SEQ ID NO: 294320 - DNA, 1254 bp, Artificial Sequence
  derived and/or modified sequence
atggcaagctctaaactgagagagccggtggatgaagtcttcgacctcgatctcgcggtgccagaaacggccaggctcgactcatctctccataaagcgcgagctcaattgttggccaagggcagacgccatcgcccttcccggtctcgcctccgagactcagcgtctagtgccgaggatggcgaaggctctgatgggccagggggtaaagtaactgatggctgtggctcacctctccaccggctccggtcccccctgcactccggacctgggagtcctgctggcggtagcttctgtctggatcctcctggcctgcgcagatccctggacgaggatgagcctccgccaagcccgctcacccgctaccggcctctccacaatgctgcctcacacgagggactggcagcggcaagttgtagcccccctaggtcggccccttcatccgactcttcgcccagctttgtgcgcagacacccgcgagctgagccccattctgaggacgattcccgggacgctagccctccggagcctgcatcacctaccattgggctggataagaaaacccggagaaaatttctggatctcggggtgacgctgagaagagccagtactggcaagtctcgcaaagaaaagggctctaaccgtcttagtatggggagccgcgaatccgtcgaggggtctggtcgatctggcggtagtccgttcctgccgttcagttggttcacagactctgggaaaggctcagccagctccggtagcactacctccccgacctgctcacccaaacacgaaggcttcagccccaagaagtctgcctcacaggaaagtacactgagtgatgacagtacgcctcctagcagtagtcccaagattccttcgggtccctggcaggaagctaaatgctcatacccgtatcatacgctgtctcagtcatcagatgaatttctcgacgagcccctcccaccagtgcatcattggacctcgcagcaagtcgggcagtggctgcagagcctgaacctggaacagtacgccgctgagtttgccgctagacaagtggacggaccccagctcctccagctcgatggctcgaagctcaaatctcttggacttagcaactcccatgacagggccctagtaaagagaaagctaaaagaaatggcagcagcggctgagaaggagcgcaaagcacaggagaaagccgctcggcaaagggaaaagctgcggagaagagagcaagaggcgaagaaatcctag

SEQ ID NO: 294321 - DNA, 4425 bp, Artificial Sequence
  derived and/or modified sequence
cgcacacgcacacacacacggagcatcctcccgtcaggtctcctggtccagccccgcccgcgcctcctgcttccagcgaacctgttccctctccccacatcccccgccctccatctcccccggctctgggacccttcccgccgacctcacccccacccccgggatggagcggctcgagcccgcccggagccccccgcggccggggtgacggtccccccacccctctcctgcccggcccccgcctcgagcaccatgggcctgaggggttcccggggcgccagacgctgaagatgaccgatgccggagctctcttgagtcatggcttcttcaaagctccgagaacccgtggatgaagtttttgacctggacttggctgtgccagagacggccagactggacagcagtttacacaaggcccgggcccaactgttggccaagggccggagacaccggccatcccgctccaggcttcgggacagtgccagctccgcggaggatggtgaaggctcggatgggcccggaggcaaggtgaccgatggctgcgggagccccctgcaccggctgcgctcgcctttgcactcaggcccggggtccccggccgggggctctttctgcctggatcctccggggttgcggcgcagcctggacgaggacgagccgccgccctcgccgctcacacgctaccggcccctgcacaacgctgcgtcgcacgagggcctggccgccgcctcctgctctccgccgcgctccgcgccctcctccgacagctcccccagcttcgtgcgccgccacccgcgcgcagagccgcacagcgaagatgacagccgtgacgccagtcctcctgagcccgccagccccaccatcggcctcgataagaagactcgccgaaagttcctggacctgggggtcaccctgcgccgagcatccacgggcaagagccggaaggagaaaggcagcaaccgactgtccatgggcagcagggagtcagtggaggggtccggcaggtcagggggctccccgttcctgcctttttcctggttcacggacagcggcaagggctcagcatcctcgggtagcaccacctcccccacctgctcccctaaacacgagggcttcagccctaagaagtcagcttcccaggaatccactctgagtgatgactccacgccccccagcagcagccccaagatccccagtgggccctggcaggaggccaaatgttcttacccctaccacacgctgtctcagtcttcagatgagttcctggatgaacccctcccccctgtccaccactggaccagccagcaggtgggccagtggctgcagagcctcaacctggaacagtatgctgctgagtttgctgcacggcaggtagacgggccgcagctgctgcagctggacggaagcaaactaaagagcctggggctcagcaactctcatgaccgggcactggtgaagcgcaagttgaaggagatggcagcagctgccgagaaggagcgcaaggcccaggagaaggctgcgcggcagcgggagaagctccggcgccgagagcaggaggccaagaagagctaggggagggtgcacaggcgctggcacccggcaggggcagccactggctccgcgggcacaggcctcaccagggaggctggacctgggcgctgcacttgggctagcctggtcccacgctctcaggggggacatgctctctcttaccctgtcacttggtctagacccagagaccccagaaagggagaccccagggagagggcctagtaataaatcctattttgaggacttgtttggcacagagttcctgggggaggagcagatgaaggggagagggcagagaggccagggctgaggcaagtctgggaggctgggtcaggctgtcccattgccctcaggccatcgtggggctggggtggaggggagctaggaggcctgcctgcctgcttgcctgccagaggccctgaggccgggccccagggctcagagctgggctgggcatttcagcaggagcccatgtgggagcggctcctctccactcttccagggggctgtgtggtgggagagctctgtcctgctcccccaagaggccagtgggcgctgcagcaagtcgcactcagggtagactcccagccaaactcctcaacaggagcgcagagaaagcagcctggggcgagtgcagtctttgccaggactcaagaggggaggatgaacatccccttctccctctcccctcctctgtcctgtgggtcccagggggcgagatgacaccacacaggtctgcctctcagggcccattcaagacctggtctttgacccattctccaagccaggactcccttcacttcctgctgcttcctcagagggcacctaagtcctctttgggagctgagcaaacaggaactgatagggacagaggacaccacttccaccagccaaggcctaggagctgctgacctggtcagccctcaccccagccaggcagagaggcaaaacctgggggtccccggcagctacgagattggaaaggttcatcagccctcccccatctgccccaggcattgtcagggaatcagtgggctcagaactggcaggcggtgcaagctctgcttccctgggccacactgagggctggggccagctccctggatgggggtggagtttaccagcagcctggggacagcatgtgtcctttttaggaaatgtccttggaggaagtgttcatgtgtggcgctggtcagcagctagtcccgcttccaggacactggtcagagttaccgatgaggcctgggggctcccgcttggaaacccctccagctcctcccatctgcccagacagagcggcagatggcaccaatgcatgctggctccctcattcctgcccaggggctgtggcttacggccagcaccctgtacctgggactcagcccttatcccccctctgctatctgtgctgggagaggggcttcggagggaaacagatatgaggacactggcaccatctgggcctggtggcagggccatgggaggttggaaggcacccacatccttaaagccatcagtagctatagtgggtgcccacctgcatgtgaaggggaggcagttctcaatttatttcaataaatccttatgatgtgccagtgaccagaatttctgtctgctccagttgttgggttggccggactctgctgggccctgagtatggtgggacaacaggtctgtcaccaggtgctgggccatccggcgttctgaacagatggctttgcccagtgttttactcacagtcctgagctgggccggacgtccccggtgcgtcatgtggtggtcacagggcaccgcagtgtgcgtgtgtacgtgcgcacgtgtgggtcccctcccccagggatgcagccaggccagtctcattcagtctcctctttactgtgggtgtgggtgtcactgtcactgccacagccactgggagggacacacagctttaacccctgtgtgcttaggggaagggtgggggcattcagggttataaaactaactatatacacagaaggtcctagggagaaagccaccctgagcacacatgtctgggcacagtgggggctgggggctggagctcaggcaggatggactaggcttgtggaggagcgggtgggcatgagcatgtgaggacatgctgggagggctcaggaggtggcacagacattgccaaggccactgcagggcctcgagcagcttggctggatggcaagctctcggtctaacaaggttcttccactttagagttgggccctgtgagagccaccccctccgccaccgaccttcaagccctgagcggagggagaggctgcaggaccagcctcattccccactcacgggtgtaactcctttccccactcagtccccaggtctggagggcacccaccctcttcctaacacttcagcaggccaaggccagggtgcctttgtgggctgggggaataaggcaacgggacatccacttggaaggcctgtgctgtggagggtgctgagggggacccagtacccctggcagaaaagtgacagccctggtctcagagaggaggactgccatgggaaaatgtctctgggacaccccatcagggtggagacatccctaaccctcaggcatcgcccacagagatagggaggccaccgaggggtctccacagagatggactggcacttagggaccatcacagacctatcaccgcagtgacttccatagagacagaacctggtcatcagggagaacccaccccctgctcccccaggaggatggtgaggggcaccacggtggggggacccagaggcggcagtccgtcctctcaggtgcagatgcacggcggcccttagctgacgcggtacgtggacgtgttcttgggctccgtgctgggcacacaccagtcg

SEQ ID NO: 294322 - DNA, 1434 bp, Artificial Sequence
  derived and/or modified sequence
atgttttctattaccttgatcaaccactttgacttgagcatcctcatcacaacaatggtgctggtgcctagctatacgcttctcggcttcaagacattcctcgaggttagggaccaggagcactatcgcgaattcccagaggccaattttgagcttagtgccacagatttcttagtctgtttcattccatacttccagacacttctctttgtgttcgtgcttcgctgtatggaacttaaatgcggtaaaaaaagaatgcgaaaggaccctgtgtttagaatctctccccagtccagagacgccaaacctaatcctgaagaaccaatcgatgaggacgaggatatccaaactgagagaatacgaacagctacagcactcacgaccagtattctggatgagaagcctgtcatcattgccagctgtctccacaaggaatatgcggggcagaagaagagctgcttctccaaacggaagaagaagattgctgcaagaaatatttccttttgcgtacaggaaggagagatactagggctgctgggccccaacggcgcaggcaaaagtagctctatacggatgatctcgggcattacaaaaccgaccgccggtgaagtcgaactgaaaggttgtagttccgttctagggcatctggggtactgtcctcaagagaacgtgctgtggcctatgcttacattgcgggagcatttggaggtttacgcagcagtgaaggggctaagaaaggccgacgctaggttagccattgctcgcctggtgtctgcctttaagcttcatgagcagcttaatgtccctgtacagaagctgacggccggcattactcggaagctctgctttgttctgtccctactggggaacagccccgtactgcttctggacgaaccctctactggaatcgacccaacagggcaacaacaaatgtggcaggccatccaagctgtggtgaagaacaccgagcggggcgttctactcaccacccataacttggccgaagcggaggccctgtgcgacagggtggccatcatggtgtccggcagattgcgctgtatcggctctattcagcacctgaaaaacaaacttggaaaagactacattctggagttgaaagtgaaggaaaccagccaggttactcttgtgcatactgagatactcaaattatttcctcaggcagctgggcaggagcgatattcatcccttttgacttacaagcttccagtagccgatgtttacccgctgtcccagacctttcacaagctagaagccgttaaacacaatttcaacttggaagagtacagtttatcacagtgtacactcgagaaggtgttcttagagctgagcaaggaacaggaggtaggtaacttcgacgaggaaatcgacacaactatgcgctggaaactcttgccgcatagcgacgaaccatag

SEQ ID NO: 294323 - DNA, 1434 bp, Artificial Sequence
  derived and/or modified sequence
atgttcagcatcaccctcatcaaccactttgacctgagcatcctgatcaccaccatggtgctggtgcccagctacaccctgctgggcttcaagaccttcctggaggtgcgggaccaggagcactaccgggagttccctgaggccaactttgagctgagcgccacagacttcctggtgtgcttcatcccctacttccagaccctgctgtttgtgtttgtgctgcgctgcatggagctgaagtgtgggaagaagaggatgaggaaggaccccgtcttccgcatcagcccccagagcagagatgccaagcccaaccctgaggagcccattgatgaagatgaggacatccagacagagcgcatcagaacagccacagccctgaccaccagcatcctggatgagaagcctgtgatcatcgccagctgcctgcacaaggagtatgccggccagaagaagagctgcttcagcaagaggaagaagaagattgctgccaggaacatctccttctgtgtgcaggagggggagatcctgggcctgctgggccccaacggggccggcaagagcagcagcatccgcatgatcagcggcatcaccaagcccacagctggggaggtggagctgaagggctgcagctctgtgctgggccacctgggctactgcccccaggagaatgtgctgtggcccatgctgaccctgcgggagcacctggaggtgtatgctgctgtgaagggcctgaggaaggcagatgcccggctggccatcgcccggctggtgtctgccttcaagctgcacgagcagctgaatgtgcctgtgcagaagctgacagctggcatcaccaggaagctgtgctttgtgctgagcctgctgggcaacagccctgtgctgctgctggatgagcccagcactggaattgaccccaccggccagcagcagatgtggcaggccatccaggccgtggtgaagaacacagagcggggcgtgctgctgaccacccacaacctggccgaggccgaggccctgtgtgacagagtggccatcatggtgtctggccgcctgcgctgcatcggcagcatccagcacctgaagaacaagctgggcaaggactacatcctggagctgaaggtgaaggagaccagccaggtgaccctggtgcacacagagatcctgaagctgttcccccaggccgccggccaggagcgctacagcagcctgctgacctacaagctgcctgtggctgatgtgtaccccctgagccagaccttccacaagctggaggccgtgaagcacaacttcaacctggaggagtacagcctgagccagtgcaccctggagaaggtgttcctggagctgagcaaggagcaggaggtgggcaactttgatgaggagattgacaccaccatgcgctggaagctgctgccccacagtgatgagccctag

SEQ ID NO: 294324 - DNA, 1434 bp, Artificial Sequence
  derived and/or modified sequence
atgttcagcatcaccctgatcaaccacttcgacctgagcatcctgatcacgactatggtgttggtgccaagttataccctgctgggcttcaagacattcctggaggtacgagaccaggagcattacagagaattcccagaggcaaacttcgagctgagcgccacggactttctggtttgcttcatcccctactttcagactctgttgtttgtgttcgtactacggtgcatggagctcaagtgcggcaaaaagaggatgcgcaaggatcctgtgtttaggatcagtccacaaagtcgcgacgctaagcccaacccagaagagcctatcgacgaggacgaagatattcaaacggagagaattcggaccgctacagccctgacaaccagtatccttgacgagaaacctgttataatcgcctcttgcttgcataaagagtatgcagggcaaaaaaaatcatgtttcagcaaacggaagaagaaaatcgcagccaggaacatcagtttttgcgttcaggaaggagaaatactgggactgctgggtcctaatggagcggggaaatcctcctctattagaatgatttctggcattacaaaacctaccgccggggaagttgaactgaaaggatgcagtagtgtgctgggccacctgggctactgcccacaggagaacgtgttgtggccaatgctgaccttaagggagcaccttgaggtgtacgccgcggttaagggactgagaaaggctgatgcaagactggccattgccaggttagtttctgcattcaagctacatgaacagctaaatgtaccggttcaaaagctcacagccggaattacccgcaagctgtgtttcgtcctcagcctgttgggaaatagccctgtattactccttgacgaaccctctaccgggatcgaccccactggccagcagcagatgtggcaggcaatacaggcagtggttaagaacaccgagaggggggtcctgctaacaacccataacctcgcagaggcggaggcactgtgcgatcgggtggccatcatggtttctggtcgcctgcgctgcatcggatccatccagcacctcaagaacaaattggggaaggactatatacttgagctcaaggtcaaagaaacaagtcaggtcactctcgtccacaccgagattctgaagttgttcccgcaggccgcaggtcaggaaaggtatagttcgttgctgacctacaagctccctgtggcggatgtgtatcccttatctcaaacatttcataagctagaggctgtcaaacacaacttcaacctggaagaatactccctaagccaatgcacattggagaaagtgttcctggaactctctaaggagcaagaggttggaaattttgacgaggagatcgacacaacaatgcgctggaagttgcttccacatagcgatgaaccgtag

SEQ ID NO: 294325 - DNA, 1434 bp, Artificial Sequence
  derived and/or modified sequence
atgttcagtatcaccctgatcaatcacttcgatctgtccattctgattaccactatggtgctagtgccttcatacactctgctgggatttaagaccttcctggaggttcgggatcaggagcattatagggagtttccagaagccaattttgaactttccgcgactgatttcctggtgtgtttcatcccctatttccagaccctgttgtttgtgttcgtgctgaggtgcatggaactgaagtgcggtaagaaacgaatgagaaaggaccccgtgtttaggatcagcccccaatcccgggacgccaagcccaaccctgaggagccaattgatgaagacgaggacatacaaactgagcgcatcagaactgccacggccctgactaccagcatactcgacgagaagcctgtgataattgctagttgtctccataaggagtacgccggacagaaaaaaagctgtttttccaaaaggaaaaaaaaaatcgctgcaaggaatatcagcttctgcgtacaggagggcgagattttgggactgttaggccctaatggagccggaaagtcaagctccatcagaatgatctctggcatcaccaaaccaaccgcgggtgaggtggaactgaaaggctgcagctccgttttgggacatcttggatactgtccccaggagaacgtgctgtggcccatgctcaccctgcgcgagcatctggaggtgtatgccgcagtcaaaggcctaagaaaggccgatgccagactggctatcgccaggctggtgagcgcctttaagttgcacgagcagctgaacgtgccggtgcagaagctaaccgccggaattacaagaaaattatgttttgtactgtcactactcgggaactctcctgtgcttcttttggatgagccctctactggcattgacccaactggacagcaacaaatgtggcaggccatacaggcagtggtaaaaaataccgagaggggcgtgttactgactactcacaacctggctgaagccgaagcgttatgtgaccgggtggctatcatggtctcagggcgactgaggtgcatcggatcgatccagcacttgaaaaacaagctcggcaaagactacattctggaactcaaggtgaaagaaacttctcaggtcaccctcgtacataccgagatccttaagctgttcccacaagctgccggacaagaacgctattcaagtctcctaacctacaaactccctgtggcagacgtgtatcctctcagccagacattccataaattggaggctgtaaagcataattttaacctcgaggaatatagtctgtcacagtgtactctggaaaaggtgtttctcgagttgagtaaggagcaagaggttggaaatttcgatgaggagatagacacgaccatgcgatggaagctcctgcctcatagtgatgagccttag

SEQ ID NO: 294326 - DNA, 1434 bp, Artificial Sequence
  derived and/or modified sequence
atgttcagcatcaccctgatcaaccacttcgacctgagcatcctgatcaccaccatggtgctggtgcccagctacaccctgctgggcttcaagaccttcctggaggtgagagaccaggagcactacagagagttccccgaggccaacttcgagctgagcgccaccgacttcctggtgtgcttcatcccctacttccagaccctgctgttcgtgttcgtgctgagatgcatggagctgaagtgcggcaagaagagaatgagaaaggaccccgtgttcagaatcagcccccagagcagagacgccaagcccaaccccgaggagcccatcgacgaggacgaggacatccagaccgagagaatcagaaccgccaccgccctgaccaccagcatcctggacgagaagcccgtgatcatcgccagctgcctgcacaaggagtacgccggccagaagaagagctgcttcagcaagagaaagaagaagatcgccgccagaaacatcagcttctgcgtgcaggagggcgagatcctgggcctgctgggccccaacggcgccggcaagagcagcagcatcagaatgatcagcggcatcaccaagcccaccgccggcgaggtggagctgaagggctgcagcagcgtgctgggccacctgggctactgcccccaggagaacgtgctgtggcccatgctgaccctgagagagcacctggaggtgtacgccgccgtgaagggcctgagaaaggccgacgccagactggccatcgccagactggtgagcgccttcaagctgcacgagcagctgaacgtgcccgtgcagaagctgaccgccggcatcaccagaaagctgtgcttcgtgctgagcctgctgggcaacagccccgtgctgctgctggacgagcccagcaccggcatcgaccccaccggccagcagcagatgtggcaggccatccaggccgtggtgaagaacaccgagagaggcgtgctgctgaccacccacaacctggccgaggccgaggccctgtgcgacagagtggccatcatggtgagcggcagactgagatgcatcggcagcatccagcacctgaagaacaagctgggcaaggactacatcctggagctgaaggtgaaggagaccagccaggtgaccctggtgcacaccgagatcctgaagctgttcccccaggccgccggccaggagagatacagcagcctgctgacctacaagctgcccgtggccgacgtgtaccccctgagccagaccttccacaagctggaggccgtgaagcacaacttcaacctggaggagtacagcctgagccagtgcaccctggagaaggtgttcctggagctgagcaaggagcaggaggtgggcaacttcgacgaggagatcgacaccaccatgagatggaagctgctgccccacagcgacgagccctag

SEQ ID NO: 294327 - protein, 245 aa, Artificial Sequence
  derived and/or modified sequence
MIGVSFEEAKSIITGAKLSTRLESAWEIAFIRQKSDNIQPENLSCTSLIEASGEYGPQASTLSLFSSPPEILIPKTSSTPKTNNDILSSCEIKTGYNKTVQIPITSENSTVGLSNTDVASAWTENYGLQEKISLNPSVRFKAEKLEMALNYLGIQPTKEQHQALRQQVQADSKGTVSFGDFVQVARNLFCLQLDEVNVGAHEISNILDSQLLPCDSSEADEMERLKCERDDALKEVNTLKWPGQN

SEQ ID NO: 294328 - DNA, 738 bp, Artificial Sequence
  derived and/or modified sequence
atgattggagttagctttgaagaagcaaaatctatcattacaggggctaagctttccacgcggcttgaatccgcctgggagattgcatttattcgccagaagtcggataatatccagcccgaaaatttgtcttgcacgtccctgatcgaggcctccggcgagtatggtccccaagcatccacattaagcctcttttcctctccacctgagatcctaattcccaagacgagctcaacccctaaaacaaacaatgatattctgtcttcttgcgagattaaaacaggctacaacaagactgtacagattcccatcacttctgagaacagtactgtgggattgtcaaacaccgatgtggcctccgcttggacagaaaactacgggctgcaggagaaaatttcactgaatccttcggtcaggttcaaagctgagaagttggaaatggcgctgaactatctcggtattcagcctaccaaggagcagcatcaggcattacggcaacaggtccaagctgatagtaaaggcactgtcagcttcggcgacttcgtccaggtggcacgcaatctgttctgcctccagctagacgaggtaaacgttggagcacacgagatcagtaacatcctggatagccagctgcttccctgtgactcttcagaggccgacgaaatggagcggctcaaatgcgagagggacgacgctctaaaggaggtgaatacgctgaaatggccaggccagaattag

SEQ ID NO: 294329 - DNA, 738 bp, Artificial Sequence
  derived and/or modified sequence
atgatcggtgtatccttcgaggaagcaaagtccataattacaggggcaaagcttagtacgcgcctggaaagcgcttgggaaatcgcatttatccggcagaagtctgacaacattcagcctgagaacctgagctgtaccagtctgattgaagcaagtggtgagtatggtccacaggcctcaacgctttcactgttttcctctcctcctgaaattctgattcctaagaccagcagtacaccaaaaacaaataatgatatcttgagctcttgcgagatcaaaacgggttacaacaagaccgtgcagatccctatcactagcgaaaattctacagtgggattatccaatactgacgttgcttcagcttggactgagaattacgggctccaagagaaaatctcccttaatccctctgtgagattcaaagcagaaaaactggagatggccctgaactacttgggaatacagcccaccaaagagcaacaccaggcactgagacagcaggtgcaagccgatagcaaagggacagtcagctttggggatttcgtgcaggtggcacgcaacctcttctgtctacagttagacgaagtcaatgtcggggctcatgagatcagcaatattctagattcccagcttttgccatgcgattcatcagaggcggatgagatggagcgtctcaaatgtgagagggacgatgccctgaaagaggttaacacattaaaatggccaggacaaaactag

SEQ ID NO: 294330 - DNA, 738 bp, Artificial Sequence
  derived and/or modified sequence
atgattggagtgtcctttgaggaggccaagagcatcatcaccggggccaagctgagcacccggctggagagcgcctgggagatcgccttcatccggcagaagagtgacaacatccagcctgagaacctgagctgcaccagcctgattgaggccagcggggagtatggcccccaggccagcaccctgagcctcttcagcagccccccagagatcctgatccccaagaccagcagcacccccaagaccaacaatgacatcctgagcagctgtgagatcaagacaggctacaacaagacagtgcagatccccatcaccagcgagaacagcacagtgggcctgagcaacacagatgtggccagcgcctggacagagaactacggcctgcaggagaagatcagcctgaaccccagcgtgcgcttcaaggccgagaagctggagatggccctgaactacctgggcatccagcccaccaaggagcagcaccaggccctgcggcagcaggtgcaggccgacagcaaaggaacagtgtcctttggagactttgtgcaggtggccaggaacctcttctgcctgcagctggatgaggtgaatgtgggcgcccacgagatcagcaacatcctggacagccagctgctgccctgtgacagcagcgaggctgatgagatggagcggctgaagtgtgaaagagatgatgccctgaaggaggtgaacaccctgaagtggccaggccagaactag

SEQ ID NO: 294331 - DNA, 738 bp, Artificial Sequence
  derived and/or modified sequence
atgatcggcgtgagcttcgaggaggccaagagcatcatcaccggcgcgaagctcagcacgaggcttgaatcggcctgggaaattgcattcatccggcagaaatctgataacatacagccagagaacttgagttgcacttctctaatcgaggctagtggggaatatggacctcaggcaagtacgctctcactgtttagctccccaccagagatcctgattccaaaaactagtagcaccccgaagaccaacaatgacatcctgagttcttgtgagatcaaaacaggatacaacaagacagtgcaaataccaatcacctccgaaaatagcaccgttggcctgagcaacactgatgttgcttcagcctggactgaaaattacgggctccaggagaagatctctcttaatccatcagtgcgttttaaggcagagaagctggagatggccctgaactacctaggcatccagcccactaaggaacaacatcaggcccttcggcagcaggtgcaggccgatagcaagggtacggtgtcttttggggactttgtccaggttgcacgcaacctgttctgtctccagttggacgaggtcaacgttggagcacatgaaatatccaatatcctggactcccagctcttgccttgtgattccagtgaagcggacgagatggagcgcctaaagtgcgaacgcgatgacgccctaaaggaagtcaatacgctgaaatggccaggccagaactag

SEQ ID NO: 294332 - DNA, 2160 bp, Artificial Sequence
  derived and/or modified sequence
ggccgggttgccagattacgggaaagccatttaagaagttcctggaataatattagtcagagtaatataggatctgcaggaagtgtctcaagatagttggaaaagaagaatttctagactcttcatcaagatcttcatttatacagctgttaaatccaaggctactttggtgaaagcatgaataaaaatacatctactgtagtatcacccagtctacttgaaaagatggtcgtttgaagccaggagatcaacttgtctcagtcaacaaggaatctatgattggtgtatcatttgaagaagcaaaaagcataattaccggagccaagttgagtactaggttagaatctgcttgggagatagcattcataagacaaaaatccgacaacattcagccagaaaatctgtcatgtacatcacttatagaagcttcaggagaatatggacctcaagcctcaacattaagtcttttttcttctcctcctgaaatactaatcccaaagacctcatccactcccaaaacaaataatgacattttatcttcttgtgagataaaaactggatacaacaaaacagtacagattccaattacttcagaaaacagtactgtgggtttgtctaatacagatgttgcttctgcctggactgaaaattatgggctacaagaaaagatctccctaaatccctctgttcgctttaaggcagagaaactggaaatggctctaaattatcttggtattcagcccacaaaggaacaacaccaagccctgagacagcaagtacaagcagactcaaaagggacagtgtcttttggagattttgtccaggttgccagaaacttgttttgcttgcagttggatgaagtaaatgttggtgcacatgaaatttccaatatattagattcacagcttcttccttgtgattcttcagaagcagatgaaatggaaaggctcaagtgtgaaagagatgatgccttgaaagaagtaaatacacttaagtggccagggcagaattagatgaagagccaataaagcaagtcgtggcaattttggatcctgtgagttctttgggaaatacattttttttcatgtgcagggctattcttaagggacatcatgttttgctaacgtaatttggaattaatattattttagagaggaaaaaaacacacatatcccaaatatactgtaacatttttcttctctttttttgtttgtttggttttttgattcttgtttttgttttgtgtttttgagacagggtcgcactctgtcgcccaggctggagtgcaatactgcaatcacgtctcactgcagcctcaacctcctgggttcaagtgattctcccacctcaacctcccaagtaactgggacaacatgtccatgccaccatgctcaactaatttttttttaaatttttattttgtagagatggtgtctcactattttgttcagactggtctcaaacacctgggctcaaatgacccacctacctcagcctctcaaagtgctgggattacaggtgtgagccaccatgtctggccttgattctctttatgtggtttcattctgtttttagaagaatattacatttaaattatatcctaatttttatagaaagctatattttccaaatctttaggaaaagcaacataactacttgatttaccactaattcgtcataggcacatatttttaaaattattttattaaataaggtatagtatattgataattatttaatttttattaaatagaaaatatttacaccaaaaggaaagaaaatttgttttgctaccttagtttttataatctcaacctctagaggaagccattgttgcaaatatattatttatcttttcatagatttttctctacacagaaaattatattttttaaaaataggcagggcatgatggctgacacctttaatcgcagtactttgggaggctgaggcaagaggattacttgagctcaggagtttaacatcagcctgggcaacatagcaggaccccatctctactatttaaaacataaaaacaaaaataaataaatatatgtatatgtggggacagggagtatgtgagaaatttctgtactttcccttcaattttgctatgaatccaaaactgcttcaaaaaataataaagccttaaaaaatttt

SEQ ID NO: 294333 - DNA, 738 bp, Artificial Sequence
  derived and/or modified sequence
atgatcggcgtgagcttcgaggaggccaagagcatcatcaccggcgcgaaactatctacgcgtttggagtccgcttgggaaattgctttcattcgccagaagtctgataacatccagcctgagaatctcagctgtacatcccttatcgaagcttccggtgagtacggaccccaagcgagtacactgtcactgttctcttcacccccggaaatcctcatccctaagacatccagcacaccgaaaactaacaacgatattctgagcagctgtgaaatcaaaaccgggtacaacaagacggtgcagatccccatcaccagcgagaatagcactgtgggtttgagcaatactgacgttgcatcggcatggaccgagaattatggcctccaggaaaagatatccctaaatccctctgtgagattcaaagctgagaagctggagatggctctgaactatctgggcatccagccaacaaaggagcagcaccaggcccttagacagcaggtgcaggcggactccaagggaacagtgagtttcggcgattttgtgcaggtcgcccggaaccttttttgcctgcaactggatgaagttaatgtcggtgctcatgaaatttccaatatcctcgactctcagctactcccctgcgatagctccgaggctgacgagatggaaaggctcaagtgtgagagggacgatgccctgaaagaggtcaataccttgaaatggcctggtcagaactag

SEQ ID NO: 294334 - DNA, 738 bp, Artificial Sequence
  derived and/or modified sequence
atgatcggcgtttcatttgaagaagctaaaagcataataacgggcgctaagctttctacccggctcgagtcagcgtgggagatcgcttttatcagacagaagagtgataatatccagccagagaacctctcctgcacctccctcatcgaggcttcaggggagtatggccctcaagcatccaccctttctcttttttcatccccccctgaaatcttgatacctaagacgtcatcaaccccaaagacaaataacgacatactgagctcatgtgagatcaaaaccggatacaataagacagtgcaaattcccatcacttcagaaaactccactgttggtctttctaacaccgatgttgcttccgcctggaccgagaactatgggctccaagaaaagatctccctcaacccctcagtcagatttaaggcagaaaaattagagatggccctcaactatctcggcatccagcccactaaggagcagcatcaggccctacgccagcaggtgcaagccgactctaagggcacagttagttttggcgacttcgtgcaggtggcccgtaaccttttctgcctgcagctcgatgaggtgaacgtcggtgctcatgagatcagcaacatactcgattcccagctactgccctgtgattcaagcgaggccgatgagatggagcggttgaagtgtgagcgagacgacgcattgaaagaggtgaacacccttaaatggccaggccagaattag

SEQ ID NO: 294335 - DNA, 738 bp, Artificial Sequence
  derived and/or modified sequence
atgatcggcgtgtccttcgaggaagctaagagtataattactggcgcaaaactctccactcgcctcgaaagcgcctgggaaattgcttttattcggcaaaagtctgacaacattcagcccgaaaatctgtcttgcacctcgctaatcgaggcctctggcgagtatggtcctcaagccagtacactgtcccttttttcatctcctcctgagattttgattccaaagacctcttctactcctaaaacaaataacgacattctgtcttcatgcgaaatcaaaacggggtacaataagaccgtccagattccaataacctcagagaactcaacagtgggactgtccaacactgatgtggcatccgcatggactgagaattacggactccaagagaaaataagcttgaacccgtcagttcgctttaaagctgaaaagcttgaaatggcactcaactacttagggattcaacctactaaagaacaacaccaagctctcagacaacaggtgcaagcagacagcaaaggtactgtgtccttcggagatttcgtgcaggtcgctaggaacttgttttgcctccagttggatgaggtgaacgttggggctcatgagatttctaacattctcgactcgcagcttttgccatgcgacagtagcgaagcagatgagatggaacgtttgaaatgcgagagagatgacgctttgaaagaagtgaacactctcaagtggccaggacagaactag

SEQ ID NO: 294336 - DNA, 1176 bp, Artificial Sequence
  derived and/or modified sequence
aggtggcagcgcttgcagtcgggctacggaggccgggttgccagattacgggaaagccatttaagaagttcctggaataatattagtcagagtaatataggatctgcaggaagtgtctcaagatagttggaaaagaagaatttctagactcttcatcaagatcttcatttatacagctgttaaatccaaggctactttggtgaaagcatgaataaaaatacatctactgtagtatcacccagtctacttgaaaaggatcctgcctttcagatgattacaattgccaaggaaacaggccttggcctgaaggtactaggaggaattaaccggaatgaaggcccattggtatatattcaggaaattattcctggaggagactgttataaggatggtcgtttgaagccaggagatcaacttgtctcagtcaacaaggaatctatgattggtgtatcatttgaagaagcaaaaagcataattaccggagccaagttgagtactaggttagaatctgcttgggagatagcattcataagacaaaaatccgacaacattcagccagaaaatctgtcatgtacatcacttatagaagcttcaggagaatatggacctcaagcctcaacattaagtcttttttcttctcctcctgaaatactaatcccaaagacctcatccactcccaaaacaaataatgacattttatcttcttgtgagataaaaactggatacaacaaaacagtacagattccaattacttcagaaaacagtactgtgggtttgtctaatacagatgttgcttctgcctggactgaaaattatgggctacaagaaaagatctccctaaatccctctgttcgctttaaggcagagaaactggaaatggctctaaattatcttggtattcagcccacaaaggaacaacaccaagccctgagacagcaagtacaagcagactcaaaagggacagtgtcttttggagattttgtccaggttgccagaaacttgttttgcttgcagttggatgaagtaaatgttggtgcacatgaaatttccaatatattagattcacagcttcttccttgtgattcttcagaagcagatgaaatggaaaggctcaagtgtgaaagagatgatgccttgaaagaagtaaatacacttaagtggccagggcagaattag

SEQ ID NO: 294337 - DNA, 738 bp, Artificial Sequence
  derived and/or modified sequence
atgatcggcgtgagcttcgaggaggccaagagcatcatcaccggcgccaagctgagcaccagactggagagcgcctgggagatcgccttcatcagacagaagagcgacaacatccagcccgagaacctgagctgcaccagcctgatcgaggccagcggcgagtacggcccccaggccagcaccctgagcctgttcagcagcccccccgagatcctgatccccaagaccagcagcacccccaagaccaacaacgacatcctgagcagctgcgagatcaagaccggctacaacaagaccgtgcagatccccatcaccagcgagaacagcaccgtgggcctgagcaacaccgacgtggccagcgcctggaccgagaactacggcctgcaggagaagatcagcctgaaccccagcgtgagattcaaggccgagaagctggagatggccctgaactacctgggcatccagcccaccaaggagcagcaccaggccctgagacagcaggtgcaggccgacagcaagggcaccgtgagcttcggcgacttcgtgcaggtggccagaaacctgttctgcctgcagctggacgaggtgaacgtgggcgcccacgagatcagcaacatcctggacagccagctgctgccctgcgacagcagcgaggccgacgagatggagagactgaagtgcgagagagacgacgccctgaaggaggtgaacaccctgaagtggcccggccagaactag

SEQ ID NO: 294338 - protein, 69 aa, Artificial Sequence
  derived and/or modified sequence
MAQDLSEKDLLKMEVEQLKKEVKNTRIPISKAGKEIKEYVEAQAGNDPFLKGIPEDKNPFKEKGGCLIS

SEQ ID NO: 294339 - DNA, 210 bp, Artificial Sequence
  derived and/or modified sequence
atggcacaagatctcagcgaaaaggacctgctaaaaatggaagtcgagcagctcaagaaggaggtgaaaaacacgagaatccccataagtaaggctggcaaggagatcaaggagtacgttgaggcccaggcagggaacgatcccttcctgaagggcattcctgaggataaaaacccttttaaggagaagggcgggtgtctgatttcatag

SEQ ID NO: 294340 - DNA, 210 bp, Artificial Sequence
  derived and/or modified sequence
atggcccaggatctgtcggagaaagatctcctgaagatggaggtggaacagctgaagaaggaggtgaagaatacccggattcccatttctaaagccggcaaagaaatcaaagaatatgtcgaggcccaggctggaaatgatccgttccttaaggggatccctgaagataaaaacccatttaaggagaagggaggatgtctgatttcttag

SEQ ID NO: 294341 - DNA, 210 bp, Artificial Sequence
  derived and/or modified sequence
atggctcaggacctgagtgagaaagacctcctaaagatggaagttgagcagctgaaaaaagaggtcaaaaacacaagaattcctatctcaaaggccggaaaagaaattaaggaatatgtagaggctcaggccggcaacgacccctttcttaagggcattccagaagataaaaaccccttcaaagagaagggaggctgcctgatatcatag

SEQ ID NO: 294342 - DNA, 210 bp, Artificial Sequence
  derived and/or modified sequence
atggcccaggacctgtccgagaaggacctgcttaagatggaggttgagcagctcaaaaaagaggtaaaaaatacgagaattccaatctcgaaagcagggaaggagatcaaagaatacgtcgaggcccaggctggcaatgatcccttccttaaaggcatcccagaggacaaaaatcctttcaaggagaaagggggatgcctgattagctag

SEQ ID NO: 294343 - DNA, 210 bp, Artificial Sequence
  derived and/or modified sequence
atggctcaggatcttagtgagaaagatctattgaagatggaagtggagcagctgaagaaagaagtcaagaacaccaggattcccatatccaaggcaggtaaagaaatcaaagaatacgttgaagcccaggcggggaatgatcccttcttgaaggggatccccgaggataagaatccattcaaggaaaaaggaggctgtttaatcagttag

SEQ ID NO: 294344 - DNA, 889 bp, Artificial Sequence
  derived and/or modified sequence
tggatgaagagtgagctaggagaacttcgtaaggtgaaactgtggggatccaatgggcaacacaaagcatcttggttaaggaggttaggggccggtctaggacttgcctcaggaggaaggacagcctcagagcatgctcagaggtgggaagggaaggaggagaaagcaggcgaagcggggccatctgctttatctgaagattttcagctgatgaagaactaggaggctcaaacactatcttacctgagtccaggacaagtgacttggagagtgtgctcttctgtggcaggatcaggtctgtctagggcaggatggcccaggatctcagcgagaaggacctgttgaagatggaggtggagcagctgaagaaagaagtgaaaaacacaagaattccgatttccaaagcgggaaaggaaatcaaggagtacgtggaggcccaagcaggaaacgatccttttctcaaaggcatccctgaggacaagaatcccttcaaggagaaaggtggctgtctgataagctgatggcatggagccctgccctgagtgtctgtccctcttcagccaagcccaagtctcctagacccccagggagccagtgaactgtcaccttctcttcatcacagaatgagtaaagatccctgaacaaatgcattgtgaacccattccccactcccaccttcaactcttttctcccattatttcctccacctgctgggtctctgctgaccttgctgggaacactctgaggacagtgtggctggccgagcggttggccccatgggtggtggggtgtgagaagcctgcaataccccaagaccccagagggcagtccttaggaagcacttacaccacctgggaacccctccgtcttttccctctactctcatcct

SEQ ID NO: 294345 - DNA, 585 bp, Artificial Sequence
  derived and/or modified sequence
attccgggacaagaggaagtcagtcctgctccccgagcctgtgtctctctgtcccctgcccagaggaagggggaagccaggggcccatttgggggcccagcccccaatcccacccagcagaggaagccaaggccatctgctttatctgaagattttcagctgatgaagaactaggaggctcaaacactatcttacctgagtccaggacaagtgacttggagagtgtgctcttctgtggcaggatcaggtctgtctagggcaggatggcccaggatctcagcgagaaggacctgttgaagatggaggtggagcagctgaagaaagaagtgaaaaacacaagaattccgatttccaaagcgggaaaggaaatcaaggagtacgtggaggcccaagcaggaaacgatccttttctcaaaggcatccctgaggacaagaatcccttcaaggagaaaggtggctgtctgataagctgatggcatggagccctgccctgagtgtctgtccctcttcagccaagcccaagtctcctagacccccagggagccagtgaactgtcaccttctcttcatcacagaatgagtaaag

SEQ ID NO: 294346 - DNA, 918 bp, Artificial Sequence
  derived and/or modified sequence
tttttattgaatgagtggatgaagagtgagctaggagaacttcgtaaggccatctgctttatctgaagattttcagctgatgaagaactaggaggctcaaacactatcttacctgagtccaggacaagtgacttggagagtgtgctcttctgtggcaggatcaggtctgtctagggcaggatggcccaggatctcagcgagaaggacctgttgaagatggaggtggagcagctgaagaaagaagtgaaaaacacaagaattccgatttccaaagcgggaaaggaaatcaaggagtacgtggaggcccaagcaggaaacgatccttttctcaaaggcatccctgaggacaagaatcccttcaaggagaaaggtggctgtctgataagctgatggcatggagccctgccctgagtgtctgtccctcttcagccaagcccaagtctcctagacccccagggagccagtgaactgtcaccttctcttcatcacagaatgagtaaagatccctgaacaaatgcattgtgaacccattccccactcccaccttcaactcttttctcccattatttcctccacctgctgggtctctgctgaccttgctgggaacactctgaggacagtgtggctggccgagcggttggccccatgggtggtggggtgtgagaagcctgcaataccccaagaccccagagggcagtccttaggaagcacttacaccacctgggaacccctccgtcttttccctctactctcatcctaggaataaagcatttccacgccagagtagtttgggctgggggccagggttgggtggtcctgtccctccatatcatgtcctaccctatggtcctgttcctagtcatttagatcaccccagatggcctgatgacaacaagagtttgtgaagttatgatttca

SEQ ID NO: 294347 - DNA, 500 bp, Artificial Sequence
  derived and/or modified sequence
tttttattgaatgagtggatgaagagtgagctaggagaacttcgtaaggtgaaactgtggggatccaatgggcaacacaaagcatcttggttaaggaggttaggggccggtctaggacttgcctcaggaggaaggacagcctcagagcatgctcagaggccatctgctttatctgaagattttcagctgatgaagaactaggaggctcaaacactatcttacctgagtccaggacaagtgacttggagagtgtgctcttctgtggcaggatcaggtctgtctagggcaggatggcccaggatctcagcgagaaggacctgttgaagatggaggtggagcagctgaagaaagaagtgaaaaacacaagaattccgatttccaaagcgggaaaggaaatcaaggagtacgtggaggcccaagcaggaaacgatccttttctcaaaggcatccctgaggacaagaatcccttcaaggagaaaggtggctgtctgataagctga

SEQ ID NO: 294348 - DNA, 783 bp, Artificial Sequence
  derived and/or modified sequence
ggcgaagcggggtaagtggggctgcagggtggaggtggagaaatagaagcgctgcgggctctaagctagtgaggtcaccaaaagtgtgaggctaacgcaaggcaaggtggtgaaaaggtggcttctgttttcgcgtttgtttttgtggggagaatgtctgtctctctgctctgctgtagtgagggcttgaaggctcaagcgggtgatgggcttagaactttgagcctatgatcagcttaggcatcagagattttggtttccaggccatctgctttatctgaagattttcagctgatgaagaactaggaggctcaaacactatcttacctgagtccaggacaagtgacttggagagtgtgctcttctgtggcaggatcaggtctgtctagggcaggatggcccaggatctcagcgagaaggacctgttgaagatggaggtggagcagctgaagaaagaagtgaaaaacacaagaattccgatttccaaagcgggaaaggaaatcaaggagtacgtggaggcccaagcaggaaacgatccttttctcaaaggcatccctgaggacaagaatcccttcaaggagaaaggtggctgtctgataagctgatggcatggagccctgccctgagtgtctgtccctcttcagccaagcccaagtctcctagacccccagggagccagtgaactgtcaccttctcttcatcacagaatgagtaaagatccctgaacaaatgcattgtgaacccattccccactcccaccttcaactcttttctcccattatt

SEQ ID NO: 294349 - DNA, 210 bp, Artificial Sequence
  derived and/or modified sequence
atggcccaggacctgtctgagaaggacctgctgaagatggaggtggagcagctgaagaaggaggtgaagaacacccgcatccccatcagcaaggccggcaaggagatcaaggagtatgtggaggcccaggccggaaatgaccccttcctgaagggcatccctgaggacaagaaccccttcaaggagaagggcggctgcctgatctcctag

SEQ ID NO: 294350 - DNA, 210 bp, Artificial Sequence
  derived and/or modified sequence
atggcccaggacctgagcgagaaggacctgctgaagatggaggtggagcagcttaaaaaagaagtgaagaatacacggatcccaatctccaaggccggcaaagaaattaaagagtacgtcgaggctcaggctggaaacgaccccttccttaaaggcatccccgaggacaagaatccatttaaggaaaagggagggtgtctgatatcatag

SEQ ID NO: 294351 - DNA, 210 bp, Artificial Sequence
  derived and/or modified sequence
atggcccaggacctgagcgagaaggacctgctgaagatggaggtggagcaactgaaaaaagaggtcaagaatactcgcatcccaatctccaaagccgggaaggaaatcaaagaatacgtggaggctcaggccggtaacgatccattccttaaaggcatccctgaagacaaaaacccttttaaagagaaaggaggttgcctaatttcctag

SEQ ID NO: 294352 - DNA, 210 bp, Artificial Sequence
  derived and/or modified sequence
atggcccaggacctgagcgagaaggacctgctgaagatggaggtggaacaattgaagaaagaagtgaaaaacacgcgcattcccatctctaaggctggcaaggagatcaaagagtacgttgaagcacaggcagggaatgatccgtttctaaaaggaatcccagaggataagaatccgtttaaggagaagggcggctgtctgatctcatag

SEQ ID NO: 294353 - DNA, 210 bp, Artificial Sequence
  derived and/or modified sequence
atggcccaggacctgagcgagaaggacctgctgaagatggaggtggagcaactcaaaaaggaagtgaagaatactcgcatcccaatttctaaagcggggaaggagatcaaggagtatgtggaagctcaggctggcaacgaccctttcctgaagggaattcctgaggataaaaatcctttcaaggaaaaaggagggtgcctcatctcatag

SEQ ID NO: 294354 - DNA, 210 bp, Artificial Sequence
  derived and/or modified sequence
atggcccaggacctgagcgagaaggacctgctgaagatggaggtggaacagttgaagaaggaagtgaagaacacccggatcccgattagcaaggccggaaaagagatcaaagagtatgttgaagctcaggctggtaacgacccattcctgaaagggatcccagaagataaaaatcctttcaaagagaagggggggtgtctgataagttag

SEQ ID NO: 294355 - DNA, 210 bp, Artificial Sequence
  derived and/or modified sequence
atggcccaggatctttccgaaaaagacctgttaaagatggaggtggaacagcttaagaaagaggtcaagaacactcgcataccaatctccaaagcagggaaagaaattaaagaatatgtcgaggctcaagcaggcaacgaccctttcctgaaagggatcccagaagacaagaacccgtttaaagagaaaggcggatgcctgatctcttag

SEQ ID NO: 294356 - DNA, 210 bp, Artificial Sequence
  derived and/or modified sequence
atggcgcaagatctgtccgagaaagatcttctgaaaatggaggtcgagcagctgaaaaaagaagtgaaaaacacacgaattccgatttcaaaggctggcaaggaaatcaaagaatacgtggaggcccaggccggtaacgacccttttttgaaaggcatccccgaggacaagaatccgttcaaagagaagggcggttgcttgataagttag

SEQ ID NO: 294357 - DNA, 210 bp, Artificial Sequence
  derived and/or modified sequence
atggcccaagatttatccgagaaagatctcctgaagatggaggttgagcagttgaaaaaggaggtaaaaaacaccaggattccgataagcaaagctggcaaagagatcaaggagtacgtggaggcccaggccggaaacgatccatttcttaaggggattcccgaagacaagaacccgttcaaagaaaagggcggatgtttgattagttag

SEQ ID NO: 294358 - DNA, 210 bp, Artificial Sequence
  derived and/or modified sequence
atggcccaagatctgtccgaaaaggacttgttgaaaatggaggtcgaacaacttaaaaaggaggtgaagaataccaggattcctatcagcaaagcaggtaaggaaattaaggagtacgtggaagcccaggcagggaatgatccttttcttaaaggaattcctgaggataaaaatcccttcaaagaaaagggaggctgccttatttcttag

SEQ ID NO: 294359 - DNA, 210 bp, Artificial Sequence
  derived and/or modified sequence
atggcccaggatctttcagagaaggacttactgaagatggaggttgaacagctcaagaaggaggttaaaaacacaagaattcccatcagcaaagccggaaaagaaatcaaagaatacgtggaagcacaggccggaaacgatccattcctgaaaggaatcccggaggacaaaaacccttttaaggagaaggggggatgcctgatatcttag

SEQ ID NO: 294360 - DNA, 210 bp, Artificial Sequence
  derived and/or modified sequence
atggcccaggacctgagcgagaaggacctgctgaagatggaggtggagcagctgaagaaggaggtgaagaacaccagaatccccatcagcaaggccggcaaggagatcaaggagtacgtggaggcccaggccggcaacgaccccttcctgaagggcatccccgaggacaagaaccccttcaaggagaagggcggctgcctgatcagctag

SEQ ID NO: 294361 - DNA, 594 bp, Artificial Sequence
  derived and/or modified sequence
atgggcttcagcgagcagggcagacagagactgcaccccgaggaggccctgtacctgctggagtgcggcagcatccacctgttccaccaggacctgcccctgagcatccaggaggcctaccagctgctgctgaccgaccacaccgtgaccttcctgcagtaccaggtgttcagccacctgaagagactgggctacgtggtgagaagattccagcccagcagcgtgctgagcccctacgagagacagctgaacctggacgccagcgtgcagcacctggaggacggcgacggcaagagaaagagaagcagcagcagccccagaagcatcaacaagaaggccaaggccctggacaacagcctgcagcccaagagcctggccgccagcagcccccccagcggcaccagcagatgccccagaatgtggggcaccgacctgaccgccctgcagagaatggagctggcccccggcgacagagactgcctgttcagcggcaccatcagcgccgccagctgcacccagaccctgacctgcagcttcagaggccagagcggcccctggccctgggtgagcgacacccacagagtgaagctgtag

SEQ ID NO: 294362 - DNA, 594 bp, Artificial Sequence
  derived and/or modified sequence
atgggattcagtgagcaaggccgacagcgtctgcacccagaagaggccctgtatctcttggaatgcggatctatccacctgttccatcaggatctgccactcagcatacaggaggcataccagttgctgctgactgaccataccgtgacctttctgcagtaccaggtgtttagccacctgaagaggctgggatacgtggtgcggaggttccagccttccagcgttctgagtccatatgagaggcagctcaatctcgatgcaagtgtgcagcacctggaggacggcgatggaaaacgaaagcgatccagttcaagtcctcggtccataaataaaaaggcgaaggccctcgacaatagcttgcagccaaaatctctggctgcgagctctcccccgagcggaacatcccggtgccctcgcatgtggggtacagacttgaccgccttacagagaatggagttggcccccggcgacagagactgcctcttctctggaacgatctctgccgctagttgtacgcagacactcacctgttccttcagaggccagagcggcccttggccatgggtatcagacacccatcgggtgaaattatag

SEQ ID NO: 294363 - DNA, 594 bp, Artificial Sequence
  derived and/or modified sequence
atgggcttcagcgagcagggccggcagaggctgcaccctgaggaggccctgtacctgctggagtgtggcagcatccacctgttccaccaggacctgcccctgagcatccaggaggcctaccagctgctgctgacagaccacacagtgaccttcctgcagtaccaggtgttcagccacctgaagaggctgggctacgtggtgcggcgcttccagcccagctctgtgctgagcccctatgagcggcagctgaacctggatgcctctgtgcagcacctggaggatggagatggcaagaggaagaggagcagcagcagccccaggagcatcaacaagaaggccaaggccctggacaacagcctgcagcccaagagcctggccgccagcagcccccccagcggcaccagccgctgccccaggatgtggggcacagacctgacagccctgcagaggatggagctggcccctggggaccgggactgcctcttcagcggcaccatctctgctgccagctgcacccagaccctgacctgcagcttccggggccagagcggcccctggccctgggtgtctgacacccaccgggtgaagctgtag

SEQ ID NO: 294364 - DNA, 594 bp, Artificial Sequence
  derived and/or modified sequence
atgggcttcagcgagcagggccggcagcggctgcaccccgaggaggcactgtatctcctggagtgcggcagcatacatctttttcatcaggacctgccactgtccatccaggaagcttaccagctgttactgacggaccacaccgtgacttttctgcagtaccaggtcttctcccacctaaaacgactgggttacgtggtgcggcgcttccagccttcctctgtcctgtccccttatgaaaggcagctcaacctcgatgcttctgttcagcacctcgaagacggagatgggaagcggaagcggtccagcagcagccctagaagcataaacaagaaggccaaggcgctcgataactctctacagccaaagtctctcgctgcctcaagcccccccagcggaacatccaggtgtccaaggatgtgggggacagaccttacagctctgcagcggatggagctcgcccccggcgaccgtgactgccttttttctggaaccatctccgccgcatcgtgcacccagacattgacctgctccttccgcgggcagagcggaccatggccgtgggtgtctgacacacacagagtgaagctgtag

SEQ ID NO: 294365 - DNA, 594 bp, Artificial Sequence
  derived and/or modified sequence
atgggattcagcgaacaaggcaggcagcggctccatcctgaggaggccttgtatcttctggagtgtggaagcatccacctgtttcaccaagacctgcccttgagtattcaggaggcctatcagttactacttaccgatcataccgttacattcctgcaataccaagtgttctcccacttgaagcgactcgggtatgtggttcgccgtttccagcccagctccgtgttgagcccttacgagaggcagcttaacctggatgcctcagtccagcacctggaggatggtgatggcaagagaaagcggagttcatcttccccaagatcaatcaacaagaaagctaaggccttagataacagcctccaacccaaatctctggccgctagctcaccaccctccggaacctcccgctgtcctagaatgtggggcactgatctaactgccttgcagagaatggaactggctcccggtgatagagattgcctcttctctggcactattagcgcagcctcgtgtactcagacactgacttgttcattccgcggacaatctggtccgtggccttgggtgagcgatactcaccgtgtgaagctgtag

SEQ ID NO: 294366 - protein, 1105 aa, Artificial Sequence
  derived and/or modified sequence
MAAMAPALTDAAAEAHHIRFKLAPPSSTLSPGSAENNGNANILIAANGTKRKAIAAEDPSLDFRNNPTKEDLGKLQPLVASYLCSDVTSVPSKESLKLQGVFSKQTVLKSHPLLSQSYELRAELLGRQPVLEFSLENLRTMNTSGQTALPQAPVNGLAKKLTKSSTHSDHDNSTSLNGGKRALTSSALHGGEMGGSESGDLKGGMTNCTLPHRSLDVEHTTLYSNNSTANKSSVNSMEQPALQGSSRLSPGTDSSSNLGGVKLEGKKSPLSSILFSALDSDTRITALLRRQADIESRARRLQKRLQVVQAKQVERHIQHQLGGFLEKTLSKLPNLESLRPRSQLMLTRKAEAALRKAASETTTSEGLSNFLKSNSISEELERFTASGIANLRCSEQAFDSDVTDSSSGGESDIEEEELTRADPEQRHVPLRRRSEWKWAADRAAIVSRWNWLQAHVSDLEYRIRQQTDIYKQIRANKGLIVLGEVPPPEHTTDLFLPLSSEVKTDHGTDKLIESVSQPLENHGARIIGHISESLSTKSCGALRPVNGVINTLQPVLADHIPGDSSDAEEQLHKKQRLNLVSSSSDGTCVAARTRPVLSCKKRRLVRPNSIVPLSKKVHRNSTIRPGCDVNPSCALCGSGSINTMPPEIHYEAPLLERLSQLDSCVHPVLAFPDDVPTSLHFQSMLKSQWQNKPFDKIKPPKKLSLKHRAPMPGSLPDSARKDRHKLVSSFLTTAKLSHHQTRPDRTHRQHLDDVGAVPMVERVTAPKAERLLNPPPPVHDPNHSKMRLRDHSSERSEVLKHHTDMSSSSYLAATHHPPHSPLVRQLSTSSDSPAPASSSSQVTASTSQQPVRRRRGESSFDINNIVIPMSVAATTRVEKLQYKEILTPSWREVDLQSLKGSPDEENEEIEDLSDAAFAALHAKCEEMERARWLWTTSVPPQRRGSRSYRSSDGRTTPQLGSANPSTPQPASPDVSSSHSLSEYSHGQSPRSPISPELHSAPLTPVARDTPRHLASEDTRCSTPELGLDEQSVQPWERRTFPLAHSPQAECEDQLDAQERAARCTRRTSGSKTGRETEAAPTSPPIVPLKSRHLVAAATAQRPTHR

SEQ ID NO: 294367 - DNA, 3318 bp, Artificial Sequence
  derived and/or modified sequence
atggccgccatggccccagctctgactgacgctgcggcggaggcacaccacattcgtttcaagttagcccctccatcctcaaccttatcgccgggaagcgctgagaataatggaaatgccaacatactgattgccgccaatggcacgaaacgaaaggccatcgcagcagaggatccgtctctggacttccgcaacaatcccacaaaggaggaccttggcaaactgcaaccgctggtggcctcatatctgtgctctgatgtaacgagtgtgccttcaaaagagagtctgaaactccagggggtcttcagtaaacagaccgttctgaagtcacaccctctgctgtcccagtcatatgaactgcgcgcagaactgctgggaagacagccggtccttgagtttagcctcgagaatctccggaccatgaacacctccggccagacagcactcccccaagcccctgtgaatgggttggctaagaaactgacgaagtcatctacacacagcgaccacgataatagcacgagcctcaacggcggaaagagggctctgacttcctccgccttgcacggcggagagatgggcggcagcgagtcgggagacctgaaagggggtatgaccaactgtacgctcccccacagaagtcttgacgtcgaacacaccactttgtatagcaacaacagtaccgcgaacaagtcttcagtgaattcaatggagcagcctgcattacagggtagctcacgactatcacccggcacagactcgagcagcaatctgggaggcgtcaagctggagggcaagaaatcaccgctcagctcgattctgttttcggccctcgatagtgacacgcggatcaccgccttacttcggcggcaagctgacatagagagccgcgccagaaggcttcagaagaggttgcaggtagtgcaggctaaacaggtggaaagacacatccagcaccagcttggtgggtttctggaaaagaccctatcaaaacttcccaatctcgaatccctgcgaccaagatcccaattgatgcttacccggaaggcagaggccgccctgaggaaagccgcttccgagaccaccacgtctgagggcctgagtaacttcctgaagtcaaacagcatcagcgaagaactcgagcgcttcacggcctccggtatcgcaaacttgcgctgtagtgaacaggcgttcgatagtgacgtgactgattccagctccggtggtgaatccgatatagaagaagaggaactgacccgggccgatcctgagcagcgccacgtgcctttacgtagacgaagcgagtggaaatgggcagcagatagagcagcaatcgtgtcacgctggaattggctccaggcacacgtgtccgatttggaatataggatcaggcaacagaccgacatctacaaacaaattcgtgccaacaaaggattgattgtgctgggagaggtgccaccacctgaacacaccacggatctgtttctacccctgagcagtgaggtgaaaacggaccacggaactgataagctcatcgaatcagtcagccagccactggagaatcacggcgcccgtattatcgggcacatatctgagtccttaagcaccaagtcttgcggagcgctgaggcccgttaacggggttattaacaccctccagccagtgctagcagatcacatacctggcgactcttccgatgccgaggagcagctgcacaaaaaacagaggctgaaccttgtttcttcctcttctgacggcacgtgcgttgctgcacgaacacggcctgtgctgtcttgtaagaaacggcgccttgtccgtccaaacagtattgtacctctctccaagaaagtacatcgcaatagcacgataaggcctggatgcgacgtaaacccatcatgtgccctctgtggttctggctccattaatacaatgccacctgaaattcactacgaagcaccccttctggagaggttatcccagctcgatagttgtgttcatccagtactggcctttccagatgacgtgcccacttctctccattttcagagcatgctcaagtcccagtggcagaataagcctttcgataaaatcaagcccccaaagaagctctctttgaagcacagggctcccatgcccggaagcctgcctgatagcgcaagaaaagacaggcacaagcttgtttcatcctttctgacaacagcaaaactcagtcaccatcaaacccgtccggatcggacgcacaggcagcacttagacgacgtgggcgcggtgccaatggtggagagagtcactgcgcctaaggccgagcgactgttaaatcctcccccccctgtgcacgatcctaatcactcaaaaatgaggctgagagaccactccagtgagcgtagcgaagtgttgaagcatcacaccgacatgtcatcatcttcttatcttgcggccacacatcatccaccccattctcccttagtcagacagctgtccaccagctctgacagccccgcacctgcatcctcctctagtcaggtcacggcaagtactagtcagcagccggtcaggaggagaaggggcgagtcaagcttcgatattaataacattgtgatcccaatgagcgttgccgccactacacgggttgaaaaactgcagtataaggagatcctgacacctagctggagagaagtggacctgcagtcgctgaaaggttcgccagatgaagaaaacgaggagatcgaggacctgtcagatgccgcttttgcggcgctgcacgccaaatgcgaggagatggaacgagcaagatggctgtggactaccagcgtcccccctcagcggcggggaagtcgttcatacaggagcagcgacggcagaacaaccccgcagctgggcagtgcaaatccttccactcctcaaccggcatctcccgatgtgtcctcctcacacagcttgtcagaatacagccatggacaatcccctagaagcccaatctcacctgagttgcactccgccccccttacgccagttgcgagagatactcccaggcacctcgctagtgaggacacgcgctgctctaccccagaactcgggctggacgagcagagtgtccaaccttgggagcgtagaacctttcctctggcccattctccacaagccgagtgcgaggaccagctggacgctcaggagcgagctgcccgttgcacaagacgcacctctggttccaaaaccgggagagagactgaagccgccccaacatcccctccaattgtgcccttgaaatcacggcatctggtggctgccgcaacagcccaacggcccacccataggtag

SEQ ID NO: 294368 - DNA, 3318 bp, Artificial Sequence
  derived and/or modified sequence
atggcagccatggctccagcactgactgacgcagccgcggaggcccaccatatcaggttcaagctcgctcctccttccagcacactgagtcctgggtccgccgagaataatggcaacgctaacatactcatcgccgccaacggtaccaaaagaaaagcgatagccgcagaagatcccagtttggactttaggaataatcccaccaaggaggaccttggaaagctgcagccactggttgcaagttacctttgttccgacgtgacgagcgtgcctagcaaagagtcattgaaactccagggcgttttcagcaagcagacagtgttgaagtcccaccccctcttatctcagtcttacgaattacgcgccgaactgttgggacgacaacctgtcctagaattctccttggagaacctccgaaccatgaacacatctggccagactgcgctaccccaggcgcccgttaatgggctggccaagaagctcacaaagtcttctacccactcagaccatgacaactccacaagtctgaacggggggaagagagctttgactagctctgctctccacggaggtgaaatggggggcagcgagtctggggacttgaaggggggaatgacgaactgtacactaccacaccggtcgctagacgtcgagcacaccaccctgtacagcaataacagtactgccaataaatcatctgtgaactcgatggaacaacccgctttgcaggggtcttccaggctcagccctggcaccgattccagttccaacttaggaggggtaaagctggaaggaaagaagtctccactgtcctcgatcttattctcggccttggattccgacacaaggatcacagccctcctgcgccgccaggccgatatagaaagccgagctcgccgactccagaagagattgcaggtggtccaggcaaaacaagtagaaaggcacatacaacaccagcttggaggattccttgaaaaaactctatctaagctccctaaccttgaatctttacgacctcgctcgcagctcatgctgactagaaaagccgaagcagccctgaggaaggcagcctctgaaactacgacctctgaaggacttagtaactttctcaaatcaaactcaattagcgaggaactggagagattcaccgcatcagggatagccaacttgcgctgttccgagcaggcttttgattccgacgtgactgatagctcatccggcggagaaagcgacatcgaagaagaggaactgacaagggctgaccctgagcagcgtcatgtccctttacgacggcgatctgagtggaaatgggccgcggatcgagccgcaattgtgtcacggtggaattggctgcaagcccacgtgtctgatctcgaatacagaattaggcaacaaacagatatatacaagcagatccgcgcaaataaaggtttgatcgtgttaggggaggttcctccgccagagcatacgacggatttgtttctgccactgagtagcgaggtgaagactgatcacggcactgacaaactcatcgaatcagtcagccaaccgctcgagaatcacggcgctcgcattatcggccacatctctgagagcttgtccaccaaaagctgcggagctctgagacccgtcaatggcgtgattaacactcttcagcccgtcttagcagaccatattccaggggatagctcagacgccgaagagcagctgcataaaaagcagcgactgaatctggtgagctctagtagcgacggaacttgtgtggcagccaggactcgccccgtactatcttgcaagaaaagacggttggtaaggcctaactcaattgtaccactgtctaaaaaagttcaccggaacagtacaatacgcccagggtgcgacgtaaatccatcatgtgcgctttgcggtagtggcagtattaataccatgccaccggagatccattacgaggcccctctgctcgaacggctgtcccaactcgattcctgtgtgcatcctgtcctggcattcccagacgacgtgccgacatcattgcacttccagtctatgctgaaaagccagtggcaaaacaaaccgtttgacaagatcaaaccacccaagaaattgtccctgaagcacagagcgccaatgccagggtccctgcctgactccgcgcgtaaggacaggcataaactagtttcttcatttttgacaaccgcaaaactgtcgcaccatcagacacggccggatagaacccacaggcagcacctcgatgatgtgggagctgtcccaatggtagagagggtgaccgcccccaaagccgagcggttgctcaatcctcctccacccgttcacgatcctaatcacagcaaaatgagactgcgagatcatagctcagagaggagcgaagtgctgaaacaccatacagacatgagcagtagcagctacctcgccgcgacgcaccaccccccgcattcccccttggttcgccaactcagtacctcatcagatagccccgcacctgcatcttcttcatctcaggttacagcctctaccagtcagcaaccagtgcgtaggcgcaggggagagagttcttttgacatcaacaatatcgtgataccgatgagcgtcgctgctacaacacgagtggagaaactacaatacaaagaaatactgactccttcctggcgcgaagtcgatctccagtcactgaaaggtagccccgacgaggagaatgaggagatcgaagacttgagcgacgctgccttcgcagcactacatgctaaatgtgaggagatggaacgggccaggtggctctggactacatcggtgccaccgcagaggagagggagcagatcctaccgctcctccgatggacgaactaccccacagttgggctctgccaatccgtcgacccctcaacctgcgtccccagacgttagcagcagtcatagcctgtccgagtattcccatggtcagtcccctcgatctccgataagccccgagcttcattcagccccccttacacccgtggcgcgggacacgccccgccaccttgccagcgaagacactcgttgttccacacctgagctgggcttggatgagcaatctgtgcagccctgggagagacgcacctttcccttagctcacagtccccaggcagagtgcgaagatcagttagacgctcaggagagagccgcgcgctgtacgagaagaacatcagggtcgaagactggaagggagacggaggcagccccaacgagcccccccatcgtgccattaaagagtagacatttagttgctgcagcgaccgcacagcgccctacccacagatag

SEQ ID NO: 294369 - DNA, 3318 bp, Artificial Sequence
  derived and/or modified sequence
atggccgccatggcccccgccctaacagacgctgccgcagaggctcaccacatccgctttaagctggctcctcccagcagcacactgagccctggcagcgctgagaacaatggtaatgctaatattctaatcgccgcaaacggaactaaacgaaaggcaatcgccgcagaggacccatctttggacttccggaacaaccctacaaaggaagatttggggaaactacagccactggtcgcttcttacctctgctcagatgttacttccgtcccatctaaagagagcctgaaactacagggggttttctctaagcagaccgttctgaagagccaccctctcctgtcccagagctacgagcttagagcagagttgctggggcgccagcccgtgttggaattctccctcgaaaacctgaggactatgaacacatcaggacagaccgcgctgcctcaggctcccgtgaatggactggctaaaaagctgacaaagagctcaactcacagtgatcatgacaacagtacctctctcaacggaggaaaacgcgctttgaccagtagtgctttacatgggggagagatgggggggtccgaaagtggggacttgaaggggggaatgactaattgcacactccctcacaggagtttggacgtcgagcacacaaccctgtactctaataattccaccgcaaataagtcctctgtgaatagcatggaacagcccgccctccaggggagctcaaggctctctcctggcaccgattcgagtagcaatctgggaggggtcaaattggagggaaaaaaatcaccgctatctagtatactattcagtgctctcgattcagacacccggatcaccgcactgctgaggagacaggcagatattgaatctagagcccgccgattgcagaagagactgcaggtggttcaagctaagcaggtagagcggcatatccagcaccagcttggaggatttcttgagaagactctctccaaactaccaaatctagagtcgctcaggcctcgatcccaactcatgttgacccggaaagctgaagcagctctgcggaaagctgccagcgaaacgactacatctgaagggttgtcaaactttcttaaatcaaactctattagcgaggaattagagcgtttcaccgcctcaggaatagccaacctgcgatgttcagagcaagcatttgattctgatgttacagactcctcctcaggtggcgaatccgacatagaggaggaggagttgactcgtgcagacccagaacagagacacgttccccttagaaggcggtcagaatggaaatgggccgcagatcgcgctgctattgtgtccaggtggaattggcttcaggcccatgtgtcggacctggagtaccgcatccgccagcagactgatatttacaagcagattagagctaataaagggctgattgtgctgggggaagtccccccacctgagcataccaccgatctctttctgcctctgagttcagaggttaaaaccgatcacggcactgacaagttgatcgaaagtgtgagtcaaccgctcgaaaaccacggcgcacggatcatagggcatataagcgaaagcctatctactaaaagctgcggggctctgcggcctgtgaatggcgttattaataccctgcagcctgtcctcgccgatcatatcccaggagatagcagcgacgctgaggagcagctgcacaagaagcaacgactgaaccttgtgagctcgagctctgatggtacctgcgtagcagcccgtactcggcctgtgctgtcttgcaagaagagaagactcgtgcggcctaattcaatcgtccccctctccaagaaggtacaccgtaacagtacaattcgccctggatgcgatgtgaatccgtcttgcgccctgtgcggtagcggtagtatcaacacaatgcctccggaaattcattacgaggcaccacttctcgaaagactaagccaactcgactcttgcgtgcatcctgtgctggcattccctgatgacgttcctacttcattacacttccagagcatgcttaagagccagtggcaaaataagccattcgataagatcaagccgccaaagaagctctcccttaaacacagggccccaatgccaggttcgctgcctgatagtgccagaaaggatcgtcacaaactggtgagcagttttctgactacagccaaactcagccaccatcaaacgcgtccagatcgcacgcatagacagcatctggatgatgttggggccgtcccgatggtggagcgcgtcactgccccgaaagccgaacgcttattaaaccctccgcctccagtgcacgatcccaaccactcaaaaatgcgccttcgagaccatagctcagaacggtctgaagtgttgaaacaccacactgacatgagttcttcctcttacttggccgccactcatcacccaccacattcaccacttgtaagacagttaagtactagtagcgacagtccagcgccggctagcagctccagccaggtaacggcgagcacctcccaacaaccagttagaagacgaaggggagagtctagttttgatataaataacatagttatccctatgagcgtcgccgcaactactcgcgtggaaaagctgcagtataaagaaatcctgacacccagctggcgggaagtggaccttcagagcctgaagggcagcccagacgaagagaatgaagaaattgaggacctctccgatgcggcttttgccgccttgcacgcaaagtgtgaagagatggagcgggctagatggctctggaccacgtcagtgccccctcagcgccggggctctcgcagctatagaagttctgacggccgcactacgcctcagctggggtccgctaacccctctactccacagccagcctcacctgatgtcagttcctcccactcactgtcagagtatagccatggccaaagtcctcgatcccctatatccccagagctgcactccgctccactcactcccgtcgccagagacacgcctcgtcatctcgcctccgaggatacgcgttgctccacacccgaactcggtctggacgagcagtctgtgcagccatgggaacgccgaacctttcctttggcccatagccctcaggccgagtgtgaagaccaactcgatgcacaggagcgcgctgcaagatgtacaaggaggacaagtggaagtaagactggcagggaaacagaagcagcacctacaagccctcccatcgtaccccttaagagtcggcacctagtggccgcagcaaccgcacagcgtccaacacatcgctag

SEQ ID NO: 294370 - DNA, 3318 bp, Artificial Sequence
  derived and/or modified sequence
atggcggcaatggctcccgcgttgacagatgccgctgccgaggctcaccatatcaggtttaaactggcacccccctcgtccactctatccccaggcagcgctgaaaacaatggcaacgccaacattcttattgccgccaatggcaccaaacgcaaagcaattgctgccgaggacccatcacttgattttaggaataatcccactaaggaggacctggggaagctgcagcctctcgtcgcgtcttacctgtgttcggatgtcactagcgttccatctaaagagagcctgaaactccagggagtatttagtaaacagactgttttgaagtcacaccccttacttagtcaatcctacgaactgagggccgaattactcgggcgtcagcctgtactggaatttagtttggagaacctcagaacaatgaacacatccggccagaccgccctgcctcaggctcctgtcaatgggctggcaaagaagctcaccaaaagcagtacccatagcgatcatgataattctacatcactcaatggcggcaagagggcccttacatcaagtgcacttcacgggggagaaatgggcggtagtgagtccggagacctgaaaggcggcatgacaaactgcactctgcctcacaggtccctcgacgtggagcatacaacactgtactccaataatagtactgcgaacaaatcctcagtcaattctatggagcaaccagctttgcaaggttcatccaggctcagtcctggtaccgactcgtctagcaatctcggcggggtgaagctcgaagggaaaaaatctccactgagcagcattctgttttcagcactggattctgacacccgcataaccgcccttctgagaaggcaggctgacatcgaatctcgtgcaagaaggctgcagaaacgattgcaggttgtacaagctaaacaggtggagcggcacattcagcatcagctcggcgggttcctcgagaagaccctgtcaaagttacctaaccttgagagcctacggcctcgctcccagctgatgctgaccagaaaagcagaggcagctttgcgcaaggctgctagtgagacaacaacatccgaggggctgagcaactttctgaaatctaacagtatatcggaggagctagagaggttcacggccagtggcatagctaacttgcggtgtagtgaacaagcgttcgattccgatgtgaccgatagtagcagcggcggggaatcagacatagaagaggaggagttgacaagagcggaccctgagcaacgccacgtgcctcttaggcgcaggagtgaatggaagtgggccgccgaccgagctgccatcgtctctcggtggaactggcttcaggcgcatgtgtccgaccttgagtaccgtattcggcagcagacagacatctataagcagatcagagctaacaaggggctgatagtgctgggggaggttccgccacccgagcatacaaccgacttgttccttccactgagctctgaagtcaaaacagaccatgggacagataaactgatcgaatctgtatctcaaccccttgaaaaccacggcgcccggattatcggccatatatctgagtccttgagcaccaagagttgtggagccttaaggcctgtgaacggagtcatcaacacactccaacccgttctcgccgaccacatccccggagatagtagtgacgccgaggaacaactacataagaagcagaggctgaacctggtttcctcctcttctgacggaacttgcgtagccgccaggactaggcctgtactcagctgcaagaaaaggcgactcgtgcgacccaatagcattgtccctctcagtaaaaaggtacaccgtaactctacaattagaccgggttgcgacgtaaatccttcctgcgctctctgcgggtcaggaagtatcaatactatgcctcctgagattcattatgaagcccccttgctcgagcggttgtcccagcttgacagttgtgtgcatcccgtcttggcgtttcctgacgatgtacccacatctctgcatttccaaagcatgttaaagtcacaatggcagaataaaccctttgataaaatcaaaccgccgaaaaagctctcattaaagcacagggccccaatgcctggttcactgcctgactccgctcggaaggatagacacaagctggtctctagctttttaacaacagcaaagttgtcgcaccaccaaacacgtcccgatcgaactcaccggcaacatctggatgacgttggcgccgttcccatggtggaaagggtaaccgcccccaaggcagagagactcctaaaccccccaccgcctgtacacgatcccaatcactcaaaaatgaggttacgcgaccactctagtgagagatccgaagtactaaagcaccatacagatatgtcttctagttcatacttggccgcaacccatcaccctccgcactcgccgctagtcaggcagctctccactagctcggattcacctgcacctgcctcttcgagctcccaggtgactgcaagcacaagccagcaaccggtccgccgtagacgtggtgaatccagttttgacatcaacaatatagttattccaatgagtgtcgcagccactactcgtgtggagaagctgcaatacaaggagatcttgaccccgagctggcgggaagtagatctgcagtctttaaaggggagtccagatgaggagaatgaggagatcgaggacctgagcgacgccgcatttgcggccctgcatgcaaagtgcgaggaaatggagagagctagatggctatggactacatcggtaccgccgcagcggagaggctctcgcagttaccggtcaagtgacggcagaaccactccccagctgggctcagcgaatccttccaccccccagccagctagccccgacgtttcatcatctcactccctctccgaatacagtcatggacaatcgccgcgtagcccgatctccccggagctccattcggcccccttgaccccggtcgccagggacacacctagacacttggcttctgaagatactagatgcagtacccctgagctgggacttgacgaacaatcagtgcaaccgtgggagaggcgcacctttcccctcgcccactccccacaagctgaatgcgaggaccagctggacgctcaagaaagggccgctaggtgcacaagacggacatccgggagtaagaccgggagagagaccgaggctgctccgacgtccccaccaatcgttcccctgaagtccagacacctggtcgcagccgccacagctcagagacctacccaccgttag

SEQ ID NO: 294371 - DNA, 5297 bp, Artificial Sequence
  derived and/or modified sequence
tcctcctcctcctgctgccctttctccttctcctcgctctccctgtggctcccatttctctctctctttgttagttgtaactagaaaggcagggcagggtagaaaaatcccccggaactttaaatggcctctccgggcttccctgctgcgggtccgggctgggagtcgccccaagggcgggggtgtgcgggggcccttccccaggagctgccgcctcgttcgccagcttttcctttggcgttctatttaaaaaggcggcctgaagaacatgatttattcccgtaaaagaaccccccaaacaaactctggctctcgccttgaacttctcttgactgcaaaaggcctttctctgctcgaaacacacatcttggcgcgttgcacgtctgttctctggggaggcagtaaggggccgtggagctggcctcggcctcggcatcgggagaggctggacttcctgtctctctgtgctgaatggctgcgatggcgcccgctctcactgacgcagcagctgaagcacaccatatccggttcaaactggctcccccatcctctaccttgtcccctggcagtgccgaaaataacggcaacgccaacatccttattgctgccaacggaaccaaaagaaaagccattgctgcagaggatcccagcctagatttccgaaataatcctaccaaggaagacttgggaaagctgcaaccactggtggcatcttatctctgctctgatgtaacatctgttccctcaaaggagtctttgaagttgcaaggggtcttcagcaagcagacagtccttaaatctcatcctctcttatctcagtcctatgaactccgagctgagctgttggggagacagccagttttggagttttccttagaaaatcttagaaccatgaatacgagtggtcagacagctctgccacaagcacctgtaaatgggttggctaagaaattgactaaaagttcaacacattctgatcatgacaattccacttccctcaatgggggaaaacgggctctcacttcatctgctcttcatgggggtgaaatgggaggatctgaatctggggacttgaaggggggtatgaccaattgcactcttccacatagaagccttgatgtagaacacacaactttgtatagcaataatagcactgcaaacaaatcctctgtcaattccatggaacagccggcacttcaaggaagcagtagattatcacctggtacagactccagctctaacttggggggtgtcaaattggagggtaaaaagtctcccctgtcttccattcttttcagtgctttagattctgacacaaggataacagctttactgcggcgacaggctgacattgagagccgtgcccgcagattacaaaagcgcttacaggttgtgcaagccaagcaggttgagaggcatatacaacatcagctgggtggatttttggagaagactttgagcaaactgccaaacttggaatccttgagaccacggagccagttgatgctgactcgaaaggctgaagctgccttgagaaaagctgccagtgagaccaccacttcagagggacttagcaactttctgaaaagcaattcaatttcagaagaattggagagatttacagctagtggcatagccaacttgaggtgcagtgaacaggcatttgattcagatgtcactgacagtagttcaggaggggagtctgatattgaagaggaagaactgaccagagctgatcccgagcagcgtcatgtacccctgagacgcaggtcagaatggaaatgggctgcagaccgggcagctattgtcagccgctggaactggcttcaggctcatgtttctgacttggaatatcgaattcgtcagcaaacagacatttacaaacagatacgtgctaataaggggttgatagttcttggggaggtacctcccccagagcatacaacagacttatttcttccacttagttctgaggtgaagacagatcatgggactgataaattgattgagtctgtttctcagccattggaaaaccatggtgcccgtattattggtcatatttcagagtcactgtctaccaaatcatgtggagcactcagacctgtcaatggagttattaacactcttcagcctgtcttggcagaccacattccaggtgacagctctgatgctgaggaacaattacataagaagcaacgactgaatctcgtctcttcatcatctgatggcacctgtgtggcagcccggacacgtcctgtactgagctgtaagaagcggaggcttgttcgacccaacagcatcgttcctctttccaagaaggttcaccggaacagcacaatccgccctggctgtgatgtgaatccctcctgcgcactgtgtggttcaggcagcatcaacaccatgcctcccgaaattcactatgaagcccctctgttggaacgtctttcccagttggactcttgtgttcatcctgttctagcatttccagatgatgttcccacaagcctgcatttccagagcatgctgaaatctcagtggcagaacaagccttttgacaaaatcaaacctcccaaaaagttatcgcttaagcacagagcacccatgccgggcagtctgccagattcagctcgtaaggacaggcacaaattggtcagctccttcctaacaacagccaagctgtcccatcaccaaacccggcctgacaggacccacaggcagcacttagacgatgtgggggccgtgcccatggtggagcgagtgacagcgccaaaagcagagcgcttgctcaacccaccaccacccgtgcatgacccaaaccacagcaaaatgagattgcgagaccattcatctgagagaagtgaagtgttgaagcatcacacagacatgagcagttcgagctacttggcagccacccaccatcctccacacagtcccttggtgcgacagctctccacctcctcagattcccctgcacccgccagctctagctcacaggttacagccagcacatcgcagcagccagtaaggaggagaaggggagagagctcatttgatattaacaacattgtcatcccaatgtctgttgctgcaacaactcgcgtagagaaactgcaatacaaggaaatccttacgcccagctggcgggaggttgatcttcagtctctgaaggggagtcctgatgaggagaatgaagagattgaggacctatccgacgcagccttcgccgccctgcatgccaaatgtgaggagatggagagggcacggtggctgtggaccacgagtgtgccaccccagcggcggggcagcaggtcctacaggtcatcagacggccggacaaccccccagctgggcagtgccaacccctccaccccccagcctgcctcccctgatgtcagcagtagccactctttgtcagaatactcccatggtcagtcccctaggagccccattagcccggaactgcactcagcacccctcacccctgtggctcgggacactccgcgacacttagccagtgaggatacccgttgttccacaccagagctggggctggatgaacagtctgtccagccctgggagcggcggaccttccccctggcgcacagtccccaggcggagtgtgaggaccagctggatgcacaggagcgagcagcccgctgcactcgacgcacctcaggcagcaagactggccgggagacagaggcagcgcccacctcgcctcccattgtccccctcaagagtcggcatctggtggcagcagccacagctcagcgcccgactcacagatgagcgggagacagccatctaaacagactcactaactattggcattaaagcttcagaaatctctgcgtttgatattcaaacatcatatgccggaaattttcacagtttttagtgaacttaaggaatttagatcctactttggtatttttttttcttgttttaatttttgttttgtttttgtttccatgttttcttgtcacacacctgagcacttcctcccgttggcaaacagaagttcaggatgagaccctgctggcctggtcctggcacatcctctgcactgttgaatcactggacttactgatcttagatgaccaccccctccctcacacctgtgggcagggcagaacagcctggcgggctacagtttagcatggccttcttgagctagggtggaatggggcagggtgctctggactcttaccccctcccctcccatctgtggcttggctctgctgtggccctcctggctgggtccccttggtttttcgtgctggaacatccccaccagagcctctctgccataactgccagctgctctccccgagtgctcagctggcagaacacctttcctttctcacccagaacttaagagactgattttttgtttcatctgcatttggtcttctctgttttgactctttcactgcagtaacctggctgtggctgctcaggttcccctcctcatgccccttggtacccttccctgtctgctctcccatgccatgtacacacccacaacccgtccttccacttggaatatttttaccacctatcctgatctttgaaggtagggttaggactacttaacctctattcccactcccctgcaaactgggggttgtgggaagtgagcagccatctccctgtgtgattttttttttttttccctctgattcactttgccatgtttccttcacatccagatccctgtcggtgttagttccactcttggtctttcacgctccccttgcctgtggaacattgtctggtcctagctgtggttcccattgttcccccttcacccttctctgttaaccttgtgcctgtctcctgtatgatcacatcaccaaaaagggggaggggggagaagactctttttttttggccattttgtaatcgtataaaaatagtagacaactgcttaatggttggggttttttcacaattttcaacattagtgatttttttttctgtttgcaagttaaagggtttgtcattgtttctttaaaaaaaaatacaataatgcaccatatccctatgcataaagtgcttcttctatttataaggttgaaaattctgaataacccttttagcattgaaaaaaaaaacaaaaacaaaaaatggaaaaaaaaaaccttgtattttgtaaatattttcttttcctgctttggagctgtgtaatggcagcgaaacatgtagctgtctttgttctatagaaatgcttttcttcagagaagctgatctttgttaatgtcttgattctgttcgcaaagcacagactagtgctt

SEQ ID NO: 294372 - DNA, 4911 bp, Artificial Sequence
  derived and/or modified sequence
ttctctggggaggcagtaaggggccgtggagctggcctcggcctcggcatcgggagaggctggacttcctgtctctctgtgctgaatggctgcgatggcgcccgctctcactgacgcagcagctgaagcacaccatatccggttcaaactggctcccccatcctctaccttgtcccctggcagtgccgaaaataacggcaacgccaacatccttattgctgccaacggaaccaaaagaaaagccattgctgcagaggatcccagcctagatttccgaaataatcctaccaaggaagacttgggaaagctgcaaccactggtggcatcttatctctgctctgatgtaacatctgttccctcaaaggagtctttgaagttgcaaggggtcttcagcaagcagacagtccttaaatctcatcctctcttatctcagtcctatgaactccgagctgagctgttggggagacagccagttttggagttttccttagaaaatcttagaaccatgaatacgagtggtcagacagctctgccacaagcacctgtaaatgggttggctaagaaattgactaaaagttcaacacattctgatcatgacaattccacttccctcaatgggggaaaacgggctctcacttcatctgctcttcatgggggtgaaatgggaggatctgaatctggggacttgaaggggggtatgaccaattgcactcttccacatagaagccttgatgtagaacacacaactttgtatagcaataatagcactgcaaacaaatcctctgtcaattccatggaacagccggcacttcaaggaagcagtagattatcacctggtacagactccagctctaacttggggggtgtcaaattggagggtaaaaagtctcccctgtcttccattcttttcagtgctttagattctgacacaaggataacagctttactgcggcgacaggctgacattgagagccgtgcccgcagattacaaaagcgcttacaggttgtgcaagccaagcaggttgagaggcatatacaacatcagctgggtggatttttggagaagactttgagcaaactgccaaacttggaatccttgagaccacggagccagttgatgctgactcgaaaggctgaagctgccttgagaaaagctgccagtgagaccaccacttcagagggacttagcaactttctgaaaagcaattcaatttcagaagaattggagagatttacagctagtggcatagccaacttgaggtgcagtgaacaggcatttgattcagatgtcactgacagtagttcaggaggggagtctgatattgaagaggaagaactgaccagagctgatcccgagcagcgtcatgtacccctgagacgcaggtcagaatggaaatgggctgcagaccgggcagctattgtcagccgctggaactggcttcaggctcatgtttctgacttggaatatcgaattcgtcagcaaacagacatttacaaacagatacgtgctaataaggggttgatagttcttggggaggtacctcccccagagcatacaacagacttatttcttccacttagttctgaggtgaagacagatcatgggactgataaattgattgagtctgtttctcagccattggaaaaccatggtgcccgtattattggtcatatttcagagtcactgtctaccaaatcatgtggagcactcagacctgtcaatggagttattaacactcttcagcctgtcttggcagaccacattccaggtgacagctctgatgctgaggaacaattacataagaagcaacgactgaatctcgtctcttcatcatctgatggcacctgtgtggcagcccggacacgtcctgtactgagctgtaagaagcggaggcttgttcgacccaacagcatcgttcctctttccaagaaggttcaccggaacagcacaatccgccctggctgtgatgtgaatccctcctgcgcactgtgtggttcaggcagcatcaacaccatgcctcccgaaattcactatgaagcccctctgttggaacgtctttcccagttggactcttgtgttcatcctgttctagcatttccagatgatgttcccacaagcctgcatttccagagcatgctgaaatctcagtggcagaacaagccttttgacaaaatcaaacctcccaaaaagttatcgcttaagcacagagcacccatgccgggcagtctgccagattcagctcgtaaggacaggcacaaattggtcagctccttcctaacaacagccaagctgtcccatcaccaaacccggcctgacaggacccacaggcagcacttagacgatgtgggggccgtgcccatggtggagcgagtgacagcgccaaaagcagagcgcttgctcaacccaccaccacccgtgcatgacccaaaccacagcaaaatgagattgcgagaccattcatctgagagaagtgaagtgttgaagcatcacacagacatgagcagttcgagctacttggcagccacccaccatcctccacacagtcccttggtgcgacagctctccacctcctcagattcccctgcacccgccagctctagctcacaggttacagccagcacatcgcagcagccagtaaggaggagaaggggagagagctcatttgatattaacaacattgtcatcccaatgtctgttgctgcaacaactcgcgtagagaaactgcaatacaaggaaatccttacgcccagctggcgggaggttgatcttcagtctctgaaggggagtcctgatgaggagaatgaagagattgaggacctatccgacgcagccttcgccgccctgcatgccaaatgtgaggagatggagagggcacggtggctgtggaccacgagtgtgccaccccagcggcggggcagcaggtcctacaggtcatcagacggccggacaaccccccagctgggcagtgccaacccctccaccccccagcctgcctcccctgatgtcagcagtagccactctttgtcagaatactcccatggtcagtcccctaggagccccattagcccggaactgcactcagcacccctcacccctgtggctcgggacactccgcgacacttagccagtgaggatacccgttgttccacaccagagctggggctggatgaacagtctgtccagccctgggagcggcggaccttccccctggcgcacagtccccaggcggagtgtgaggaccagctggatgcacaggagcgagcagcccgctgcactcgacgcacctcaggcagcaagactggccgggagacagaggcagcgcccacctcgcctcccattgtccccctcaagagtcggcatctggtggcagcagccacagctcagcgcccgactcacagatgagcgggagacagccatctaaacagactcactaactattggcattaaagcttcagaaatctctgcgtttgatattcaaacatcatatgccggaaattttcacagtttttagtgaacttaaggaatttagatcctactttggtatttttttttcttgttttaatttttgttttgtttttgtttccatgttttcttgtcacacacctgagcacttcctcccgttggcaaacagaagttcaggatgagaccctgctggcctggtcctggcacatcctctgcactgttgaatcactggacttactgatcttagatgaccaccccctccctcacacctgtgggcagggcagaacagcctggcgggctacagtttagcatggccttcttgagctagggtggaatggggcagggtgctctggactcttaccccctcccctcccatctgtggcttggctctgctgtggccctcctggctgggtccccttggtttttcgtgctggaacatccccaccagagcctctctgccataactgccagctgctctccccgagtgctcagctggcagaacacctttcctttctcacccagaacttaagagactgattttttgtttcatctgcatttggtcttctctgttttgactctttcactgcagtaacctggctgtggctgctcaggttcccctcctcatgccccttggtacccttccctgtctgctctcccatgccatgtacacacccacaacccgtccttccacttggaatatttttaccacctatcctgatctttgaaggtagggttaggactacttaacctctattcccactcccctgcaaactgggggttgtgggaagtgagcagccatctccctgtgtgattttttttttttttccctctgattcactttgccatgtttccttcacatccagatccctgtcggtgttagttccactcttggtctttcacgctccccttgcctgtggaacattgtctggtcctagctgtggttcccattgttcccccttcacccttctctgttaaccttgtgcctgtctcctgtatgatcacatcaccaaaaagggggaggggggagaagactctttttttttggccattttgtaatcgtataaaaatagtagacaactgcttaatggttggggttttttcacaattttcaacattagtgatttttttttctgtttgcaagttaaagggtttgtcattgtttctttaaaaaaaaatacaataatgcaccatatccctatgcataaagtgcttcttctatttataaggttgaaaattctgaataacccttttagcattgaaaaaaaaaacaaaaacaaaaaatggaaaaaaaaaaccttgtattttgtaaatattttcttttcctgctttggagctgtgtaatggcagcgaaacatgtagctgtctttgttctatagaaatgcttttcttcagagaagctgatctttgttaatgtcttgattctgttcgcaaagcacagactagtgctt

SEQ ID NO: 294373 - DNA, 5014 bp, Artificial Sequence
  derived and/or modified sequence
cggcgcccaggccggggggctgtttgcaaactgcgcccattttgtggggctgaatccgcccgggctacgctcctccatcacgtgtctgttctctggggaggcagtaaggggccgtggagctggcctcggcctcggcatcgggagaggctggacttcctgtctctctgtgctgaatggctgcgatggcgcccgctctcactgacgcagcagctgaagcacaccatatccggttcaaactggctcccccatcctctaccttgtcccctggcagtgccgaaaataacggcaacgccaacatccttattgctgccaacggaaccaaaagaaaagccattgctgcagaggatcccagcctagatttccgaaataatcctaccaaggaagacttgggaaagctgcaaccactggtggcatcttatctctgctctgatgtaacatctgttccctcaaaggagtctttgaagttgcaaggggtcttcagcaagcagacagtccttaaatctcatcctctcttatctcagtcctatgaactccgagctgagctgttggggagacagccagttttggagttttccttagaaaatcttagaaccatgaatacgagtggtcagacagctctgccacaagcacctgtaaatgggttggctaagaaattgactaaaagttcaacacattctgatcatgacaattccacttccctcaatgggggaaaacgggctctcacttcatctgctcttcatgggggtgaaatgggaggatctgaatctggggacttgaaggggggtatgaccaattgcactcttccacatagaagccttgatgtagaacacacaactttgtatagcaataatagcactgcaaacaaatcctctgtcaattccatggaacagccggcacttcaaggaagcagtagattatcacctggtacagactccagctctaacttggggggtgtcaaattggagggtaaaaagtctcccctgtcttccattcttttcagtgctttagattctgacacaaggataacagctttactgcggcgacaggctgacattgagagccgtgcccgcagattacaaaagcgcttacaggttgtgcaagccaagcaggttgagaggcatatacaacatcagctgggtggatttttggagaagactttgagcaaactgccaaacttggaatccttgagaccacggagccagttgatgctgactcgaaaggctgaagctgccttgagaaaagctgccagtgagaccaccacttcagagggacttagcaactttctgaaaagcaattcaatttcagaagaattggagagatttacagctagtggcatagccaacttgaggtgcagtgaacaggcatttgattcagatgtcactgacagtagttcaggaggggagtctgatattgaagaggaagaactgaccagagctgatcccgagcagcgtcatgtacccctgagacgcaggtcagaatggaaatgggctgcagaccgggcagctattgtcagccgctggaactggcttcaggctcatgtttctgacttggaatatcgaattcgtcagcaaacagacatttacaaacagatacgtgctaataaggggttgatagttcttggggaggtacctcccccagagcatacaacagacttatttcttccacttagttctgaggtgaagacagatcatgggactgataaattgattgagtctgtttctcagccattggaaaaccatggtgcccgtattattggtcatatttcagagtcactgtctaccaaatcatgtggagcactcagacctgtcaatggagttattaacactcttcagcctgtcttggcagaccacattccaggtgacagctctgatgctgaggaacaattacataagaagcaacgactgaatctcgtctcttcatcatctgatggcacctgtgtggcagcccggacacgtcctgtactgagctgtaagaagcggaggcttgttcgacccaacagcatcgttcctctttccaagaaggttcaccggaacagcacaatccgccctggctgtgatgtgaatccctcctgcgcactgtgtggttcaggcagcatcaacaccatgcctcccgaaattcactatgaagcccctctgttggaacgtctttcccagttggactcttgtgttcatcctgttctagcatttccagatgatgttcccacaagcctgcatttccagagcatgctgaaatctcagtggcagaacaagccttttgacaaaatcaaacctcccaaaaagttatcgcttaagcacagagcacccatgccgggcagtctgccagattcagctcgtaaggacaggcacaaattggtcagctccttcctaacaacagccaagctgtcccatcaccaaacccggcctgacaggacccacaggcagcacttagacgatgtgggggccgtgcccatggtggagcgagtgacagcgccaaaagcagagcgcttgctcaacccaccaccacccgtgcatgacccaaaccacagcaaaatgagattgcgagaccattcatctgagagaagtgaagtgttgaagcatcacacagacatgagcagttcgagctacttggcagccacccaccatcctccacacagtcccttggtgcgacagctctccacctcctcagattcccctgcacccgccagctctagctcacaggttacagccagcacatcgcagcagccagtaaggaggagaaggggagagagctcatttgatattaacaacattgtcatcccaatgtctgttgctgcaacaactcgcgtagagaaactgcaatacaaggaaatccttacgcccagctggcgggaggttgatcttcagtctctgaaggggagtcctgatgaggagaatgaagagattgaggacctatccgacgcagccttcgccgccctgcatgccaaatgtgaggagatggagagggcacggtggctgtggaccacgagtgtgccaccccagcggcggggcagcaggtcctacaggtcatcagacggccggacaaccccccagctgggcagtgccaacccctccaccccccagcctgcctcccctgatgtcagcagtagccactctttgtcagaatactcccatggtcagtcccctaggagccccattagcccggaactgcactcagcacccctcacccctgtggctcgggacactccgcgacacttagccagtgaggatacccgttgttccacaccagagctggggctggatgaacagtctgtccagccctgggagcggcggaccttccccctggcgcacagtccccaggcggagtgtgaggaccagctggatgcacaggagcgagcagcccgctgcactcgacgcacctcaggcagcaagactggccgggagacagaggcagcgcccacctcgcctcccattgtccccctcaagagtcggcatctggtggcagcagccacagctcagcgcccgactcacagatgagcgggagacagccatctaaacagactcactaactattggcattaaagcttcagaaatctctgcgtttgatattcaaacatcatatgccggaaattttcacagtttttagtgaacttaaggaatttagatcctactttggtatttttttttcttgttttaatttttgttttgtttttgtttccatgttttcttgtcacacacctgagcacttcctcccgttggcaaacagaagttcaggatgagaccctgctggcctggtcctggcacatcctctgcactgttgaatcactggacttactgatcttagatgaccaccccctccctcacacctgtgggcagggcagaacagcctggcgggctacagtttagcatggccttcttgagctagggtggaatggggcagggtgctctggactcttaccccctcccctcccatctgtggcttggctctgctgtggccctcctggctgggtccccttggtttttcgtgctggaacatccccaccagagcctctctgccataactgccagctgctctccccgagtgctcagctggcagaacacctttcctttctcacccagaacttaagagactgattttttgtttcatctgcatttggtcttctctgttttgactctttcactgcagtaacctggctgtggctgctcaggttcccctcctcatgccccttggtacccttccctgtctgctctcccatgccatgtacacacccacaacccgtccttccacttggaatatttttaccacctatcctgatctttgaaggtagggttaggactacttaacctctattcccactcccctgcaaactgggggttgtgggaagtgagcagccatctccctgtgtgattttttttttttttccctctgattcactttgccatgtttccttcacatccagatccctgtcggtgttagttccactcttggtctttcacgctccccttgcctgtggaacattgtctggtcctagctgtggttcccattgttcccccttcacccttctctgttaaccttgtgcctgtctcctgtatgatcacatcaccaaaaagggggaggggggagaagactctttttttttggccattttgtaatcgtataaaaatagtagacaactgcttaatggttggggttttttcacaattttcaacattagtgatttttttttctgtttgcaagttaaagggtttgtcattgtttctttaaaaaaaaatacaataatgcaccatatccctatgcataaagtgcttcttctatttataaggttgaaaattctgaataacccttttagcattgaaaaaaaaaacaaaaacaaaaaatggaaaaaaaaaaccttgtattttgtaaatattttcttttcctgctttggagctgtgtaatggcagcgaaacatgtagctgtctttgttctatagaaatgcttttcttcagagaagctgatctttgttaatgtcttgattctgttcgcaaagcacagactagtgcttaaaaaaaaaaaagaa

SEQ ID NO: 294374 - DNA, 5105 bp, Artificial Sequence
  derived and/or modified sequence
tcagataccttctcgaaacaaaagattttcctacctgcttatacttggtaaccgagggaattactaagacttcttgctcatttctgagtattgtctttatatcctgacactatgaatgctacttggatgcctcttaagtctgttctctggggaggcagtaaggggccgtggagctggcctcggcctcggcatcgggagaggctggacttcctgtctctctgtgctgaatggctgcgatggcgcccgctctcactgacgcagcagctgaagcacaccatatccggttcaaactggctcccccatcctctaccttgtcccctggcagtgccgaaaataacggcaacgccaacatccttattgctgccaacggaaccaaaagaaaagccattgctgcagaggatcccagcctagatttccgaaataatcctaccaaggaagacttgggaaagctgcaaccactggtggcatcttatctctgctctgatgtaacatctgttccctcaaaggagtctttgaagttgcaaggggtcttcagcaagcagacagtccttaaatctcatcctctcttatctcagtcctatgaactccgagctgagctgttggggagacagccagttttggagttttccttagaaaatcttagaaccatgaatacgagtggtcagacagctctgccacaagcacctgtaaatgggttggctaagaaattgactaaaagttcaacacattctgatcatgacaattccacttccctcaatgggggaaaacgggctctcacttcatctgctcttcatgggggtgaaatgggaggatctgaatctggggacttgaaggggggtatgaccaattgcactcttccacatagaagccttgatgtagaacacacaactttgtatagcaataatagcactgcaaacaaatcctctgtcaattccatggaacagccggcacttcaaggaagcagtagattatcacctggtacagactccagctctaacttggggggtgtcaaattggagggtaaaaagtctcccctgtcttccattcttttcagtgctttagattctgacacaaggataacagctttactgcggcgacaggctgacattgagagccgtgcccgcagattacaaaagcgcttacaggttgtgcaagccaagcaggttgagaggcatatacaacatcagctgggtggatttttggagaagactttgagcaaactgccaaacttggaatccttgagaccacggagccagttgatgctgactcgaaaggctgaagctgccttgagaaaagctgccagtgagaccaccacttcagagggacttagcaactttctgaaaagcaattcaatttcagaagaattggagagatttacagctagtggcatagccaacttgaggtgcagtgaacaggcatttgattcagatgtcactgacagtagttcaggaggggagtctgatattgaagaggaagaactgaccagagctgatcccgagcagcgtcatgtacccctgagacgcaggtcagaatggaaatgggctgcagaccgggcagctattgtcagccgctggaactggcttcaggctcatgtttctgacttggaatatcgaattcgtcagcaaacagacatttacaaacagatacgtgctaataaggggttgatagttcttggggaggtacctcccccagagcatacaacagacttatttcttccacttagttctgaggtgaagacagatcatgggactgataaattgattgagtctgtttctcagccattggaaaaccatggtgcccgtattattggtcatatttcagagtcactgtctaccaaatcatgtggagcactcagacctgtcaatggagttattaacactcttcagcctgtcttggcagaccacattccaggtgacagctctgatgctgaggaacaattacataagaagcaacgactgaatctcgtctcttcatcatctgatggcacctgtgtggcagcccggacacgtcctgtactgagctgtaagaagcggaggcttgttcgacccaacagcatcgttcctctttccaagaaggttcaccggaacagcacaatccgccctggctgtgatgtgaatccctcctgcgcactgtgtggttcaggcagcatcaacaccatgcctcccgaaattcactatgaagcccctctgttggaacgtctttcccagttggactcttgtgttcatcctgttctagcatttccagatgatgttcccacaagcctgcatttccagagcatgctgaaatctcagtggcagaacaagccttttgacaaaatcaaacctcccaaaaagttatcgcttaagcacagagcacccatgccgggcagtctgccagattcagctcgtaaggacaggcacaaattggtcagctccttcctaacaacagccaagctgtcccatcaccaaacccggcctgacaggacccacaggcagcacttagacgatgtgggggccgtgcccatggtggagcgagtgacagcgccaaaagcagagcgcttgctcaacccaccaccacccgtgcatgacccaaaccacagcaaaatgagattgcgagaccattcatctgagagaagtgaagtgttgaagcatcacacagacatgagcagttcgagctacttggcagccacccaccatcctccacacagtcccttggtgcgacagctctccacctcctcagattcccctgcacccgccagctctagctcacaggttacagccagcacatcgcagcagccagtaaggaggagaaggggagagagctcatttgatattaacaacattgtcatcccaatgtctgttgctgcaacaactcgcgtagagaaactgcaatacaaggaaatccttacgcccagctggcgggaggttgatcttcagtctctgaaggggagtcctgatgaggagaatgaagagattgaggacctatccgacgcagccttcgccgccctgcatgccaaatgtgaggagatggagagggcacggtggctgtggaccacgagtgtgccaccccagcggcggggcagcaggtcctacaggtcatcagacggccggacaaccccccagctgggcagtgccaacccctccaccccccagcctgcctcccctgatgtcagcagtagccactctttgtcagaatactcccatggtcagtcccctaggagccccattagcccggaactgcactcagcacccctcacccctgtggctcgggacactccgcgacacttagccagtgaggatacccgttgttccacaccagagctggggctggatgaacagtctgtccagccctgggagcggcggaccttccccctggcgcacagtccccaggcggagtgtgaggaccagctggatgcacaggagcgagcagcccgctgcactcgacgcacctcaggcagcaagactggccgggagacagaggcagcgcccacctcgcctcccattgtccccctcaagagtcggcatctggtggcagcagccacagctcagcgcccgactcacagatgagcgggagacagccatctaaacagactcactaactattggcattaaagcttcagaaatctctgcgtttgatattcaaacatcatatgccggaaattttcacagtttttagtgaacttaaggaatttagatcctactttggtatttttttttcttgttttaatttttgttttgtttttgtttccatgttttcttgtcacacacctgagcacttcctcccgttggcaaacagaagttcaggatgagaccctgctggcctggtcctggcacatcctctgcactgttgaatcactggacttactgatcttagatgaccaccccctccctcacacctgtgggcagggcagaacagcctggcgggctacagtttagcatggccttcttgagctagggtggaatggggcagggtgctctggactcttaccccctcccctcccatctgtggcttggctctgctgtggccctcctggctgggtccccttggtttttcgtgctggaacatccccaccagagcctctctgccataactgccagctgctctccccgagtgctcagctggcagaacacctttcctttctcacccagaacttaagagactgattttttgtttcatctgcatttggtcttctctgttttgactctttcactgcagtaacctggctgtggctgctcaggttcccctcctcatgccccttggtacccttccctgtctgctctcccatgccatgtacacacccacaacccgtccttccacttggaatatttttaccacctatcctgatctttgaaggtagggttaggactacttaacctctattcccactcccctgcaaactgggggttgtgggaagtgagcagccatctccctgtgtgattttttttttttttccctctgattcactttgccatgtttccttcacatccagatccctgtcggtgttagttccactcttggtctttcacgctccccttgcctgtggaacattgtctggtcctagctgtggttcccattgttcccccttcacccttctctgttaaccttgtgcctgtctcctgtatgatcacatcaccaaaaagggggaggggggagaagactctttttttttggccattttgtaatcgtataaaaatagtagacaactgcttaatggttggggttttttcacaattttcaacattagtgatttttttttctgtttgcaagttaaagggtttgtcattgtttctttaaaaaaaaatacaataatgcaccatatccctatgcataaagtgcttcttctatttataaggttgaaaattctgaataacccttttagcattgaaaaaaaaaacaaaaacaaaaaatggaaaaaaaaaaccttgtattttgtaaatattttcttttcctgctttggagctgtgtaatggcagcgaaacatgtagctgtctttgttctatagaaatgcttttcttcagagaagctgatctttgttaatgtcttgattctgttcgcaaagcacagactagtgcttaaaaaaaaaaaagaaggaaaaattgaaaaaaataaaaaaaaaagttacagaa

SEQ ID NO: 294375 - DNA, 3318 bp, Artificial Sequence
  derived and/or modified sequence
atggccgccatggccccagccctgacagatgctgctgctgaggcccaccacatccgcttcaagctggccccacccagcagcaccctgagccctggcagcgcagaaaataatggaaatgccaacatcctgattgctgccaacggcaccaagaggaaggccatcgctgctgaggaccccagcctggacttcaggaacaaccccaccaaggaggacctgggcaagctgcagcccctggtggccagctacctgtgcagtgatgtgacctctgtgcccagcaaggagagcctgaagctgcagggcgtcttcagcaagcagacagtgctgaagagccaccccctgctgagccagagctatgagctgcgggcagagctgctgggccggcagcctgtgctggagttcagcctggagaacctgcggaccatgaacaccagcggccagacagccctgccccaggcccctgtgaatggcctggccaagaagctgaccaagagcagcacccacagcgaccatgacaacagcaccagcctgaatggaggcaagagggccctgaccagcagcgccctgcatggaggagagatgggcggcagcgagagcggggacctgaagggcggcatgaccaactgcaccctgccccacaggagcctggatgtggagcacaccaccctgtacagcaacaacagcacagccaacaagagctctgtgaacagcatggagcagcctgccctgcagggcagcagccggctgagccctggaacagacagcagcagcaacctgggcggcgtgaagctggagggcaagaagagccccctgagcagcatcctcttcagcgccctggacagcgacacccgcatcacagccctgctgcggcggcaggccgacatcgagagccgggcccggcggctgcagaagaggctgcaggtggtgcaggccaagcaggtggagcggcacatccagcaccagctgggcggcttcctggagaagaccctgagcaagctgcccaacctggagagcctgcggcccaggagccagctgatgctgaccaggaaggccgaggccgccctgaggaaggccgccagcgagaccaccaccagcgagggcctgagcaacttcctgaagagcaacagcatcagcgaggagctggagcgcttcaccgccagcggcatcgccaacctgcgctgcagcgagcaggcctttgacagtgatgtgacagacagcagcagtggaggagagagtgacatcgaggaggaggagctgaccagggctgaccctgagcagagacatgtgcccctgcggcggcgctctgagtggaagtgggccgctgacagagctgccatcgtgagccgctggaactggctgcaggcccacgtgtctgacctggagtaccgcatccggcagcagacagacatctacaagcagatccgggccaacaagggcctcatcgtgctgggggaggtgcccccacctgagcacaccacagacctcttcctgcccctgagcagcgaggtgaagacagaccacggcacagacaagctgattgagagcgtgtcccagcccctggagaaccacggggcccgcatcatcggccacatcagcgagagcctgagcaccaagagctgtggggccctgcggcctgtgaatggagtcatcaacaccctgcagcctgtgctggccgaccacatccctggggacagcagtgatgctgaggagcagctgcacaagaagcagaggctgaacctggtgagcagcagcagtgatggcacctgtgtggccgcccggaccaggcctgtgctgagctgcaagaagaggcggctggtgcggcccaacagcatcgtgcccctgagcaagaaggtgcacaggaacagcaccatccggcccggctgtgatgtgaaccccagctgtgccctgtgtggcagcggcagcatcaacaccatgcctcctgagatccactatgaggcccccctgctggagcggctgagccagctggacagctgtgtgcaccctgtgctggccttcccagatgatgtgcccaccagcctgcacttccagagcatgctgaagagccagtggcagaacaagccctttgacaagatcaagccacccaagaagctgagcctgaagcaccgggcccccatgcctggcagcctgcctgacagcgccaggaaggacagacacaagctggtgtcctccttcctgaccacagccaagctgagccaccaccagaccaggccagacaggacccaccggcagcacctggatgatgtgggcgctgtgcccatggtggagcgggtgacagcccccaaggccgagcggctgctgaaccccccacctcctgtgcatgaccccaaccacagcaagatgaggctgcgggaccacagcagcgagaggtctgaggtgctgaagcaccacacagacatgagcagcagcagctacctggccgccacccaccaccccccccacagccccctggtgcggcagctgagcaccagcagtgacagccctgccccagccagcagcagcagccaggtgacagccagcaccagccagcagcctgtgagaagaagaagaggagagagcagctttgacatcaacaacatcgtcatccccatgtctgtggccgccaccaccagggtggagaagctgcagtacaaggagatcctgacccccagctggagggaggtggacctgcagagcctgaagggcagcccagatgaagaaaatgaggagattgaggacctgagtgatgctgcctttgctgccctgcacgccaagtgtgaggagatggagcgggcccgctggctgtggaccacctctgtgcccccccagaggcggggcagccgcagctaccgcagcagtgatggccgcaccaccccccagctgggcagcgccaaccccagcaccccccagcctgccagcccagatgtgagcagcagccacagcctgtctgagtacagccacggccagagccccaggagccccatcagccctgagctgcacagcgcccccctgacccctgtggcccgggacacccccaggcacctggccagcgaggacacccgctgcagcaccccagagctgggcctggatgagcagagcgtgcagccctgggagaggaggaccttccccctggcccacagcccccaggctgaatgtgaggaccagctggatgcccaggagcgggccgcccgctgcaccaggaggaccagcggcagcaagacaggccgggagacagaggccgcccccaccagcccccccatcgtgcccctgaagagccgccacctggtggccgccgccacagcccagaggcccacccacaggtag

SEQ ID NO: 294376 - DNA, 3318 bp, Artificial Sequence
  derived and/or modified sequence
atggccgccatggcccccgccctgaccgacgccgccgccgaggcccaccatatcaggttcaagttggctcctccttcctccaccctgtcacccggatccgccgaaaacaatggtaacgcgaatatccttattgccgctaacggcacaaagaggaaggccattgctgcagaggaccctagtttggatttccgtaacaaccctaccaaggaggatctgggaaagcttcagcccctcgtggcgtcctacttgtgttccgatgtgacaagtgtgccttctaaagagagtctgaagttacagggtgtgttttccaagcagacagtgctcaagtcccatcccttgctctcacaaagctacgagcttcgagctgagctgctgggtcggcagcctgtgctggagtttagcctggagaacctgcggacaatgaacacctctggccagaccgccctgccccaagcccccgtgaacgggctggccaagaagttaaccaagagctcaacacacagcgatcacgacaattctactagtcttaatggcggaaagcgtgccctgacatcatcagctctgcacggaggcgagatgggcggcagcgagtcaggggatctgaaaggtggaatgacaaactgcacactcccgcacaggtctcttgatgtcgagcacaccacactgtattcaaacaattccaccgccaacaaaagctcagtgaatagtatggaacaacccgccctgcaaggtagttccaggttgtcccccggtaccgactcttcctcaaatctcggaggagtgaagttggagggcaaaaagagtcctctctcctccatcttgttttctgcactggacagcgataccagaattactgcgttgttaaggaggcaagctgatattgagagtagggctcggcggctgcaaaagaggttgcaggtcgtacaagctaagcaagttgagcgtcatatacagcaccagcttggggggttcctggagaagacgctgtcaaagttgcccaatttagaatcgcttcgacctcgctctcagctcatgcttacgagaaaagccgaggccgccctccggaaagctgcttcagagaccacaactagcgaagggctctctaactttttgaaatcaaacagcatctccgaagagctagagcgcttcaccgcttcgggcattgcaaacctccggtgttccgagcaggccttcgactccgacgtgacagactcatcctctggcggggagagtgatatagaggaggaagaacttactagggcggatcccgaacagaggcacgtcccactgcgccgccggtccgagtggaagtgggccgccgaccgcgctgccatcgtctcacgctggaattggcttcaggcacatgtcagcgacttggaataccgcattcgtcagcagactgacatttataagcagatacgtgctaacaagggccttatcgtgctgggcgaggtgcctccccctgagcatactacggacctgttcttgcccttgtcaagtgaagtgaagaccgatcacggtaccgacaaattaattgaatcagtgtcgcagccgctcgagaatcacggcgcacggattattggccatataagcgaaagtctgtcaaccaagagttgtggagctttacggccagtcaatggggttataaacacattgcaacctgtgttagcggatcacattcccggcgattcatcagacgccgaggagcagctgcacaaaaagcagcgcctaaacctggtgtcaagctcttccgacggaacctgtgtggcagccagaacgcggccagttttgtcatgcaagaaaaggcgcctagtacggccaaactcaattgtccccctgtctaagaaggtccacagaaattctaccatacggcccggatgcgacgtgaatccaagctgtgcactgtgcggcagtggcagcattaatacaatgccacccgaaatccattatgaggctccactactggaacgcttaagccagctggattcttgcgtgcaccctgtgctagctttcccagacgatgtgccaacctctttacacttccagtccatgctgaaaagccagtggcagaacaagccttttgataagataaaacccccgaaaaagttgtctcttaagcatcgggctcccatgccgggatctttacctgacagtgcaagaaaggaccgtcacaagcttgtttcttccttccttactacggccaaactgtctcaccaccagactcggcccgaccggacccacagacagcaccttgacgacgtcggcgctgtgccaatggtagagcgggttactgcaccaaaagccgagagacttcttaatcctccgccacctgtccacgatccaaaccatagcaagatgagactgagggaccacagcagtgagaggtcagaggtcctcaagcaccacactgatatgagcagctccagctatcttgcagcaacgcaccatcccccacactcacccttagtccggcaactgagcaccagctccgattcacccgccccagcctccagcagtagtcaggtcacggcatctaccagccagcaaccagtgcgcagacggcggggtgagtcttctttcgacattaacaacatcgtcataccaatgagcgtggcagccacaactagggtggaaaagcttcagtacaaggagatactgaccccctcgtggagggaggtagatctccagtcactcaaaggctccccagacgaggagaacgaggagattgaggatctgagcgatgccgcgttcgctgcgttgcacgccaaatgtgaagagatggagagggccaggtggttgtggacgacgtcagtgcctccacagcgacgcggttcccggtcctatcgaagcagcgatgggcggacaaccccacagttgggctccgccaacccctctacgccccaaccggcctcaccagacgtcagtagctcacattcattgtccgaatattcccacgggcagagcccccgaagccctatctcacctgagctgcactccgcccccctgacccccgtggcacgcgatacaccccggcatctggcctcagaggatacccggtgcagcacgcctgagctggggctggatgagcagtctgttcaaccctgggagcgccgcacatttccattggcccacagtccccaggccgagtgcgaggatcagctggatgctcaggagcgggccgccagatgcactaggcgaacgtctggtagcaagactggacgggagaccgaagcagcgcctacctcgccaccaattgtacctctaaagagcaggcatttggttgctgctgccaccgcgcagcggcccacccaccggtag

SEQ ID NO: 294377 - DNA, 3318 bp, Artificial Sequence
  derived and/or modified sequence
atggccgccatggcccccgccctgaccgacgccgccgccgaggcccatcacattcgctttaagcttgcccccccaagctctactctttccccggggagtgcagaaaataatggtaacgccaacattctcatcgctgctaatggtacaaagaggaaggcaatcgctgccgaagacccctcactcgactttcggaacaatcctaccaaggaggatctgggcaaactgcagccactggtagcctcatacctgtgtagtgatgtcaccagcgtgcctagcaaggaaagccttaagctgcagggagtgttcagtaagcagactgtgcttaagtcccacccactcttaagtcaaagctacgagctcagagctgagctgttggggcgtcaacccgtccttgaattcagtttggaaaatctcaggaccatgaatacctccggacaaacagccttgcctcaggctcctgtgaacggccttgccaagaagcttaccaagagcagcacccactccgaccatgacaatagcacaagcctgaatggagggaaacgcgcccttaccagcagcgccctgcacgggggtgaaatgggcggaagtgaatcaggcgacctgaaaggcggtatgaccaactgtactcttcctcaccggtcactggatgtagaacacaccacactgtattccaataattcaacagcgaacaagtcaagcgtcaacagtatggaacagcccgccctgcaggggtcgtcaagactctcgccagggacggactccagttctaatctcggaggcgtgaagcttgaaggtaaaaaaagccccctgtcttcaatcctgttcagcgccctggatagcgacacccgaatcaccgcactgcttagacgacaggcagatattgaaagcagagcccggagattacagaaacggttgcaggtcgttcaggccaagcaagtagagcgccatattcaacaccaactcgggggctttctggaaaaaaccctaagcaagcttcccaacctagagtctcttcgccctaggagtcagctgatgctcactcgcaaagcagaagcagctctgagaaaagccgcctcagagaccacaacctctgagggcctgagcaactttttaaaaagcaatagtatctctgaagaactggaaagatttacagccagcgggatagccaacttgcggtgcagtgaacaggcattcgattctgacgttaccgattcctcttccggtggtgagtccgatatcgaggaagaggagctcaccagggccgaccctgagcagcgccacgtccccttacgaagacggtcggaatggaaatgggccgccgatagggccgccatcgtgtccaggtggaactggctccaggctcatgttagcgacctggagtacagaatcaggcagcaaacagacatctataaacagatcagggccaataaggggctcatagtattaggtgaggtgcccccccccgagcacacgacagatctgttcctgcctctctctagcgaagttaagacggaccacggtacagacaagctgattgagtcagtcagtcagcctctcgaaaaccatggagctagaatcatcggacatatttcggagtccttgtccaccaagtcctgtggggccctgcggccagtgaatggggtgattaacactcttcaaccggtactcgccgatcacatccccggcgattcaagtgacgcagaggaacagctgcacaagaaacagaggctgaacctcgttagcagtagctccgacggaacatgcgtggctgctcgcacgagaccggttctgtcctgcaagaagcgaagactggtgcggcccaatagcattgtgccgttatccaagaaggtgcatcgcaacagcacaatcagacccgggtgcgacgtgaacccttcatgcgctctatgcgggtcaggatctattaatactatgccacccgaaattcattatgaagcacccctgttggaacgcctcagtcagctcgacagttgtgtccatccagtgcttgcgttcccagacgacgtgcccacgtctctgcactttcaatcaatgctcaagagccagtggcagaacaagcccttcgataaaataaagcctccgaaaaagcttagcctcaaacatcgtgcccctatgccagggtctctgccagacagtgcgcgcaaggatagacacaagctcgtcagctcctttctgaccaccgccaagctcagccatcaccagactagacccgacaggacgcatcgtcagcatctggatgatgttggggctgtaccaatggtcgagcgagtgacagctcccaaagcagagaggctcctaaatcctcctccacctgtgcatgatccgaatcattctaaaatgcggttacgcgatcactctagtgaaaggagcgaggtcctgaagcatcacaccgacatgagctcatccagctatttggcagcgacccaccaccccccccatagccctctggttagacagctaagtacatcttccgacagtcccgcacccgcttcatcttcttcccaagtgaccgcaagtacctcccagcagccagttcggcgccgccgcggcgaatcatcctttgatatcaataatattgttatccctatgtcagttgccgccacaaccagggtcgaaaagctgcagtacaaggagatcctgacccctagctggcgggaggttgatctccaatccttgaaagggagtcctgacgaggagaatgaggagattgaggacctcagtgacgcggcctttgctgccctgcatgccaagtgtgaagaaatggagcgcgcacgatggctgtggacaacttccgtgccaccacagaggcgcggttcccgctcgtaccgcagcagtgacggaagaaccaccccccagttaggctccgccaacccgagtacgccacagcctgcctctcccgacgtcagcagtagccactccctgagtgagtacagccacgggcagagtccccgaagccccatctcccctgaacttcatagcgctcctctgacaccagtcgcaagggacacaccccggcacctcgctagcgaggatactcgttgtagcacacctgagcttggcttggatgagcagtctgtccagccatgggagcggagaacgtttccactggcccacagtcctcaggccgagtgcgaagaccaactggacgcacaggagcgggcagctcgctgcacccgcaggacttcggggtccaagaccgggagagagaccgaggcagctcccaccagccccccgattgttccccttaaatcgagacaccttgtcgccgccgctacagcccaaaggcccacgcaccgctag

SEQ ID NO: 294378 - DNA, 3318 bp, Artificial Sequence
  derived and/or modified sequence
atggccgccatggcccccgccctgaccgacgccgccgccgaggcccaccacatccggttcaaactggctcctccatcctccactctgtcaccaggctcggctgagaacaacgggaatgccaacattctcatagctgctaatggaaccaaaaggaaagcaatcgcagcagaggacccgtccttggactttcgcaataatccaaccaaggaggacttgggcaaactgcaaccacttgtggcttcatatctgtgttccgacgtcacatcagtgccgagtaaggagtctctgaagcttcagggagtgttcagcaaacaaacagtccttaagtctcacccactgcttagccaatcatacgagctgcgggccgagctcctcggtcgccagcctgttctggagttcagccttgagaatctcagaacaatgaacacctctggccagacagctctgccccaggcgcctgtaaatggattggctaagaaattaaccaaaagttcgacacattctgatcacgataactccacaagtctcaacggcggaaagcgagccttgactagctctgcactgcatggcggagagatgggcggcagcgagagcggggatcttaagggcggtatgactaactgcaccctgccccatcggtccctcgatgtggagcacacaacactgtactcaaacaattctacagctaacaagagttctgttaacagcatggagcagcccgcactccaggggagttctaggctatcaccaggcacggactcctcttcgaatctgggaggggtcaagctcgagggaaagaagtctcctttatcctccattcttttctccgcactggactccgacaccagaattaccgccctgctgaggagacaggcggatattgagagccgtgcccggcggctccagaaacgccttcaggttgtgcaggccaaacaagtagaacggcacattcaacatcaactcggtgggtttttggaaaagacgctgagcaaactgcccaacctggaatccctgagaccacggtcccagctcatgcttacccgaaaagctgaagccgcactgcgaaaggcagctagcgagaccacaacctccgaaggactttccaactttctgaaatctaactctatctcagaggagttggaacgattcacagcttctgggattgccaacctgcgttgttccgagcaagcttttgactcagatgtcacagattctagttcgggtggggaatccgatatcgaagaggaggaactgaccagagcagatcctgaacagaggcacgtccccctcaggagacgaagcgaatggaaatgggcagcagaccgagccgctatcgtgtcccggtggaactggctccaagcacatgtatcggacctagaataccgaattcggcaacaaaccgatatatacaaacaaatcagggctaataagggcttgattgttttaggagaggtgccacctccagagcatacaaccgatttatttttacccctgagctccgaggtgaaaaccgatcacggcactgacaaactaattgagtccgtgagccaacccctggaaaatcacggcgccagaatcatcggtcatatctctgagtcgctgagtaccaaaagttgtggggcactgcgccccgtgaatggtgttattaatactctccaaccagtcctagctgatcatatccctggcgacagctccgacgccgaggaacagctgcacaagaagcagagattaaacctggtgagttcctcctcggatggaacttgtgtggcggcacgaacgagaccggttctgtcatgtaaaaagcgccgactcgttcgtccaaactccattgtgcccctgtctaagaaggtgcatcgaaactccacgatacgcccaggatgcgatgtgaaccccagttgtgcattgtgcggttcagggagtattaataccatgccacctgaaattcactacgaagctcctctgctggagagactgagtcagctcgattcttgcgtacacccagtcctcgcgttcccagacgacgtaccgacgtctctacacttccaaagcatgctcaaatcccagtggcaaaataagccattcgacaagatcaaacccccaaagaagctttccctgaaacaccgggccccaatgccgggctccctaccggattccgctcgaaaggacaggcacaaacttgtctctagctttctgacgactgccaagttgagccatcaccagacacgacctgatcggactcaccgccaacacctggatgatgtgggtgccgttcccatggtagagcgcgtgaccgcgccaaaagccgaacggctgctcaatcctccaccccccgtccacgacccgaaccactcaaagatgaggctgagagaccattcttccgagaggtccgaggttcttaagcaccacactgatatgtcctcgtcatcatacctcgccgctacccatcacccccctcactcccctctggtcaggcagctgtccaccagctcggattctcctgctcctgcctcttcttccagtcaagtcaccgcatctacctctcagcagccagtgcggaggcggagaggcgagtctagcttcgacatcaataacattgtgatcccaatgtccgtcgctgccactaccagagtggagaagctacagtacaaggagattctgactccctcttggcgtgaggtggacctgcaaagcctgaaaggctctcccgatgaggaaaacgaagaaattgaagatctgtctgatgcagcattcgcagcactgcatgccaagtgtgaggagatggagcgggctcgctggctctggactacgtcagttccgccacagcgccggggtagtcggagctatcgctcttccgacggtcgaaccacgcctcagctagggagcgccaacccgagcactcctcaacccgccagtcctgacgtgtcttcaagccactctcttagtgagtactctcatgggcaatccccacgttccccaatctctcccgagctgcactccgctccgttgacccctgtggctcgggatacaccacggcatctcgcatctgaggatactcggtgcagcactccagaacttggattggacgagcagtccgtccaaccctgggagcgacggacctttcccctggcacatagcccccaggccgagtgcgaagatcagctggatgcacaagaaagggctgccaggtgcacccgaaggacaagcggatctaaaactggaagagagactgaagcagcccccaccagcccccctattgtaccactgaagtcgcgccacctggtagcagcagccacagcccagcgccccacccacaggtag

SEQ ID NO: 294379 - DNA, 3318 bp, Artificial Sequence
  derived and/or modified sequence
atggccgccatggcccccgccctgaccgacgccgccgccgaggcccatcacatccgctttaaactggcccctcctagcagcaccctttcccctggctctgctgagaacaacggcaatgcaaatattttaatcgccgcgaacgggacaaaaagaaaagcaattgcggcagaggaccctagtctagatttcaggaataaccctactaaggaggacctcggcaagctgcagcctctcgttgcctcatacttgtgtagcgacgtgacctcagtcccaagtaaagaatcgctcaagctgcaaggtgtgttcagtaagcagaccgtgctgaagagccacccccttctgtctcagtcatacgaactgcgtgccgagttgctcggtagacaacctgtcctggagttctcactggaaaacctacggaccatgaataccagcggtcagacagccctcccgcaggcccctgtgaatgggctggcaaagaaattaacaaagtccagcacccattcagatcatgataactcaacttctttgaacggcggtaagcgcgccctgacatcctctgccctgcatggcggtgagatgggtggatcagagtccggcgacttgaaaggaggaatgactaattgtactcttcctcaccgatctttggatgtggagcacaccaccctttacagtaataattctaccgccaataaatcatctgtcaacagtatggagcaaccggccctacaggggagctctcgccttagtcccggtactgattcgagctccaacctagggggggtaaaactcgaaggcaagaagtcccctcttagcagtatactgttctctgccttagattcagataccaggatcaccgccctgctgagacgacaggcagatattgagagcagggcccgaaggttgcagaaaagattgcaagtcgtacaggccaaacaggtagagagacatattcagcaccagcttggggggtttcttgagaagactttgagcaagctgcctaatctggagtctctgcgaccaagatcccagctgatgttgacccgcaaggccgaggctgccctgcgcaaagcagcctctgagactaccacttccgagggactgagtaactttctgaagtccaacagtatcagcgaggagttagagcgatttaccgcatcaggtattgctaacctgaggtgttccgaacaagcattcgacagtgacgtgacggacagttcaagcggaggcgaaagcgatattgaggaggaggaactaaccagggctgatcccgaacagagacacgtgcctctacgtagacgaagtgaatggaaatgggctgctgatagggccgccatcgtgtcaagatggaactggctgcaagcccatgtcagtgacctggaatacagaattcggcagcagactgatatttacaagcagattcgggccaataaaggactcattgttctgggggaggtgccacctccggagcacactaccgatttgttcttgcctctaagtagtgaggtgaagacagaccatggaacagacaaattgatcgagtcggtttcacagcctttagaaaaccatggggccaggataatcgggcacatttcagaaagtctatcaacgaagagctgtggcgctctgagaccggtgaatggagtaataaatacattgcagcctgttttggctgaccacattccaggcgatagcagcgatgcagaggagcagctccataaaaaacaacgtttaaacctggtgagctccagctccgacgggacatgcgtagcagcccgcacccgtcctgtcttatcatgtaaaaagcgtcgtctggtccgtcctaactctatagttcccctctccaagaaggtgcaccgcaatagcacaatcagaccgggctgtgatgtaaacccctcatgtgcactatgcggtagtgggagtataaacacaatgccccccgagatacactatgaggcacctctgcttgagcgcctgagtcaactggactcttgcgtgcaccctgtcctcgccttcccagatgacgtccccacctccctccactttcagtctatgctgaagtctcagtggcagaacaaacctttcgacaaaataaaaccacccaagaaactcagtctgaagcacagggcgccaatgcccggaagtctcccagattcagccagaaaggatagacataagctcgtttcctcctttctgaccacagctaaattgtctcaccatcagaccaggccggataggacacaccgtcaacatctagacgacgtgggagctgtgccaatggtcgagagagtaacggcgccgaaagccgaaagattgttaaacccccccccacctgtccacgatccaaaccacagcaagatgaggctaagggatcattccagcgagcggtccgaggtgctgaaacaccacacagacatgtcctcaagctcctatctggcggcaacccaccatccaccccattcccccttagtgcggcagctgtctaccagtagtgattccccagctcccgcatcatctagctctcaggttactgcatctacttcacagcagcccgtgcggcgccggcggggcgaaagctcattcgatattaataacattgtcatccccatgagtgtggcagccactactcgggtcgaaaagctacagtataaagaaatacttacgcctagctggagggaggtggatctgcagagcctgaaggggtctccagatgaggagaatgaagaaatagaggatctgagcgacgctgcctttgccgctctgcacgccaagtgcgaagagatggagagggccaggtggttgtggacaacatcagtgccccctcagcggcggggctcacgctcctataggagtagcgatgggagaacaactccacaattgggaagtgctaatccatcgacgccgcagcccgcatcccctgatgtcagtagctcccattctttgtccgagtattcacatgggcagtccccgcgttctcccatatcacctgagctgcactcagccccactgactccagtggcgcgcgatacacctcgccatctggcctccgaggacacccgctgtagtacacccgaactaggtctggatgagcaaagcgtccagccctgggaaaggcggactttccctttggcacatagcccccaggcggagtgcgaggaccagctggatgctcaggagcgggccgcacgatgtacacggcgcacatctggctcaaagacgggccgtgagacagaggccgccccgacctccccgccaattgtgccactcaaatcacgccacctggtcgcagctgccaccgcacagagaccgactcaccgttag

SEQ ID NO: 294380 - DNA, 3318 bp, Artificial Sequence
  derived and/or modified sequence
atggccgctatggccccagccctgactgatgccgctgcagaagctcaccacatccgctttaaactcgcacctccttccagtacactctctccgggttctgcagagaataacggcaacgcaaatattctcattgccgctaatggtactaaaaggaaagcgattgccgctgaagacccttccttggattttaggaataatcccactaaagaagaccttgggaagttacagccgctggtggcgtcttacttgtgctctgatgtgacctctgtcccctctaaagagagcctcaagctgcagggcgtattcagcaagcagactgttctgaagagtcatcctctgttaagccagtcttatgaactcagagctgaacttctcggaagacagcctgtgctagagtttagtctcgaaaatctgaggactatgaatacgtccgggcaaaccgcgctcccgcaagccccagtgaacgggctggccaagaagttgacaaaatcttcaacccattctgaccacgataatagcaccagcctgaatgggggaaagagggctctcacctcctctgccctgcatggtggagagatgggcggtagtgaatcaggtgatctcaagggcggtatgacaaactgtaccctgcctcaccgaagtcttgacgttgagcatacgacactctattctaataacagtacagcgaataaatcaagtgttaactcaatggagcagcccgctctccagggatcatctagactttctccaggtacagactcctcgtccaaccttgggggagtaaaactcgagggtaaaaaatcccccctgagctcaatcctttttagtgccctggactccgacacccgaataaccgcactcctgcgtcggcaggctgatatagagtccagggctcgtagacttcagaagcgcctgcaggtggtgcaagccaaacaggtcgaacgccacattcagcaccagctaggcggatttctggaaaagacactctctaaacttcctaatctggagtccctccggccacgtagtcagctcatgctgacaaggaaggctgaagcggcactgaggaaagctgcctccgagacaactaccagcgaaggactaagcaatttcctcaaatctaattcaatcagtgaggagctcgaacgcttcactgcatccgggattgccaacctgaggtgctccgaacaagcatttgactcagacgttacagatagttcaagtggaggtgaaagtgatattgaggaagaagaactaacccgagccgatccagaacagagacacgtccctctccgccgacgaagtgagtggaagtgggccgctgaccgagctgcgatcgtgtctagatggaactggcttcaggctcacgtgagtgatctggaataccgtattcgccagcagaccgatatttacaagcaaatcagagccaacaaaggcctcattgtactgggggaagtccctcctccagagcacaccactgacctgttcctgcccttgtcctctgaagtcaagaccgatcacggcacggacaagctgattgaaagcgtcagccaacccttggaaaaccacggagctcgaattataggacacatcagcgaaagcctgagcaccaagtcctgtggtgccctgcgacccgttaacggggtgattaatacactgcagcccgttctcgcggaccatatcccaggcgatagcagcgatgccgaggaacagctgcacaagaagcaaagactgaatttggtctcaagttcatcagacggcacttgcgtcgctgctcgcacaaggccagtcttgagttgcaagaagaggcggctggttcgccctaacagcattgtgccactctcaaaaaaagtgcaccggaatagcacgattagaccaggctgcgatgtgaatcccagttgcgctctttgtgggagcgggtctatcaacaccatgcctcctgagatccactatgaggccccactgctagagcgcctgagccagctggactcctgtgtgcaccctgtgctggcattccccgatgatgtgccaacaagtctccactttcaaagtatgcttaagagccagtggcagaacaagcccttcgataagataaaaccccctaaaaagctttcgctgaaacaccgtgcgccaatgcctggttctttacccgattctgctcggaaggatcgacacaaattggtttcatccttcttgacgaccgccaagttgagccaccaccaaactagaccggatagaacacacaggcagcatctcgacgacgtgggagcagttccaatggtggagcgagttacagcccctaaagcagaaaggctgcttaaccctccacctccggtgcacgaccctaaccacagtaagatgcgactgagagatcactcaagtgaacggtcagaggtgctcaagcaccacacagatatgtcttctagctcatatcttgccgctactcaccaccctccacactctccccttgttaggcagcttagcacatcaagtgattccccggctcccgcatcgtcctcatcacaggttacagcgtctacctcgcagcagccggtgcgcagacggaggggcgagtccagtttcgacataaacaatattgtgattcccatgtctgtggcagcaacaacccgcgtggagaaattacaatataaagaaatactcacgccgtcgtggcgtgaggtggatctccagtccctcaaggggtcccctgatgaagagaacgaggaaatcgaagacctgagtgacgccgcttttgccgcacttcatgctaagtgtgaggagatggagcgtgccagatggctgtggaccaccagcgtacctccccagagaaggggctctaggtcttatcgatcatcagacgggaggacaactccccaattaggctctgccaaccccagtacccctcagccagccagccctgatgtgtccagctctcactccttgtcagaatacagtcatgggcagtcacctagaagcccgatttcccccgaactgcattctgctcctctgactcctgtcgcacgcgacactcctcgccacctggccagtgaggatactcggtgcagcacacccgaattgggcctggatgagcaaagtgttcagccatgggagaggcgaacttttccactggcccatagccctcaagctgaatgcgaagatcaactggacgcccaggaacgcgctgcccgttgtacacgcagaaccagcgggtctaaaacaggtagagagactgaagccgcaccgacgtctcccccaatcgttcccctgaaaagccgccacttagtcgcagcggctacagcacagagaccaacacacaggtag

SEQ ID NO: 294381 - DNA, 3318 bp, Artificial Sequence
  derived and/or modified sequence
atggctgctatggcgcctgctctgactgatgctgccgcagaggctcaccacatacggtttaagttggcccctccctctagtactttgtcccccggatccgcagaaaataacggtaatgccaacatcctaattgccgctaacggtacgaagcgaaaggcaattgcagctgaggatccctcgttggatttccgcaacaacccaactaaggaggacctcggtaaactccagcccctggtggcctcgtatttgtgctcagacgtcacaagtgtacccagcaaagagtctttgaagcttcagggggtgttcagcaagcagactgtcctcaagtcccaccccctcctctcccagtcttacgagctacgtgcagagttactcggcagacagccagtgttagaatttagcctcgagaatcttagaacaatgaacaccagcgggcagacggcactgccccaagcccctgtgaacgggctcgcgaagaaacttacgaaatccagtacccattccgaccacgataactctacctccctcaatggtggcaaaagagcgttaacatcttccgccctccacggtggcgagatgggcggtagcgagagcggcgatttgaagggagggatgacaaactgtaccctcccacaccgtagtctggatgtggagcacactacattgtattcgaataacagtacagccaacaaatccagcgtgaatagcatggagcagcctgctttgcaaggctcatcacggttgtctcccggaactgactcgtcctctaatctgggaggcgtgaaactggagggtaaaaagtcccccctgtcttcgatcctgttctccgccctggatagtgatactcgcatcacggctttactgagaagacaggcagacattgagtccagggcacggagactccagaaaaggctacaggttgtgcaggcgaagcaggtagagcgccatatccagcaccagttaggaggcttcctggagaaaacgctgtcaaagctgccaaatctagagtctctgcgccctaggtcccagctaatgctcacaagaaaggcagaggcggcacttagaaaggctgcttccgagaccacaacttctgaggggctgtcaaacttcctgaaatccaactcaatctcagaggagctggaacgctttacagcttccggaatagccaacctgcggtgttcagagcaggctttcgactccgacgtgacagacagtagcagcgggggagagtccgatattgaggaagaggagctgaccagggccgatccggaacagcgacacgtgccgcttagaagaaggtctgagtggaaatgggccgcagacagagctgccatcgtgtcaagatggaattggctgcaggctcatgtctccgatctggagtacagaatcagacagcagactgatatctacaagcaaatcagagcaaataaaggcctgatagttctcggggaagtgccacctccggagcatacaaccgatctattccttccgctgtcttcagaagtaaagactgatcacggaaccgacaaattgatcgagagcgtgagccagcctctcgaaaaccacggtgcgaggattatcgggcacatttccgagagccttagcaccaaatcttgcggagcccttagaccagtaaatggtgtaattaatactctacagccggttttggcagatcacattcccggtgacagctccgacgctgaagaacagttgcataagaagcagcggttgaatctggttagttcgtcatctgacgggacctgcgtagccgctcggacaagacctgttttgtcatgcaagaaacgccgtctagtcaggcctaactctattgtgccgttatccaagaaggtgcatcgaaactcaacaataagacccggatgtgacgttaacccgagctgcgcactgtgcggttctggctcgataaatactatgcctccagaaatacattacgaggccccactgctcgaacgcctttcccagctggatagctgcgtgcatcccgtgctggcttttcctgacgacgtccctaccagtctacatttccagagcatgcttaagagtcagtggcagaataagccgtttgataaaattaagcctccaaaaaagctgtcattgaagcacagggcccctatgcctggaagcctgcctgattcagcccgaaaggacagacacaagctggtgagcagtttcctgaccacggcaaaactgagccatcatcagacaaggcccgaccggactcacaggcagcacttagatgacgtcggcgctgttccgatggtcgagagggttacagcccctaaggcagaaagactgctcaatcccccacccccagtccatgaccccaaccattccaagatgcggctgagagatcactcaagcgaaaggtctgaggtcctgaagcaccatacagacatgtcatctagctcctacctcgctgccacacatcatccccctcacagtccactggtgcgccagctctcgaccagtagcgactctccagccccagcatcatctagcagccaggtgacggcaagcactagtcagcagccagttcgccgacgaagaggcgagagcagcttcgacatcaacaacattgtcatccctatgagcgttgccgcaaccacccgcgtcgaaaagctgcaatacaaagaaattctgacacctagctggcgggaggttgatttacaatcattgaagggatcccccgacgaggaaaacgaggaaattgaagacctcagtgacgcggcttttgctgccttacatgcgaagtgcgaggagatggaacgggcaaggtggctgtggacaacttctgttccccctcagaggagaggaagcagaagctacagatcttccgacggtcgtactaccccccagctggggagcgccaacccatcaaccccacaaccagcttccccggacgtcagctcctctcattccttgtccgaatattcccatggacagtctccgcgtagcccgatcagccctgaattacactcagcacccctgactcctgtggcgagggatactccacgtcatcttgcctcagaagacacgcgctgcagtacgccagaattggggcttgatgaacagagcgtgcaaccttgggagcgcaggaccttccccctcgcccatagccctcaggcagaatgtgaagaccaactggacgcgcaggagcgggctgcacgctgtacgaggcggacctcgggtagcaagaccggcagggaaacagaggctgcacccacctccccccctatcgtgccacttaagtcaagacacctcgtcgccgcagcaaccgctcagcgcccaacccatagatag

SEQ ID NO: 294382 - DNA, 3318 bp, Artificial Sequence
  derived and/or modified sequence
atggccgcaatggccccagcattaactgatgctgcagccgaggcgcaccacatcagattcaaactggccccaccctcttcaactctctcccccggtagtgccgaaaataatggcaacgccaacattctcattgccgcaaatggcactaaaaggaaggcgatcgcagccgaagacccttcattagacttccgtaataatcctaccaaggaggaccttggcaaacttcagccattggtggccagttacctgtgcagtgatgtgacgtcagttccctccaaagagtcactcaagttgcagggtgtcttctctaagcaaaccgtgcttaagagccaccctttgttatcacaaagctacgagctgcgcgctgaacttctgggcagacaacctgtgttagagtttagcctggagaatctgcggactatgaatacctcgggccagaccgcccttccccaggctccggtgaacggcctggccaagaaactgactaaatctagtactcacagtgaccatgacaatagcacaagtctaaatgggggaaaaagggccctgacatcatccgcgctgcatggtggggagatggggggaagcgagtccggagaccttaaaggagggatgactaattgcacgctgcctcaccgaagtctggacgtcgaacacacaactctgtactccaacaactctactgcaaacaagagttccgtgaatagtatggagcagcccgctctgcaggggagctcaaggctgagtccagggaccgatagtagctcaaacctgggtggcgtgaagttagagggcaaaaaaagccccctctcctctatcctcttctctgcgctcgacagcgacacacgaatcacagctttacttaggcgtcaggcggacatagaatccagggcccgacgtcttcaaaaacggcttcaggtagttcaggcaaagcaggttgaaagacacatacagcaccagctcggtggatttttggagaagaccctctccaagcttcctaatctggagagcctacgcccaaggagtcagttgatgctgacccggaaagcagaggccgcactgcgcaaggctgcaagcgagactactactagcgagggcttgtcaaactttttgaagagtaattctatctccgaagagctggaacgttttacagcctccggcatcgcaaacctcagatgttctgaacaagcatttgatagtgatgtgactgatagctcaagcgggggagagagcgacattgaagaggaagaacttaccagggcggaccccgagcagaggcatgtacctctgcgccgacgtagcgagtggaagtgggccgcagaccgggctgcaattgtatcccggtggaactggctgcaagcccacgtatccgatctcgagtatcgtatccggcagcaaaccgacatttacaaacagatccgggcaaacaaaggtttgattgtgttgggcgaggtgcccccacctgaacatacaaccgacctctttttacccctgagtagtgaggtaaagacagatcacggtaccgacaaactgatcgagagcgtctctcagcccctcgaaaatcacggcgcacggattattgggcacatttctgagtctctgagcacgaaaagttgtggggctctgcgtcccgtaaatggcgtgatcaataccctccagcctgtcctcgcggatcatatccctggagattcatcagatgccgaggaacagctccacaagaagcagcggctcaatctcgtgagctcatcgagcgacggaacctgtgtggcagcccgaacgcggcctgtgctcagttgcaagaaaagaagactagtgcgacccaactccattgtacccctgagcaaaaaagtccacaggaatagcaccatcagacctgggtgcgatgttaacccttcatgcgccctatgcggatctggttccatcaacaccatgccacccgagatacattacgaggccccactccttgagagactgtcacaacttgactcttgcgtacatccggtacttgcctttcccgatgacgtgcctacaagccttcactttcagagcatgctcaagtctcaatggcagaataagccattcgataagataaaaccccctaaaaaactctccctgaaacaccgtgctccaatgcccggatccctgcctgattccgcgagaaaggaccgccacaagctggtgtcatcctttctcaccactgccaaactgagtcaccaccagacaagaccagataggacccataggcaacatctcgacgacgttggggctgtccccatggttgagcgggtgaccgcccctaaagcagagcggttgttaaacccacctccacccgtgcacgatcccaaccactctaagatgcgtctgagggatcactcctctgaaagatccgaggtgcttaaacatcacactgacatgagctctagcagctatctcgccgcaacgcaccaccctcctcattcgcccctggttcggcaattgagcaccagcagcgattctccggcaccagcctcctcctcctcacaggtaacggcctctaccagtcagcagccagtccggcgtcggcgaggtgagagcagcttcgatattaataatatagtcattccaatgtctgtagccgctacaacccgggtcgagaagctgcaatataaggagatcctcacacctagttggagagaagttgacctccaaagtctgaaaggatctcccgacgaagagaacgaggagattgaagatctcagtgacgcagcttttgccgctctgcatgctaagtgcgaagagatggagagggcccgttggctctggactacatctgttccgcctcagaggcggggatctcgttcctacaggtcgtctgatgggaggactactccccagctcggatccgccaacccaagcacgccacagcccgcttcacctgatgtctcaagctcccacagcctgtcggagtatagtcatggacagagcccccgatccccgatatcccctgaattgcacagtgctcccctcactccagttgctcgggatacccccagacatttggcctcagaagacacccgctgctcaacacctgaactgggtcttgacgaacaatccgtgcagccatgggaaagacgcactttccccttagctcattcccctcaggctgagtgtgaagatcaattagacgcacaggagagggcagcaagatgtacccggagaacttccggatcaaaaacagggcgtgaaaccgaagcagctcctacaagtccaccaatcgtacccctgaagtcacggcacctggtcgcagccgcaacagcgcaacgcccaacacatcgatag

SEQ ID NO: 294383 - DNA, 3318 bp, Artificial Sequence
  derived and/or modified sequence
atggccgctatggcacccgctttgacagacgctgcggctgaagcacaccatatccggttcaagctagcccctcctagctcaaccctttcaccaggaagcgccgagaacaacggcaatgctaatattctgattgcagccaatggaactaagagaaaagcaattgccgcagaggatcccagcctggacttcagaaataacccaactaaagaggacctgggcaaactacaacctcttgtcgcttcatacttgtgctccgacgtcacaagtgtcccgtccaaagaatccctgaagctgcaaggcgttttcagtaagcaaaccgttttgaaatcccacccattgctcagtcagagttatgaacttcgagctgagctcctaggtcggcagccagtcctggaattcagtctcgagaatcttaggaccatgaatacctcagggcagactgcactcccccaggcaccagtcaatggactggcaaaaaagttgaccaaatcctccactcacagcgatcacgataattcgacaagtctgaacggcggaaagcgcgctctgacaagcagcgccctgcacggcggtgagatgggaggatcagaaagcggcgatctcaaggggggaatgaccaactgtacccttcctcatcgaagccttgacgtggagcataccaccctgtatagtaacaactcaacagccaataagagctctgtcaactctatggagcaacccgctctgcagggcagcagtaggctgtctccgggaaccgatagtagttcaaatttagggggagttaaattggaggggaagaaatcgccgctgtctagcatcctattctctgctttagacagcgatactagaatcactgcgcttctcaggaggcaggctgatatcgaatcccgcgctcgtagactccaaaagcggctgcaagtcgttcaggctaagcaagttgagcggcacatccagcaccaattaggtggattcctagagaaaactttgtccaaacttcccaacctggagtccctccgccctcgctcccagctcatgctgacccgcaaggcagaggccgcactcagaaaggctgcgagcgagaccactacttccgagggactgtctaactttctcaaatccaactccattagcgaggaactggagagattcacggcctcaggaatcgccaatctgagatgtagcgagcaagcttttgactcggatgtgactgactctagctcgggcggtgagtcagacattgaagaagaggaactgactcgcgctgatcccgaacagaggcacgtgccactccgtaggcggtcagagtggaagtgggccgcagaccgggctgccattgtgtctcgatggaactggctccaggcccatgtgagtgatcttgaataccgcattcgtcaacagaccgatatctacaaacagatcagggctaataaaggcctgatcgtcctcggggaggtaccacctccagaacacactaccgacctatttcttcccctctcaagcgaagtgaagaccgaccatggaacagacaaactgattgaaagtgtgagccagccactggagaaccatggagcacgcattataggccacatttcagagtcacttagtactaagagttgcggcgctttgcgacccgttaacggggttataaacaccttacagccggttctggcggatcacattcctggggattcttctgacgccgaggaacagctgcataagaaacaacggctgaatctcgtatcatcttcaagtgacggaacatgcgtggccgctcggacccgccctgttctgtcatgcaagaagagacgcctggtgcgcccaaacagcatcgtcccactgtcgaaaaaggtacacagaaacagcactatccgcccaggctgtgacgtgaacccctcatgcgctctctgtgggtctgggagcataaacacgatgcctcctgaaatccactatgaagcaccgttgctggaaagattgagccagctagattcatgcgtgcatcccgtcttagcgtttcctgacgacgttcctacttccctgcactttcaatcaatgcttaaaagccaatggcaaaacaaaccattcgataagatcaagcctcccaaaaaactgtcgctgaaacatagggcccctatgcccggatccctccctgattcagcaaggaaggaccggcacaagcttgtgagctcttttctcaccacagccaagctgtcccatcatcagaccagacccgaccgcacacaccgtcaacaccttgatgacgttggagccgtgccaatggtagagagagtgaccgcaccgaaagctgaacgtctgttaaacccccctcctccagtacacgaccctaaccactctaagatgaggctccgcgatcatagttcagaaaggtctgaggtcctcaagcaccatacagatatgtccagttcatcctaccttgcggctactcaccacccaccacattcccctctcgtaaggcagcttagcacctccagtgactcgcctgctcccgcttcctcaagctctcaggtgacagccagtactagtcagcaacctgtaaggaggaggaggggggagtcatcattcgatataaataacatcgtcatacctatgagtgtagctgccacaacccgggtcgagaaactgcagtacaaagaaatcttaacaccatcctggagagaagtggatctccagtcattaaagggttcacccgatgaggagaatgaagagatcgaggacctcagtgatgctgcattcgcagccctacacgccaagtgcgaggaaatggaacgtgctaggtggctttggaccacatccgtcccacctcagcgcagggggtcaagatcctaccgctcatccgacggcaggacaacccctcagttagggagcgccaaccctagtactccgcagccggcaagtccggacgtgtcctcgtcgcattctctgagtgagtatagccacggccagtcaccacggtcaccaatttccccggagttacactcagctcctttaacaccagtcgcgcgagatacaccgagacatctagcatccgaggacacccgatgttccaccccagaactaggtcttgatgagcaaagtgtccagccgtgggagaggaggacctttccactcgcacactcccctcaagccgagtgcgaggatcaattagacgcacaggaaagggccgctcgctgcacacggaggacctccgggtcgaagacagggcgagagacggaggctgccccaacgagcccccctatagtcccccttaaaagccgccacttggttgccgctgcgactgcacagcgccctacccataggtag

SEQ ID NO: 294384 - DNA, 3318 bp, Artificial Sequence
  derived and/or modified sequence
atggccgccatggcccccgccctgaccgacgccgccgccgaggcccaccacatcagattcaagctggccccccccagcagcaccctgagccccggcagcgccgagaacaacggcaacgccaacatcctgatcgccgccaacggcaccaagagaaaggccatcgccgccgaggaccccagcctggacttcagaaacaaccccaccaaggaggacctgggcaagctgcagcccctggtggccagctacctgtgcagcgacgtgaccagcgtgcccagcaaggagagcctgaagctgcagggcgtgttcagcaagcagaccgtgctgaagagccaccccctgctgagccagagctacgagctgagagccgagctgctgggcagacagcccgtgctggagttcagcctggagaacctgagaaccatgaacaccagcggccagaccgccctgccccaggcccccgtgaacggcctggccaagaagctgaccaagagcagcacccacagcgaccacgacaacagcaccagcctgaacggcggcaagagagccctgaccagcagcgccctgcacggcggcgagatgggcggcagcgagagcggcgacctgaagggcggcatgaccaactgcaccctgccccacagaagcctggacgtggagcacaccaccctgtacagcaacaacagcaccgccaacaagagcagcgtgaacagcatggagcagcccgccctgcagggcagcagcagactgagccccggcaccgacagcagcagcaacctgggcggcgtgaagctggagggcaagaagagccccctgagcagcatcctgttcagcgccctggacagcgacaccagaatcaccgccctgctgagaagacaggccgacatcgagagcagagccagaagactgcagaagagactgcaggtggtgcaggccaagcaggtggagagacacatccagcaccagctgggcggcttcctggagaagaccctgagcaagctgcccaacctggagagcctgagacccagaagccagctgatgctgaccagaaaggccgaggccgccctgagaaaggccgccagcgagaccaccaccagcgagggcctgagcaacttcctgaagagcaacagcatcagcgaggagctggagagattcaccgccagcggcatcgccaacctgagatgcagcgagcaggccttcgacagcgacgtgaccgacagcagcagcggcggcgagagcgacatcgaggaggaggagctgaccagagccgaccccgagcagagacacgtgcccctgagaagaagaagcgagtggaagtgggccgccgacagagccgccatcgtgagcagatggaactggctgcaggcccacgtgagcgacctggagtacagaatcagacagcagaccgacatctacaagcagatcagagccaacaagggcctgatcgtgctgggcgaggtgcccccccccgagcacaccaccgacctgttcctgcccctgagcagcgaggtgaagaccgaccacggcaccgacaagctgatcgagagcgtgagccagcccctggagaaccacggcgccagaatcatcggccacatcagcgagagcctgagcaccaagagctgcggcgccctgagacccgtgaacggcgtgatcaacaccctgcagcccgtgctggccgaccacatccccggcgacagcagcgacgccgaggagcagctgcacaagaagcagagactgaacctggtgagcagcagcagcgacggcacctgcgtggccgccagaaccagacccgtgctgagctgcaagaagagaagactggtgagacccaacagcatcgtgcccctgagcaagaaggtgcacagaaacagcaccatcagacccggctgcgacgtgaaccccagctgcgccctgtgcggcagcggcagcatcaacaccatgccccccgagatccactacgaggcccccctgctggagagactgagccagctggacagctgcgtgcaccccgtgctggccttccccgacgacgtgcccaccagcctgcacttccagagcatgctgaagagccagtggcagaacaagcccttcgacaagatcaagccccccaagaagctgagcctgaagcacagagcccccatgcccggcagcctgcccgacagcgccagaaaggacagacacaagctggtgagcagcttcctgaccaccgccaagctgagccaccaccagaccagacccgacagaacccacagacagcacctggacgacgtgggcgccgtgcccatggtggagagagtgaccgcccccaaggccgagagactgctgaacccccccccccccgtgcacgaccccaaccacagcaagatgagactgagagaccacagcagcgagagaagcgaggtgctgaagcaccacaccgacatgagcagcagcagctacctggccgccacccaccaccccccccacagccccctggtgagacagctgagcaccagcagcgacagccccgcccccgccagcagcagcagccaggtgaccgccagcaccagccagcagcccgtgagaagaagaagaggcgagagcagcttcgacatcaacaacatcgtgatccccatgagcgtggccgccaccaccagagtggagaagctgcagtacaaggagatcctgacccccagctggagagaggtggacctgcagagcctgaagggcagccccgacgaggagaacgaggagatcgaggacctgagcgacgccgccttcgccgccctgcacgccaagtgcgaggagatggagagagccagatggctgtggaccaccagcgtgcccccccagagaagaggcagcagaagctacagaagcagcgacggcagaaccaccccccagctgggcagcgccaaccccagcaccccccagcccgccagccccgacgtgagcagcagccacagcctgagcgagtacagccacggccagagccccagaagccccatcagccccgagctgcacagcgcccccctgacccccgtggccagagacacccccagacacctggccagcgaggacaccagatgcagcacccccgagctgggcctggacgagcagagcgtgcagccctgggagagaagaaccttccccctggcccacagcccccaggccgagtgcgaggaccagctggacgcccaggagagagccgccagatgcaccagaagaaccagcggcagcaagaccggcagagagaccgaggccgcccccaccagcccccccatcgtgcccctgaagagcagacacctggtggccgccgccaccgcccagagacccacccacagatag

SEQ ID NO: 294385 - protein, 445 aa, Artificial Sequence
  derived and/or modified sequence
MTMFENVTRALARQLNPRGDLTPLDSLIDFKRFHPFCLVLRKRKSTLFWGARYVRTDYTLLDVLEPGSSPSDPTDTGNFGFKNMLDTRVEGDVDVPKTVKVKGTAGLSQNSTLEVQTLSVAPKALETVQERKLAADHPFLKEMQDQGENLYVVMEVVETVQEVTLERAGKAEACFSLPFFAPLGLQGSINHKEAVTIPKGCVLAFRVRQLMVKGKDEWDIPHICNDNMQTFPPGEKSGEEKVILIQASDVGDVHEGFRTLKEEVQRETQQVEKLSRVGQSSLLSSLSKLLGKKKELQDLELALEGALDKGHEVTLEALPKDVLLSKEAVGAILYFVGALTELSEAQQKLLVKSMEKKILPVQLKLVESTMEQNFLLDKEGVFPLQPELLSSLGDEELTLTEALVGLSGLEVQRSGPQYMWDPDTLPRLCALYAGLSLLQQLTKAS

SEQ ID NO: 294386 - DNA, 1338 bp, Artificial Sequence
  derived and/or modified sequence
atgacaatgttcgaaaacgtgactagagccttggcccgacagctgaacccgcgtggagacctgactccccttgattcactgattgatttcaaacggttccaccctttttgtctggtgttgagaaaacggaagtctacccttttttggggagctaggtatgttagaacagactacactctcctcgacgtgctggagcctgggagctcccctagtgacccgacagataccggcaacttcgggttcaagaacatgttggacactcgcgtggaaggcgacgtcgatgtccccaagacggtgaaggtcaaaggcactgccgggctgagccagaacagtaccttggaggtccaaaccctgtccgtcgcaccgaaggcgttggagaccgtgcaggaacgcaagcttgctgccgaccacccatttctcaaagaaatgcaggatcagggagagaacttgtacgttgtgatggaggtggttgagaccgtccaagaggtgacgctggagcgggccggcaaggcagaagcatgcttttctttgccattttttgctcccttaggcctgcagggtagcatcaaccacaaggaagcagtgacaatacctaaaggatgcgtgctggctttccgtgtgcgccagctgatggtaaaggggaaagatgaatgggacatccctcatatctgcaacgacaacatgcagacttttccacctggcgaaaagagcggagaagagaaagtgatcctgatccaggcatctgacgttggcgacgtgcacgagggctttcggacactaaaggaggaggtgcagagagagacgcagcaggtcgaaaaactgagccgtgttggccaatcctctctccttagtagtctctcaaagctactgggtaagaagaaggaactgcaggacctggagctggccctcgagggagctctcgacaaaggtcacgaggttacattggaggctctcccaaaagatgtgctgctgagcaaagaggctgtaggcgccattctgtacttcgtaggcgccctgactgagctgtccgaagctcaacagaagctcctggtgaagtctatggaaaagaaaatactgcccgtgcagttgaagctggtggaatcaactatggagcagaactttttacttgacaaagagggggtgttcccattgcagccagaattgctcagcagtttgggtgacgaggaactcaccctgactgaagcactggtggggctgagcggccttgaggtccagcgatcaggaccacaatacatgtgggacccagataccttgcccagattatgcgcgctatacgccggactgagtctcctgcagcaattaactaaagcttcttag

SEQ ID NO: 294387 - DNA, 2164 bp, Artificial Sequence
  derived and/or modified sequence
ataaagcagcctgtcctggcaagggatggtcatcctctcaacctacagacccagtgagccctaggccctcaccccagacccagctgctggataggacccagccccgctcccagagacaatgaccatgtttgaaaatgtcacccgggccctggccagacagctaaaccctcgaggggacctgacaccacttgacagcctcatcgacttcaagcgcttccatcccttctgcctggtgctgaggaagaggaagagcacgctcttctggggggcccggtacgtccgcaccgactacacgctgctggatgtgcttgagcccggcagctcaccttcagacccaacagacactgggaattttggctttaagaatatgctggacacccgagtggagggagatgtggatgtaccaaagacggtgaaggtgaagggaacggcagggctctcgcagaacagcactctggaggtccagacactcagtgtggctcccaaggccctggagaccgtgcaggagaggaagctggcagcagaccacccattcctgaaggagatgcaagatcaaggggagaacctgtatgtggtgatggaggtggtggagacggtgcaggaggtcacactggagcgagccggcaaggcagaggcctgcttctccctccccttcttcgccccattggggctacagggatccataaatcacaaggaggctgtaaccatccccaagggctgcgtcctggcctttcgagtgagacagctgatggtcaaaggcaaagatgagtgggatattccacatatctgcaatgataacatgcaaaccttccctcctggagaaaagtcaggagaggagaaggtcatccttatccaggcatctgatgttggggacgtacacgaaggcttcaggacactaaaagaagaagttcagagagagacccaacaagtggagaagctgagccgagtagggcaaagctccctgctcagctccctcagcaaacttctagggaagaaaaaggagctacaagaccttgagctcgcacttgaaggggctctagacaagggacatgaagtgaccctggaggcactcccaaaagatgtcctgctatcaaaggaggccgtgggcgccatcctctatttcgttggagccctaacagagctaagtgaagcccaacagaagctgctggtgaaatccatggagaaaaagatcctacccgtgcagctaaagctggtggagagcacgatggaacagaacttcctgctggataaagagggtgttttccccctgcaacctgagctgctctcctcccttggggacgaggagctgaccctcacggaggctctagtcgggctgagtggcctggaagtgcagagatcgggcccccaatatatgtgggacccagacaccctccctcgcctctgtgctctttatgcaggcctctctctccttcagcagcttaccaaggcctcctaatttgccttttacgtctgcttcatgactccctaatgccttcccaacctcgtggtgctgtgtccttaccacctaagggcatttcagagccatcagctgaagacatctgaaatctcagctggtcacccatgataaccaacttccacctgcccaaccatatatcaccccctacccctccagctccgcaacccactaagcccatctgctgatgcttaaattttctttacttttcttttctttttttttttttttttgagatggaggctcactctgtcacccaggctggagtgcagtggcttgatcttggctcactgcaacctccgcctcccaggttcaagcaattctcctgcctcagcctctcgagcagctggaattacaggcacgtgccacgacacccagctaatttttgtatttttagtagagacggggtttcaccatgttgcccaggttggtctcgaactcctggcctcaagtgatctgcccgcctcggcctcccaaagtgctgggattacaggcgtgagccaccgtgcccggcctgtgcttaaatattctaggagtagaagcactcagacttttaaaactatgagccgtttcagcaaaactgagaaaaaaagaagattaattaatttcctatcctaatccctcctacttatacttccccaaaaaacaagctttactggaattaatggaaaatattatgtcaatcttagg

SEQ ID NO: 294388 - DNA, 1338 bp, Artificial Sequence
  derived and/or modified sequence
atgaccatgtttgaaaatgtgacccgggccctggcccggcagctgaaccccaggggggacctgacccccctggacagcctgattgacttcaagcgcttccaccccttctgcctggtgctgaggaagaggaagagcaccctcttctggggcgcccgctacgtgaggacagactacaccctgctggatgtgctggagcccggcagcagccccagcgaccccacagacaccggcaactttggcttcaagaacatgctggacaccagggtggagggagatgtggatgtgcccaagacagtgaaggtgaagggcacagctggcctgagccagaacagcaccctggaggtgcagaccctgtctgtggcccccaaggccctggagaccgtgcaggagaggaagctggccgctgaccaccccttcctgaaggagatgcaggaccagggcgagaacctgtatgtggtgatggaggtggtggagaccgtgcaggaggtgaccctggagcgggccggcaaggccgaggcctgcttcagcctgcccttctttgcccccctgggcctgcagggcagcatcaaccacaaggaggccgtgaccatccccaagggctgtgtgctggccttccgggtgcggcagctgatggtgaagggcaaggatgagtgggacatcccccacatctgcaatgacaacatgcagaccttccccccaggagagaagtctggagaggagaaggtgatcctgatccaggccagtgatgtgggagatgtgcatgagggcttccgcaccctgaaggaggaggtgcagcgggagacccagcaggtggagaagctgagccgggtgggccagagcagcctgctgagcagcctgagcaagctgctgggcaagaagaaggagctgcaggacctggagctggccctggagggcgccctggacaagggccacgaggtgaccctggaggccctgcccaaggatgtgctgctgagcaaggaggccgtgggcgccatcctgtactttgtgggcgccctgacagagctgtctgaggcccagcagaagctgctggtgaagtccatggagaagaagatcctgcctgtgcagctgaagctggtggagagcaccatggagcagaacttcctgctggacaaggagggcgtcttccccctgcagcctgagctgctgagcagcctgggagatgaggagctgaccctgacagaggccctggtgggcctgagcggcctggaggtgcagaggagcggcccccagtacatgtgggaccctgacaccctgccccggctgtgtgccctgtatgccggcctgagcctgctgcagcagctgaccaaggccagctag

SEQ ID NO: 294389 - DNA, 1338 bp, Artificial Sequence
  derived and/or modified sequence
atgaccatgttcgagaacgtgacccgggccctggcccggcagctgaacccgagaggagacctcacccctctggattcactgatcgatttcaagagattccacccattttgtcttgttctccgcaagaggaagtcaaccttattctggggggccaggtatgtgaggacagattacacattgctcgacgtgttggagcccgggagttctccctcagatccaaccgataccggaaatttcggatttaagaacatgctagatactagagtggagggggatgtggatgtgccaaaaaccgtcaaagtcaaaggcacagctggtcttagtcagaatagtacattggaggtgcagacacttagcgtggccccaaaggctcttgagacagtccaagaacgaaaattggcggctgaccacccattcctcaaggagatgcaggatcagggagagaacttatacgtcgtcatggaggttgtcgagactgtgcaagaggtcactcttgagagggcgggcaaagcagaggcttgcttcagtcttcccttctttgctcccctcgggctccagggaagtattaatcataaagaagccgtgactatcccgaagggctgtgttctcgcatttagggttagacagctgatggtgaagggtaaggatgagtgggacatcccccacatctgtaacgacaatatgcagacatttccacctggggaaaaatctggagaggagaaggttattttgatccaggcatctgacgtcggtgacgtgcacgagggtttcagaaccttaaaggaagaagtccaaagggaaacgcaacaagtcgagaaactgagtcgcgtcggacaatcttccttgttgtcctctcttagcaaacttctcggaaagaaaaaggagctacaggacctggaattggccttagaaggggccctggacaaaggccatgaggtcacattggaggccctccctaaagacgttctgctgtccaaggaagccgtaggcgccatcctctactttgtgggggccttgacagagttatccgaagcccagcagaagcttctggtaaagagcatggagaagaagattctcccagttcagctgaaactggtggagagcactatggaacagaatttcctgctggataaggagggggtgtttccccttcagccagaattactctcatccctcggggatgaggagctaacactaaccgaagcccttgtgggactctcagggttagaagtgcagaggagcggccctcaatacatgtgggatccagatacactcccaagactgtgtgctttgtatgctggactttcattgctacaacaattgaccaaggccagttag

SEQ ID NO: 294390 - DNA, 1338 bp, Artificial Sequence
  derived and/or modified sequence
atgactatgtttgaaaatgtgacccgggcactggctaggcagttgaacccccgaggcgatcttacccccctcgattccctgatcgattttaaaagatttcatccgttctgtctggtgctccggaaacgtaagtctacactcttctggggggcacgctatgtccgaaccgactacactctcctcgacgtgctcgaacccggatcttcgcctagtgatccaaccgacacagggaacttcggttttaagaatatgttagacactagggtggaaggagatgtcgatgtgccaaagaccgtcaaagtgaaaggcaccgctggactatcccagaattccaccctcgaagttcagacgttgtccgtggctccgaaggcactcgaaactgtacaggagcgcaagctggcagccgatcacccattcttaaaggagatgcaagatcaaggagagaatctgtatgtggtgatggaagtggtggaaaccgtccaggaggttacactggaacgtgcaggcaaggccgaagcatgcttcagcttaccatttttcgctcccttgggactccaggggagtatcaaccacaaagaagccgtcaccattccaaaaggctgtgtcttggcatttagggtgcggcagttgatggttaaagggaaggatgagtgggatattccccacatttgcaatgacaatatgcagacattccctcccggtgagaaatctggggaagagaaagttatactgatccaggccagcgatgtgggtgatgtccatgagggatttcggacgctgaaggaggaggttcagcgcgagactcagcaggttgaaaagctgtctcgggtgggtcagagctcacttctttctagtctgtctaagcttctcggaaagaagaaggaactacaagaccttgagctcgcccttgaaggagctctggacaaagggcatgaagttaccctggaagctcttcccaaggatgttttacttagcaaggaggccgtcggagcgatcctgtatttcgtcggggctttaacagagttatctgaagcacagcagaaactgctggttaagtccatggagaaaaagatacttcctgttcagctgaagctggtggagtccaccatggagcaaaattttctccttgacaaagaaggagtgttccctctgcagccagaactcctgtcctccttaggggatgaggaattgaccctcaccgaagccctggtcgggctctcaggactcgaggttcagagaagtggtccgcagtatatgtgggacccagatacactaccccgactgtgtgcactgtatgctggcctgagcctgctgcagcagttaaccaaggcgagttag

SEQ ID NO: 294391 - DNA, 1338 bp, Artificial Sequence
  derived and/or modified sequence
atgaccatgttcgagaacgtgaccagagccctggccagacagctgaaccccagaggcgacctgacccccctggacagcctgatcgacttcaagagattccaccccttctgcctggtgctgagaaagagaaagagcaccctgttctggggcgccagatacgtgagaaccgactacaccctgctggacgtgctggagcccggcagcagccccagcgaccccaccgacaccggcaacttcggcttcaagaacatgctggacaccagagtggagggcgacgtggacgtgcccaagaccgtgaaggtgaagggcaccgccggcctgagccagaacagcaccctggaggtgcagaccctgagcgtggcccccaaggccctggagaccgtgcaggagagaaagctggccgccgaccaccccttcctgaaggagatgcaggaccagggcgagaacctgtacgtggtgatggaggtggtggagaccgtgcaggaggtgaccctggagagagccggcaaggccgaggcctgcttcagcctgcccttcttcgcccccctgggcctgcagggcagcatcaaccacaaggaggccgtgaccatccccaagggctgcgtgctggccttcagagtgagacagctgatggtgaagggcaaggacgagtgggacatcccccacatctgcaacgacaacatgcagaccttcccccccggcgagaagagcggcgaggagaaggtgatcctgatccaggccagcgacgtgggcgacgtgcacgagggcttcagaaccctgaaggaggaggtgcagagagagacccagcaggtggagaagctgagcagagtgggccagagcagcctgctgagcagcctgagcaagctgctgggcaagaagaaggagctgcaggacctggagctggccctggagggcgccctggacaagggccacgaggtgaccctggaggccctgcccaaggacgtgctgctgagcaaggaggccgtgggcgccatcctgtacttcgtgggcgccctgaccgagctgagcgaggcccagcagaagctgctggtgaagagcatggagaagaagatcctgcccgtgcagctgaagctggtggagagcaccatggagcagaacttcctgctggacaaggagggcgtgttccccctgcagcccgagctgctgagcagcctgggcgacgaggagctgaccctgaccgaggccctggtgggcctgagcggcctggaggtgcagagaagcggcccccagtacatgtgggaccccgacaccctgcccagactgtgcgccctgtacgccggcctgagcctgctgcagcagctgaccaaggccagctag

SEQ ID NO: 294392 - DNA, 3702 bp, Artificial Sequence
  derived and/or modified sequence
atgggaggggccctcggccccgcattgctgctcacctccctgttcggcgcttgggctggcctgggacccggtcagggcgagcagggcatgacagtcgccgtggtctttagttcaagcggaccgcctcaggcgcaattccgcgctcggctgacccctcagagctttttggatctgccactagagatccaaccgctgacagtcggtgttaacaccaccaaccctagttctctgctgacccagatatgcggcttactcggcgctgcccacgtccacggaattgtcttcgaggataatgttgacacagaagctgtggcccagattttggacttcatttcatcccagactcatgttccaattctctcaatctctggtggctcagcagtagtgttgaccccaaaggagcccggcagcgccttcttacagctgggagtctctctggagcagcagttgcaagttctattcaaggtcctggaggagtacgattggtcggccttcgccgtgattacgtccctgcaccccggccatgcactttttctggagggggtccgggctgtggctgacgcttctcatgtcagctggcggctgctcgacgttgtaactttggagttaggccctggcgggccacgtgccagaacacagcggcttctgagacaactcgacgctcccgtgttcgtggcttattgcagcagggaggaagcagaggtcctgttcgctgaagcagcccaagctggactggtgggcccagggcatgtttggctggtgcccaacttggcgctcgggtcgacggacgccccccccgccacctttcccgtgggactgatcagcgttgttactgaatcatggaggttgtctctgagacagaaagttcgggatggggtagccattctagccttgggggcccatagctactggcggcagcacggtacccttccagccccggccggcgattgcagagtccaccccggccccgtgtccccggcccgagaagcattttacaggcaccttttgaacgttacctgggaaggtagagacttttcctttagccccggcggatatctcgtgcagcccactatggtggtaatcgctttgaatcgccaccggttatgggagatggtgggtaggtgggaacacggcgtgctgtacatgaagtaccctgtctggccaagatatagcgcttctttacagcccgtggtggatagccgccatctcactgtagccacccttgaagagcgcccattcgtgatcgtagagtccccggacccaggcacgggagggtgtgtgcctaataccgtaccgtgcaggcgccaaagcaaccacacattctcatccggcgacgtcgccccttacactaagctgtgctgcaagggtttttgtatcgatattcttaaaaagcttgctagggtcgtcaaattcagttacgatctatacttagttactaacggtaaacacggcaaacgtgtgcgaggagtttggaatggcatgatcggcgaggtgtattacaagcgggcagatatggctataggctccctgactattaacgaggagcggtctgagatcgtagacttcagcgtgccattcgtggagactgggatatccgtgatggtcgctaggagcaacggaaccgtgtcacctagcgctttccttgaaccctactccccagcagtgtgggtaatgatgttcgtgatgtgccttaccgtggttgctatcaccgtgttcatgttcgaatactttagtccggttagctataatcagaacctcacgagaggcaagaaatccggcgggcccgctttcacaattggtaaaagtgtgtggctcttgtgggcgctggtattcaataactccgtcccaatcgaaaatccaagaggtaccacctccaaaatcatggtactcgtatgggcgtttttcgccgttatcttcttggccagttacacagccaatctcgctgcctttatgattcaggagcagtacattgacacagtgtccgggttatccgataaaaaattccagcggcctcaggaccagtatcctccgtttcggtttggaactgtgcccaatggcagcaccgaacggaacatacggtccaattatcgggatatgcatacccacatggtgaagttcaaccagcgtagcgtggaggatgctctcacctccctcaaaatgggtaagttggacgccttcatatacgatgccgcagtactcaattacatggccggaaaggacgaaggctgtaagttggtaactatcggctcgggcaaagtgttcgcaaccaccgggtatggtatcgcgatgcaaaaggacagccattggaaacgagccattgacctggcactgctgcagttcttgggagacggggagactcagaagctggagacagtctggttaagtgggatctgccagaacgaaaagaacgaggttatgtctagtaaactggatatcgacaatatggccggcgtgttttatatgctgttggtagctatgggcctggctctgttggtgtttgcttgggagcacctcgtttattggaagttaagacactctgttccgaattcaagccagctggacttcctgttggccttctctcgggggatttactcatgtttctcaggtgtgcagtcactggccagcccaccccgtcaggcctcgccagatctcacggcttcatctgcacaggcctctgtactaaaaatgctgcaggccgctagggacatggtgactactgctggcgtgtccagttccctcgaccgagccaccagaactatagagaactggggaggagggcggcgtgcaccacctcccagcccatgtcccactccgcgctcaggaccgtctccttgcttgccaacacctgacccaccaccggaaccaagtcccacaggatgggggcctccggacgggggtcgggccgctctagtccggagagcgccacaaccacccgggcgcccccctaccccaggcccccctctgtcagatgtcagcagggtgtctagaagacccgcctgggaagccagatggcctgtgagaactggacattgcggaagacatctgagcgcctccgagaggcccttaagccctgcccggtgccactattcttccttccctcgggctgatcgtagcggccgcccattccttcccctttttccagaactggaggatctccccctcctgggccctgagcagctcgcacggcgggaggctctgttacatgctgcgtgggcccgtgggtctagacccaggcacgcaagcctcccatcctccgttgccgaggcctttgctaggccgtcatcactcccagcgggatgcactggcccagcgtgcgcacggcccgatggccacagcgcatgtcgccggctcgcccaggcacagagtatgtgtctccccatctaccgcgaagcttgccaggaaggcgagcaggccggtgccccagcatggcagcaccggcagcacgtgtgcctgcacgctcatgcccacctgccattctgttggggcgcggtatgtccacatctacctccttgcgctagtcatggctcatggctctctggggcctggggacccctgggacatcgcggtagaacgcttggactggggactggatatagggatagtggggggcttgatgagatcagcagagtggcccgcggaacccaggggtttcctggaccctgcacctggcgccgcatttcttcactggaatcagaggtgtag

SEQ ID NO: 294393 - DNA, 4261 bp, Artificial Sequence
  derived and/or modified sequence
tgtccttgagccgcgggtgacggtggctctcgctgctcgcgccccctcctcccgcggggggagcctgatgccacgttccctatgaattatttatcgccggcctaaaaataccccgaacttcacagcccgagtgaccctccggtggacatgggtggggccctggggccggccctgttgctcacctcgctcttcggtgcctgggcagggctgggtccggggcagggcgagcagggcatgacggtggctgtggtgtttagcagctcagggccgccccaggcccagttccgtgcccgcctcaccccccagagcttcctggacctacccctggagatccagccgctcacagttggggtcaacaccaccaaccccagcagcctcctcacccagatctgcggcctcctgggtgctgcccacgtccacggcattgtctttgaggacaacgtggacaccgaggcggtggcccagatccttgacttcatctcctcccagacccatgtgcccatcctcagcatcagcggaggctctgctgtggtcctcacccccaaggagccgggctccgccttcctgcagctgggcgtgtccctggagcagcagctgcaggtgctgttcaaggtgctggaagagtacgactggagcgccttcgccgtcatcaccagcctgcacccgggccacgcgctcttcctggagggcgtgcgcgccgtcgccgacgccagccacgtgagttggcggctgctggacgtggtcacgctggagctgggcccgggagggccgcgcgcgcgcacgcagcgcctgctgcgccagctcgacgcgcccgtgtttgtggcctactgctcgcgcgaggaggccgaggtgctcttcgccgaggcggcgcaggccggtctggtggggcccggccacgtgtggctggtgcccaacctggcgctgggcagcaccgatgcgccccccgccaccttccccgtgggcctcatcagcgtcgtcaccgagagctggcgcctcagcctgcgccagaaggtgcgcgacggcgtggccattctggccctgggcgcccacagctactggcgccagcatggaaccctgccagccccggccggggactgccgtgttcaccctgggcccgtcagccctgcccgggaggccttctacaggcacctactgaatgtcacctgggagggccgagacttctccttcagccctggtgggtacctggtccagcccaccatggtggtgatcgccctcaaccggcaccgcctctgggagatggtggggcgctgggagcatggcgtcctatacatgaagtaccccgtgtggcctcgctacagtgcctctctgcagcctgtggtggacagtcggcacctgacggtggccacgctggaagagcggccctttgtcatcgtggagagccctgaccctggcacaggaggctgtgtccccaacaccgtgccctgccgcaggcagagcaaccacaccttcagcagcggggacgtggccccctacaccaagctctgctgtaagggattctgcatcgacatcctcaagaagctggccagagtggtcaaattctcctacgacctgtacctggtgaccaacggcaagcatggcaagcgggtgcgcggcgtatggaacggcatgattggggaggtgtactacaagcgggcagacatggccatcggctccctcaccatcaatgaggaacgctccgagatcgtagacttctctgtaccctttgtggagacgggcatcagtgtgatggtggctcgcagcaatggcaccgtctccccctcggccttcttggagccatatagccctgcagtgtgggtgatgatgtttgtcatgtgcctcactgtggtggccatcaccgtcttcatgttcgagtacttcagccctgtcagctacaaccagaacctcaccagaggcaagaagtccgggggcccagctttcactatcggcaagtccgtgtggctgctgtgggcgctggtcttcaacaactcagtgcccatcgagaacccgcggggcaccaccagcaagatcatggttctggtctgggccttctttgctgtcatcttcctcgccagctacacggccaacctggccgccttcatgatccaagagcaatacatcgacactgtgtcgggcctcagtgacaagaagtttcagcggcctcaagatcagtacccacctttccgcttcggcacggtgcccaacggcagcacggagcggaacatccgcagtaactaccgtgacatgcacacccacatggtcaagttcaaccagcgctcggtggaggacgcgctcaccagcctcaagatggggaagctggatgccttcatctatgatgctgctgtcctcaactacatggcaggcaaggacgagggctgcaagctggtcaccattgggtctggcaaggtctttgctaccactggctacggcatcgccatgcagaaggactcccactggaagcgggccatagacctggcgctcttgcagttcctgggggacggagagacacagaaactggagacagtgtggctctcagggatctgccagaatgagaagaacgaggtgatgagcagcaagctggacatcgacaacatggcaggcgtcttctacatgctgctggtggccatggggctggccctgctggtcttcgcctgggagcacctggtctactggaagctgcgccactcggtgcccaactcatcccagctggacttcctgctggctttcagcaggggcatctacagctgcttcagcggggtgcagagcctcgccagcccaccgcggcaggccagcccggacctcacggccagctcggcccaggccagcgtgctcaagatgctgcaggcagcccgcgacatggtgaccacggcgggcgtaagcagctccctggaccgcgccactcgcaccatcgagaattggggtggcggccgccgtgcgcccccaccgtccccctgcccgaccccgcggtctggccccagcccatgcctgcccacccccgacccgcccccagagccgagccccacgggctggggaccgccagacgggggtcgcgcggcgcttgtgcgcagggctccgcagcccccgggccgccccccgacgccggggccgcccctgtccgacgtctcccgagtgtcgcgccgcccagcctgggaggcgcggtggccggtgcggaccgggcactgcgggaggcacctctcggcctccgagcggcccctgtcgcccgcgcgctgtcactacagctcctttcctcgagccgaccgatccggccgccccttcctcccgctcttcccggagctggaggacctgccgctgctcggtccggagcagctggcccggcgggaggccctgctgcacgcggcctgggcccggggctcgcgcccgcgtcacgcttccctgcccagctccgtggccgaggccttcgctcggcccagctcgctgcccgctgggtgcaccggccccgcctgcgcccgccccgacggccactcggcctgcaggcgcttggcgcaggcgcagtcgatgtgcttgccgatctaccgggaggcctgccaggagggcgagcaggcaggggcccccgcctggcagcacagacagcacgtctgcctgcacgcccacgcccacctgccattttgctggggggctgtctgtcctcaccttccaccctgtgccagccacggctcctggctctccggggcctgggggcctctggggcacaggggcaggactctggggctgggcacaggctacagagacagtgggggactggacgagatcagcagggtagcccgtgggacgcaaggcttcccgggaccctgcacctggagacggatctccagtctggagtcagaagtgtgagttatcagccactcaggctccgagccagctggattctctgcctgccactgtcagggttaagcggcaggcaggattgggcttttctggcttctgccatgaaatcctggccatgggaccccagtgacagatgatgtcttccatggtcatcagtgacctcagtagcctcaaatcatggtgagggctgggcttttgctgtcctcttctcacgcagagttctgccaggagggtgtgctgtgggggtcagactcctgaggctctcccttccctggggctagccagttactggtcatggctgctgtgggcatggaggctggaacttgtggttgaggcagggccatcccgatccttgctctacctggctagagtttcttctcatcagagcactgggacattaaaccaaccttttacaaca

SEQ ID NO: 294394 - DNA, 3702 bp, Artificial Sequence
  derived and/or modified sequence
atgggcggggccctgggccctgccctgctgctgaccagcctgtttggagcctgggccggcctgggccctggccagggcgagcagggcatgacagtggccgtggtgttcagcagcagcggccccccccaggcccagttccgggcccggctgaccccccagagcttcctggacctgcccctggagatccagcccctgactgtgggcgtgaacaccaccaaccccagcagcctgctgacccagatctgtggcctgctgggcgccgcccacgtgcatggaattgtgtttgaggacaacgtggacacagaagctgtggcccagatcctggacttcatcagcagccagacccacgtgcccatcctgagcatcagcggcggcagcgctgtggtgctgacccccaaggagcccggcagcgccttcctgcagctgggcgtgtccctggagcagcagctgcaggtgctcttcaaggtgctggaggagtatgactggagcgcctttgctgtgatcaccagcctgcaccctggccacgccctcttcctggagggcgtgcgggctgtggctgatgccagccacgtgtcctggaggctgctggatgtggtgaccctggagctgggccctgggggcccccgggcccggacccagaggctgctgcggcagctggatgcccctgtgtttgtggcctactgcagccgggaggaggccgaggtgctgtttgctgaggccgcccaggccggcctggtgggccctggccacgtgtggctggtgcccaacctggccctgggcagcacagatgcccccccagccaccttccctgtgggcctcatctctgtggtgacagagagctggaggctgagcctgcggcagaaggtgagagatggagtggccatcctggccctgggcgcccacagctactggaggcagcacggcaccctgcctgccccagctggggactgccgggtgcaccctggccctgtgtccccagcccgggaggccttctaccgccacctgctgaatgtgacctgggagggccgggacttctccttcagccctgggggctacctggtgcagcccaccatggtggtgattgccctgaacagacaccggctgtgggagatggtgggccgctgggagcacggcgtgctgtacatgaagtaccctgtgtggccccgctacagcgccagcctgcagcctgtggtggacagccgccacctgactgtggccaccctggaggagcggccctttgtgattgtggagagcccagaccccggcactggaggctgtgtgcccaacacagtgccctgccggcggcagagcaaccacaccttcagcagtggagatgtggccccctacaccaagctgtgctgcaagggcttctgcatcgacatcctgaagaagctggcccgggtggtgaagttctcctatgacctgtacctggtgaccaacgggaagcacggcaagagggtgcggggcgtgtggaatggcatgattggagaggtgtactacaagagagctgacatggccatcggcagcctgaccatcaatgaggagaggagtgaaattgtggacttctctgtgccctttgtggagaccggcatctctgtgatggtggcccggagcaatggaacagtgagccccagcgccttcctggagccctacagccctgctgtgtgggtgatgatgtttgtgatgtgcctgactgtggtggccatcaccgtcttcatgtttgagtacttcagccctgtgtcctacaaccagaacctgacccggggcaagaagagcggcggccctgccttcaccatcggcaagtctgtgtggctgctgtgggccctggtgttcaacaacagcgtgcccatcgagaacccccggggcaccaccagcaagatcatggtgctggtgtgggccttctttgctgtgatcttcctggccagctacacagccaacctggccgccttcatgatccaggagcagtacatcgacacagtgtctggcctgagtgacaagaagttccagaggccccaggaccagtacccacccttccgcttcggcaccgtgcccaacggcagcacagagaggaacatccgcagcaactacagagacatgcacacccacatggtgaagttcaaccagaggtctgtggaggatgccctgaccagcctgaagatgggcaagctggatgccttcatctatgatgctgctgtgctgaactacatggccggcaaggatgagggctgcaagctggtgaccatcggcagcggcaaggtgtttgccaccaccggctatggaattgccatgcagaaggacagccactggaagagggccatcgacctggccctgctgcagttcctgggagatggagagacccagaagctggagaccgtgtggctgagcggcatctgccagaatgagaagaatgaggtgatgagcagcaagctggacatcgacaacatggccggggtcttctacatgctgctggtggccatgggcctggccctgctggtgtttgcctgggagcacctggtgtactggaagctgcggcacagcgtgcccaacagcagccagctggacttcctgctggccttcagccggggcatctacagctgcttcagcggcgtgcagagcctggccagccccccccggcaggccagcccagacctgacagccagcagcgcccaggcctctgtgctgaagatgctgcaggccgcccgggacatggtgaccacagctggggtgagcagcagcctggaccgggccaccaggaccatcgagaactggggcggcggcagaagagcccccccacccagcccctgccccacccccaggagcggccccagcccctgcctgcccaccccagaccccccacctgagcccagccccaccggctggggccccccagatggcggccgggccgccctggtgcggcgggccccccagcccccaggccggccccccaccccaggcccccccctgagtgatgtgtcccgggtgtcccggcggcctgcctgggaggcccgctggcctgtgaggacaggccactgcggccgccacctgagcgccagcgagcggcccctgagccctgcccgctgccactacagcagcttccccagggctgacaggagcggccggcccttcctgcccctcttccctgagctggaggacctgcccctgctgggccctgagcagctggcccggcgggaggccctgctgcatgctgcctgggcccggggcagccggcccaggcatgccagcctgcccagctctgtggccgaggcctttgcccggcccagcagcctgcctgctggctgcaccggccctgcctgtgcccggccagatggccacagcgcctgccggcggctggcccaggcccagagcatgtgcctgcccatctaccgggaggcctgccaggagggggagcaggccggggccccagcctggcagcaccggcagcacgtgtgcctgcacgcccacgcccacctgcccttctgctggggcgctgtgtgcccccacctgcccccctgtgccagccacggctcctggctgagcggggcctggggccccctgggccaccggggccgcaccctgggcctgggcaccggctacagagattctgggggcctggatgagatcagccgggtggcccggggcacccagggcttccctggcccctgcacctggaggcgcatcagcagcctggagagcgaggtgtag

SEQ ID NO: 294395 - DNA, 3702 bp, Artificial Sequence
  derived and/or modified sequence
atgggcggcgccctgggccccgccctgctgctgaccagcctgttcggtgcgtgggcgggcctgggaccgggtcagggtgaacagggtatgaccgtggcagtcgtatttagtagtagcggccccccacaggcgcagtttcgggcgcgtctgacaccccagagctttctcgacctgcccctggaaatccagcccctgactgtcggcgttaacaccaccaatccatcctcactcttaacacaaatctgcggattgttaggggccgcccacgttcacggcatcgtttttgaggacaacgtggatactgaggctgtggcccagattcttgacttcatctcgagccaaacccatgttccaatactttctatctcgggcggatccgcagtcgtgctgacgcccaaggagccgggttccgctttcctacagctaggagtgtccttggaacagcagttacaggttttgtttaaagtcctggaagaatacgactggtctgcgttcgccgtaataacctccctgcaccctggacacgccctctttctggagggcgtccgagcggtggcggatgcgtctcacgtgtcttggcggctactggatgttgttacactagagttagggcctggcggacccagagcaagaacacagaggttactgaggcaactggatgccccagtgtttgttgcgtattgtagccgcgaggaggctgaagtgctgtttgcagaggctgctcaagcgggactcgttggacctggacacgtatggctggtccccaatctagctctcggaagcactgatgcccctcctgcaacattccctgtggggcttatctccgttgtgaccgagtcatggcgactctccttaaggcagaaagtcagggacggcgtggccatactggccctgggcgcgcattcgtactggagacaacacggcaccttacctgcccccgcaggagattgccgggtgcaccctggaccagtgtcaccagctagagaggcattctacagacacctcttaaatgttacttgggagggcagagacttcagcttctctcctggcggctatctcgtacagcccaccatggtggtgattgctcttaaccgccatagactctgggagatggtcggacggtgggaacatggcgtgctttatatgaaatatccggtttggccccgctatagcgcaagtctgcaaccagtggttgactcccgacacctaacggtggccactctggaagaacggccattcgttatcgtcgaatcaccagacccagggactggcgggtgtgtccctaacacggtgccttgtaggaggcagagcaatcacacattctcatcaggagatgtggcgccatacactaaactctgttgcaagggcttttgcattgatatcctgaaaaaactcgcaagagtagtgaagttttcctatgatttatatctggtaaccaatggaaagcatggaaagcgggtaagaggagtctggaacggcatgatcggagaggtctattacaaaagggccgatatggcaataggatccttgaccattaacgaagaaaggagcgagatcgttgacttttcagtgccctttgtggagacagggattagtgtgatggtggctagaagtaatggaacagtgtcgcccagcgcctttctggagccttactcccccgcagtgtgggtcatgatgttcgtcatgtgtctaaccgtggtcgcaataacagtgtttatgttcgaatatttcagtcccgtgtcctacaaccagaatctgacacgagggaaaaaaagtggaggacctgcctttaccatcggcaagtctgtgtggctgctgtgggctcttgtattcaacaactctgtgcccattgaaaacccccgagggacaacttccaagataatggttttggtctgggcatttttcgctgttatatttcttgcatcttacacggccaacttggccgccttcatgatccaggagcagtacatagataccgtgtccgggctgtcagataagaaattccaaaggccccaggatcagtatccccctttccgctttggcacagtgcctaacggcagcaccgagaggaacatacggagtaattaccgcgatatgcatacacacatggtgaaattcaaccagaggagcgttgaggatgccctgaccagcctgaaaatgggcaaactagacgccttcatctatgatgccgcagtcctgaactacatggctgggaaggacgaaggatgcaagctggtcaccattggatccggtaaggtgttcgcaaccactggctacggcattgccatgcaaaaggatagtcattggaaacgtgcaattgatctcgcactcctgcagttcctcggcgatggggaaactcagaaattagagaccgtatggctgtctggcatttgtcagaacgaaaaaaatgaggtgatgagtagtaagcttgatatcgataacatggccggagtcttttacatgctcctggtggctatgggcctggcccttcttgtgttcgcatgggaacatttggtgtattggaaattacgccactccgtacctaatagctcacagttggatttcctgcttgctttctcccgtgggatctactcctgtttttcaggagtgcaatctctggcaagtcctccacgtcaagctagccccgatctaacagcttcttctgctcaagccagtgtcctgaagatgcttcaagctgcaagagacatggttacaaccgctggagtgagctcttccttggatagagctacacggaccatcgagaattggggaggaggcaggagagcccctccacccagcccctgtcccacccctcggagtggtccctctccctgtctacctactccggaccctccaccagagcccagcccgaccggctgggggcctcccgatggaggcagggcagcactggtcaggagggcgccacagcctcctgggagacctcctactcctggcccaccgcttagcgacgtttcaagagtctcccgccgaccagcatgggaagcccggtggccagtacggactggccactgcgggagacacctgtctgcctccgagcggcctctgtctcccgcaagatgccactactctagcttccccagagctgaccgaagcggaaggccatttctgccgctgttccccgagctggaggatcttccgctgttagggccagaacagctagcccgaagagaagccttgcttcacgctgcctgggctagggggtcacgaccacgccatgctagcctgccaagtagcgtcgcagaggccttcgctcgcccttcgagcctccctgctgggtgtactggaccagcttgcgcacgaccagacgggcactccgcttgtagaagactggcacaggcacagtccatgtgcctgcccatctacagagaagcatgtcaggaaggcgagcaggccggggcacccgcatggcagcataggcagcacgtctgtctgcacgcccatgctcatctgccattctgctggggggcagtttgcccgcacctcccaccgtgtgcgagtcacggatcttggctgagcggagcttggggccccttaggccaccgaggaaggacattgggcctgggaaccgggtaccgcgactcagggggccttgacgaaatatctcgcgtggcacggggtacacagggtttccccggtccttgcacctggcgtcggatttcatcacttgagtcagaagtttag

SEQ ID NO: 294396 - DNA, 3702 bp, Artificial Sequence
  derived and/or modified sequence
atggggggagccttaggcccagccttgttgcttaccagcctcttcggagcctgggcaggactggggcctggacagggcgagcaggggatgacagtggccgtagtgttttcctccagcggtcctccccaagctcagttccgggctcgcctgacacctcagtcgttcttagacctgcccctcgaaatccagcccctgacagtgggagtcaacacaactaatccaagctccctcctgacccaaatatgcggcctgctgggagccgctcatgtgcatgggatcgtatttgaggataacgtggatactgaagccgtggcacagatcctcgattttatctcgtctcaaactcatgtccccattttatctatttcaggaggctccgctgttgtgttgacaccgaaggagcctggatcggctttcctccagctcggcgtgagcctggagcagcagttacaggtactttttaaagtgctggaggagtatgactggtctgcatttgctgtgattacgtcactgcacccagggcatgccttgttcctcgaaggcgtccgggcagttgccgatgccagtcacgtttcatggcgcctgttagatgtagtgactctagaactcggcccagggggaccgcgagctcgaacgcagaggctgttgaggcagctcgatgctcccgtcttcgtggcttactgtagccgggaagaggctgaggtgttgttcgccgaagctgcccaagcaggactcgtcggcccaggccatgtgtggttggttcctaatctggcacttggttctactgatgcccctcccgcaacattccctgttgggcttatctcagtggtcacagagagttggagactcagcttgcggcagaaggtgcgtgacggtgtcgcaatattggctctcggagctcatagctattggcgacagcatgggaccctgccagctccggctggcgattgcagagtgcatccgggtcctgtgtcaccagcgagggaggccttctatcgccatctgctgaacgtcacctgggagggtcgggacttttctttcagccccggaggctacctggtccagcccaccatggtggtgatcgcccttaatcgtcaccgcctctgggaaatggtgggtcgatgggagcacggggtgttatacatgaaatatcccgtctggcctaggtattcagccagcctacagcctgtcgtcgacagccgccatctcacggtcgcgacattagaagaaaggccgtttgtcatcgttgagtctccagacccgggaaccggcggttgcgtgccaaacactgtgccatgtcgcagacagtctaatcacacgttctcgtcaggggacgtcgctccctacacaaaactttgctgcaaggggttctgtattgacatactcaaaaagctggcccgagtcgtgaaattttcatacgacctgtaccttgtaactaacggtaagcacggcaagagagtgagaggggtttggaacggaatgattggcgaggtgtattataaacgggctgacatggccattggaagcttgactattaatgaagaacggtctgaaattgtagacttcagcgtccctttcgtcgaaactgggatatccgtcatggtggccaggtctaatgggacagtcagtccttcagcattcttagaaccatactctcctgccgtttgggtaatgatgttcgtgatgtgtctgaccgtggtcgctataacggtgtttatgttcgagtacttttccccggtgtcttataaccagaatctcacaaggggcaaaaagtcggggggaccggcatttactatagggaagagcgtatggctgttgtgggcccttgtgttcaataattcggtgcccatcgagaatcctaggggcaccacatctaaaattatggtgctggtctgggctttttttgcggtgatctttctggccagctataccgcaaaccttgcagcttttatgatccaagaacaatacattgatacagtgtcagggttgtctgacaagaagttccaaaggccccaggaccagtaccccccatttcggtttggcaccgtaccaaatggcagtactgagcggaacattaggtctaattatcgagatatgcacacacatatggtgaagttcaaccagcggtcggtggaagacgccttgacttccttgaaaatgggaaaactggatgccttcatttatgatgctgcagtcctaaactatatggctggtaaagacgaaggctgcaagttagtaaccattggctctggtaaggtcttcgccacaactggatatggcatcgcaatgcagaaagactctcactggaagagggccatcgaccttgcccttctgcagttcctaggtgatggtgaaactcagaagttagagaccgtctggctaagcggcatctgccaaaatgagaagaatgaggtcatgtcctccaagttggacattgataatatggctggagtgttctacatgttgctagtagctatgggcctggcgctcctggtgtttgcgtgggagcatcttgtgtattggaagctgcgccacagcgttccgaatagcagccagctggacttcttgctggcttttagccgtggaatttactcatgcttcagcggcgttcagtccctggcaagcccaccccgacaggcttcgcccgacctcactgcatcaagcgcccaggctagcgtgctgaaaatgttacaggctgcacgggatatggtgaccaccgccggagtgtcatcctcactcgacagggccactcgtacgattgagaattggggaggagggaggcgagcccctccgcctagcccatgtccgacgccgaggagcgggcctagcccgtgtctgccaacccctgatcctccgccagaaccttcacctactggctggggtccacccgacggaggcagggcagccctcgtgcgccgtgccccacagcctcctggtaggcctcctacacctggccctcctctatccgacgtgtcacgcgtgtcccggagacccgcttgggaagccaggtggcctgtgagaaccggccattgtggccgacatttgagtgcctccgagagacctttgtctcccgcaaggtgtcattattcatcttttccccgagccgacaggagtgggcgtccattcttgccactgtttccagagctggaagatctgccactgctcggccctgagcagcttgccaggcgggaggccctgctgcacgctgcctgggccaggggttctcggccacgccacgcttctctgccatcaagcgtcgcagaggcctttgccagaccctccagccttcccgctggctgtacgggtcctgcatgtgcgagaccggatgggcacagcgcatgcaggcgtctagctcaggcacaaagtatgtgcctgcctatctacagggaggcgtgccaagaaggagagcaggccggagcccctgcctggcagcaccggcagcatgtttgtctgcacgctcacgcacatctgcctttctgttggggggcagtatgtccccacctcccaccgtgcgcctcccatgggtcttggctatccggagcctggggaccattgggacatcgcggacgcacgctgggcctgggcacgggttatcgcgactccggcggactagatgagatttcccgggtggcaagaggaacgcagggatttccaggtccatgtacttggcggagaatcagttcactcgagagtgaggtgtag

SEQ ID NO: 294397 - DNA, 3702 bp, Artificial Sequence
  derived and/or modified sequence
atgggcggcgccctgggccccgccctgctgctgaccagcctgttcggcgcctgggccggcctgggccccggccagggcgagcagggcatgaccgtggccgtggtgttcagcagcagcggccccccccaggcccagttcagagccagactgaccccccagagcttcctggacctgcccctggagatccagcccctgaccgtgggcgtgaacaccaccaaccccagcagcctgctgacccagatctgcggcctgctgggcgccgcccacgtgcacggcatcgtgttcgaggacaacgtggacaccgaggccgtggcccagatcctggacttcatcagcagccagacccacgtgcccatcctgagcatcagcggcggcagcgccgtggtgctgacccccaaggagcccggcagcgccttcctgcagctgggcgtgagcctggagcagcagctgcaggtgctgttcaaggtgctggaggagtacgactggagcgccttcgccgtgatcaccagcctgcaccccggccacgccctgttcctggagggcgtgagagccgtggccgacgccagccacgtgagctggagactgctggacgtggtgaccctggagctgggccccggcggccccagagccagaacccagagactgctgagacagctggacgcccccgtgttcgtggcctactgcagcagagaggaggccgaggtgctgttcgccgaggccgcccaggccggcctggtgggccccggccacgtgtggctggtgcccaacctggccctgggcagcaccgacgccccccccgccaccttccccgtgggcctgatcagcgtggtgaccgagagctggagactgagcctgagacagaaggtgagagacggcgtggccatcctggccctgggcgcccacagctactggagacagcacggcaccctgcccgcccccgccggcgactgcagagtgcaccccggccccgtgagccccgccagagaggccttctacagacacctgctgaacgtgacctgggagggcagagacttcagcttcagccccggcggctacctggtgcagcccaccatggtggtgatcgccctgaacagacacagactgtgggagatggtgggcagatgggagcacggcgtgctgtacatgaagtaccccgtgtggcccagatacagcgccagcctgcagcccgtggtggacagcagacacctgaccgtggccaccctggaggagagacccttcgtgatcgtggagagccccgaccccggcaccggcggctgcgtgcccaacaccgtgccctgcagaagacagagcaaccacaccttcagcagcggcgacgtggccccctacaccaagctgtgctgcaagggcttctgcatcgacatcctgaagaagctggccagagtggtgaagttcagctacgacctgtacctggtgaccaacggcaagcacggcaagagagtgagaggcgtgtggaacggcatgatcggcgaggtgtactacaagagagccgacatggccatcggcagcctgaccatcaacgaggagagaagcgagatcgtggacttcagcgtgcccttcgtggagaccggcatcagcgtgatggtggccagaagcaacggcaccgtgagccccagcgccttcctggagccctacagccccgccgtgtgggtgatgatgttcgtgatgtgcctgaccgtggtggccatcaccgtgttcatgttcgagtacttcagccccgtgagctacaaccagaacctgaccagaggcaagaagagcggcggccccgccttcaccatcggcaagagcgtgtggctgctgtgggccctggtgttcaacaacagcgtgcccatcgagaaccccagaggcaccaccagcaagatcatggtgctggtgtgggccttcttcgccgtgatcttcctggccagctacaccgccaacctggccgccttcatgatccaggagcagtacatcgacaccgtgagcggcctgagcgacaagaagttccagagaccccaggaccagtacccccccttcagattcggcaccgtgcccaacggcagcaccgagagaaacatcagaagcaactacagagacatgcacacccacatggtgaagttcaaccagagaagcgtggaggacgccctgaccagcctgaagatgggcaagctggacgccttcatctacgacgccgccgtgctgaactacatggccggcaaggacgagggctgcaagctggtgaccatcggcagcggcaaggtgttcgccaccaccggctacggcatcgccatgcagaaggacagccactggaagagagccatcgacctggccctgctgcagttcctgggcgacggcgagacccagaagctggagaccgtgtggctgagcggcatctgccagaacgagaagaacgaggtgatgagcagcaagctggacatcgacaacatggccggcgtgttctacatgctgctggtggccatgggcctggccctgctggtgttcgcctgggagcacctggtgtactggaagctgagacacagcgtgcccaacagcagccagctggacttcctgctggccttcagcagaggcatctacagctgcttcagcggcgtgcagagcctggccagcccccccagacaggccagccccgacctgaccgccagcagcgcccaggccagcgtgctgaagatgctgcaggccgccagagacatggtgaccaccgccggcgtgagcagcagcctggacagagccaccagaaccatcgagaactggggcggcggcagaagagcccccccccccagcccctgccccacccccagaagcggccccagcccctgcctgcccacccccgaccccccccccgagcccagccccaccggctggggcccccccgacggcggcagagccgccctggtgagaagagccccccagccccccggcagaccccccacccccggcccccccctgagcgacgtgagcagagtgagcagaagacccgcctgggaggccagatggcccgtgagaaccggccactgcggcagacacctgagcgccagcgagagacccctgagccccgccagatgccactacagcagcttccccagagccgacagaagcggcagacccttcctgcccctgttccccgagctggaggacctgcccctgctgggccccgagcagctggccagaagagaggccctgctgcacgccgcctgggccagaggcagcagacccagacacgccagcctgcccagcagcgtggccgaggccttcgccagacccagcagcctgcccgccggctgcaccggccccgcctgcgccagacccgacggccacagcgcctgcagaagactggcccaggcccagagcatgtgcctgcccatctacagagaggcctgccaggagggcgagcaggccggcgcccccgcctggcagcacagacagcacgtgtgcctgcacgcccacgcccacctgcccttctgctggggcgccgtgtgcccccacctgcccccctgcgccagccacggcagctggctgagcggcgcctggggccccctgggccacagaggcagaaccctgggcctgggcaccggctacagagacagcggcggcctggacgagatcagcagagtggccagaggcacccagggcttccccggcccctgcacctggagaagaatcagcagcctggagagcgaggtgtag

SEQ ID NO: 294398 - protein, 77 aa, Artificial Sequence
  derived and/or modified sequence
MDEPSPLAQPLELNQHSRFIIGSVSEDNSEDEISNLVKLDLLEEKEGSLSPASVGSDTLSDLGISSLQDGLALHIRL

SEQ ID NO: 294399 - protein, 47 aa, Artificial Sequence
  derived and/or modified sequence
MDEPSPLAQPLELNQHSRFIIGSVSEDNSEDEISNLVKLDLLEEKEG

SEQ ID NO: 294400 - DNA, 1627 bp, Artificial Sequence
  derived and/or modified sequence
gccctcttggccttttcccggtccccgccgcgcgcctgctgctgtccccgtgcccgaggactgggaggatggggctgagccgcttgcctgacttttgatccgaccagtaatcactttgcccgtgtggcgcgtggcccgttgcctgaggcttcctggcgcgtggggctgtttggtcccctccggagtgcggtgaggcgggccgagccgggactgcctgggtttggggataacgttcccatctccacccctgttgcagcaagggaaattgaggctgagggaactgggcccagggacggcgagccgtggctgcctctccagtccgggccccgaagggctgctcgtggatgaaccagactgattttaaggggtgaagagggtgcgtttcaatcagatgcttctggaacgtcgaaattgtcttctttggaaagaaccatcccctctttgggcttcagaggcccaaattgaggcgcaatgatgagaggatgtggtggtctactctgatgtcaatcttgagggctagggtcttgctatgtcacccagcctggagtggaattgtgtgatcaagactcactgaagcctccaactcctgggctcaagcaatcctcccacctcagccacccaagtagctgggactacaggctggagtgcaatggcatgatcttggctcactgcaacctccgcctcccggattcaacggattctcctgcctcagcctcctgagtagctgggattataggtgcctgccacaacacccaggaccagacttatgaagtggccttcctgaggagattttctgaccttatggtatgaagttccttcaggctcttaattctggataaactggagtgattaacaagagcaaagagacatagtattcagataaggactttgtgtcttatttttcttttatatcacaactggagccacagttgtgggcaaggcactgactttcttgatgaattctgtccatctgtaaagcagctatatatcccactggaggctttgcctctcagagacaacgtgaagacggataagcaggcatcaggagcagagtggcctctcagctggtcagattctccgaagaaggatcctctaggctgggcacggtggctcacacctataatcccagcactttgggaggccgaggcaggtggatcacgaggtcaggagttcgaggccagcctggccaatatggtctttctggaagtggatatctactcagacagtaagaattataagagctgtaagagctcattttggaggaataatggatgaaccatctcccttggcccaacctctggagctgaaccagcactctcgattcataataggttctgtgtctgaagataactcagaggatgagatcagcaacctggtgaagttggacctactggaggagaaggagggctccttgtcacctgcttctgttggctcagatacactctctgatttggggatctctagcctacaggatggcttggccttgcacataaggtccagcatgtctggcttgcacctagtaaagcagggccgagacagaaagaaaatagattctcaacgagatttcactgtggcttctccagcagaatttgttactcgctttgggggaaataaagtgattgagaag

SEQ ID NO: 294401 - DNA, 341 bp, Artificial Sequence
  derived and/or modified sequence
aggcactgactttcttgatgaattctgtccatctgtaaagcagctatatatcccactggaggctttgcctctcagagacaacgtgaagacggataagcaggcatcaggagcagagtggcctctcaggtctttctggaagtggatatctactcagacagtaagaattataagagctgtaagagctcattttggaggaataatggatgaaccatctcccttggcccaacctctggagctgaaccagcactctcgattcataataggttctgtgtctgaagataactcagaggatgagatcagcaacctggtgaagttggacctactggaggagaaggagggct

SEQ ID NO: 294402 - protein, 1822 aa, Artificial Sequence
  derived and/or modified sequence
MAGPRPSPWARLLLAALISVSLSGTLANRCKKAPVKSCTECVRVDKDCAYCTDEMFRDRRCNTQAELLAAGCQRESIVVMESSFQITEETQIDTTLRRSQMSPQGLRVRLRPGEERHFELEVFEPLESPVDLYILMDFSNSMSDDLDNLKKMGQNLARVLSQLTSDYTIGFGKFVDKVSVPQTDMRPEKLKEPWPNSDPPFSFKNVISLTEDVDEFRNKLQGERISGNLDAPEGGFDAILQTAVCTRDIGWRPDSTHLLVFSTESAFHYEADGANVLAGIMSRNDERCHLDTTGTYTQYRTQDYPSVPTLVRLLAKHNIIPIFAVTNYSYSYYEKLHTYFPVSSLGVLQEDSSNIVELLEEAFNRIRSNLDIRALDSPRGLRTEVTSKMFQKTRTGSFHIRRGEVGIYQVQLRALEHVDGTHVCQLPEDQKGNIHLKPSFSDGLKMDAGIICDVCTCELQKEVRSARCSFNGDFVCGQCVCSEGWSGQTCNCSTGSLSDIQPCLREGEDKPCSGRGECQCGHCVCYGEGRYEGQFCEYDNFQCPRTSGFLCNDRGRCSMGQCVCEPGWTGPSCDCPLSNATCIDSNGGICNGRGHCECGRCHCHQQSLYTDTICEINYSAIHPGLCEDLRSCVQCQAWGTGEKKGRTCEECNFKVKMVDELKRAEEVVVRCSFRDEDDDCTYSYTMEGDGAPGPNSTVLVHKKKDCPPGSFWWLIPLLLLLLPLLALLLLLCWKYCACCKACLALLPCCNRGHMVGFKEDHYMLRENLMASDHLDTPMLRSGNLKGRDVVRWKVTNNMQRPGFATHAASINPTELVPYGLSLRLARLCTENLLKPDTRECAQLRQEVEENLNEVYRQISGVHKLQQTKFRQQPNAGKKQDHTIVDTVLMAPRSAKPALLKLTEKQVEQRAFHDLKVAPGYYTLTADQDARGMVEFQEGVELVDVRVPLFIRPEDDDEKQLLVEAIDVPAGTATLGRRLVNITIIKEQARDVVSFEQPEFSVSRGDQVARIPVIRRVLDGGKSQVSYRTQDGTAQGNRDYIPVEGELLFQPGEAWKELQVKLLELQEVDSLLRGRQVRRFHVQLSNPKFGAHLGQPHSTTIIIRDPDELDRSFTSQMLSSQPPPHGDLGAPQNPNAKAAGSRKIHFNWLPPSGKPMGYRVKYWIQGDSESEAHLLDSKVPSVELTNLYPYCDYEMKVCAYGAQGEGPYSSLVSCRTHQEVPSEPGRLAFNVVSSTVTQLSWAEPAETNGEITAYEVCYGLVNDDNRPIGPMKKVLVDNPKNRMLLIENLRESQPYRYTVKARNGAGWGPEREAIINLATQPKRPMSIPIIPDIPIVDAQSGEDYDSFLMYSDDVLRSPSGSQRPSVSDDTGCGWKFEPLLGEELDLRRVTWRLPPELIPRLSASSGRSSDAEAPHGPPDDGGAGGKGGSLPRSATPGPPGEHLVNGRMDFAFPGSTNSLHRMTTTSAAAYGTHLSPHVPHRVLSTSSTLTRDYNSLTRSEHSHSTTLPRDYSTLTSVSSHDSRLTAGVPDTPTRLVFSALGPTSLRVSWQEPRCERPLQGYSVEYQLLNGGELHRLNIPNPAQTSVVVEDLLPNHSYVFRVRAQSQEGWGREREGVITIESQVHPQSPLCPLPGSAFTLSTPSAPGPLVFTALSPDSLQLSWERPRRPNGDIVGYLVTCEMAQGGGPATAFRVDGDSPESRLTVPGLSENVPYKFKVQARTTEGFGPEREGIITIESQDGGPFPQLGSRAGLFQHPLQSEYSSITTTHTSATEPFLVDGLTLGAQHLEAGGSLTRHVTQEFVSRTLTTSGTLSTHMDQQFFQT

SEQ ID NO: 294403 - DNA, 5918 bp, Artificial Sequence
  derived and/or modified sequence
gcgctgcccgcctcgtccccacccccccaacccccgcgcccgccctcggacagtccctgctcgcccgcgcgctgcagccccatctcctagcggcagcccaggcgcggagggagcgagtccgccccgaggtaggtccaggacgggcgcacagcagcagccgaggctggccgggagagggaggaagaggatggcagggccacgccccagcccatgggccaggctgctcctggcagccttgatcagcgtcagcctctctgggaccttggcaaaccgctgcaagaaggccccagtgaagagctgcacggagtgtgtccgtgtggataaggactgcgcctactgcacagacgagatgttcagggaccggcgctgcaacacccaggcggagctgctggccgcgggctgccagcgggagagcatcgtggtcatggagagcagcttccaaatcacagaggagacccagattgacaccaccctgcggcgcagccagatgtccccccaaggcctgcgggtccgtctgcggcccggtgaggagcggcattttgagctggaggtgtttgagccactggagagccccgtggacctgtacatcctcatggacttctccaactccatgtccgatgatctggacaacctcaagaagatggggcagaacctggctcgggtcctgagccagctcaccagcgactacactattggatttggcaagtttgtggacaaagtcagcgtcccgcagacggacatgaggcctgagaagctgaaggagccctggcccaacagtgacccccccttctccttcaagaacgtcatcagcctgacagaagatgtggatgagttccggaataaactgcagggagagcggatctcaggcaacctggatgctcctgagggcggcttcgatgccatcctgcagacagctgtgtgcacgagggacattggctggcgcccggacagcacccacctgctggtcttctccaccgagtcagccttccactatgaggctgatggcgccaacgtgctggctggcatcatgagccgcaacgatgaacggtgccacctggacaccacgggcacctacacccagtacaggacacaggactacccgtcggtgcccaccctggtgcgcctgctcgccaagcacaacatcatccccatctttgctgtcaccaactactcctatagctactacgagaagcttcacacctatttccctgtctcctcactgggggtgctgcaggaggactcgtccaacatcgtggagctgctggaggaggccttcaatcggatccgctccaacctggacatccgggccctagacagcccccgaggccttcggacagaggtcacctccaagatgttccagaagacgaggactgggtcctttcacatccggcggggggaagtgggtatataccaggtgcagctgcgggcccttgagcacgtggatgggacgcacgtgtgccagctgccggaggaccagaagggcaacatccatctgaaaccttccttctccgacggcctcaagatggacgcgggcatcatctgtgatgtgtgcacctgcgagctgcaaaaagaggtgcggtcagctcgctgcagcttcaacggagacttcgtgtgcggacagtgtgtgtgcagcgagggctggagtggccagacctgcaactgctccaccggctctctgagtgacattcagccctgcctgcgggagggcgaggacaagccgtgctccggccgtggggagtgccagtgcgggcactgtgtgtgctacggcgaaggccgctacgagggtcagttctgcgagtatgacaacttccagtgtccccgcacttccgggttcctctgcaatgaccgaggacgctgctccatgggccagtgtgtgtgtgagcctggttggacaggcccaagctgtgactgtcccctcagcaatgccacctgcatcgacagcaatgggggcatctgtaatggacgtggccactgtgagtgtggccgctgccactgccaccagcagtcgctctacacggacaccatctgcgagatcaactactcggcgatccacccgggcctctgcgaggacctacgctcctgcgtgcagtgccaggcgtggggcaccggcgagaagaaggggcgcacgtgtgaggaatgcaacttcaaggtcaagatggtggacgagcttaagagagccgaggaggtggtggtgcgctgctccttccgggacgaggatgacgactgcacctacagctacaccatggaaggtgacggcgcccctgggcccaacagcactgtcctggtgcacaagaagaaggactgccctccgggctccttctggtggctcatccccctgctcctcctcctcctgccgctcctggccctgctactgctgctatgctggaagtactgtgcctgctgcaaggcctgcctggcacttctcccgtgctgcaaccgaggtcacatggtgggctttaaggaagaccactacatgctgcgggagaacctgatggcctctgaccacttggacacgcccatgctgcgcagcgggaacctcaagggccgtgacgtggtccgctggaaggtcaccaacaacatgcagcggcctggctttgccactcatgccgccagcatcaaccccacagagctggtgccctacgggctgtccttgcgcctggcccgcctttgcaccgagaacctgctgaagcctgacactcgggagtgcgcccagctgcgccaggaggtggaggagaacctgaacgaggtctacaggcagatctccggtgtacacaagctccagcagaccaagttccggcagcagcccaatgccgggaaaaagcaagaccacaccattgtggacacagtgctgatggcgccccgctcggccaagccggccctgctgaagcttacagagaagcaggtggaacagagggccttccacgacctcaaggtggcccccggctactacaccctcactgcagaccaggacgcccggggcatggtggagttccaggagggcgtggagctggtggacgtacgggtgcccctctttatccggcctgaggatgacgacgagaagcagctgctggtggaggccatcgacgtgcccgcaggcactgccaccctcggccgccgcctggtaaacatcaccatcatcaaggagcaagccagagacgtggtgtcctttgagcagcctgagttctcggtcagccgcggggaccaggtggcccgcatccctgtcatccggcgtgtcctggacggcgggaagtcccaggtctcctaccgcacacaggatggcaccgcgcagggcaaccgggactacatccccgtggagggtgagctgctgttccagcctggggaggcctggaaagagctgcaggtgaagctcctggagctgcaagaagttgactccctcctgcggggccgccaggtccgccgtttccacgtccagctcagcaaccctaagtttggggcccacctgggccagccccactccaccaccatcatcatcagggacccagatgaactggaccggagcttcacgagtcagatgttgtcatcacagccaccccctcacggcgacctgggcgccccgcagaaccccaatgctaaggccgctgggtccaggaagatccatttcaactggctgcccccttctggcaagccaatggggtacagggtaaagtactggattcagggtgactccgaatccgaagcccacctgctcgacagcaaggtgccctcagtggagctcaccaacctgtacccgtattgcgactatgagatgaaggtgtgcgcctacggggctcagggcgagggaccctacagctccctggtgtcctgccgcacccaccaggaagtgcccagcgagccagggcgtctggccttcaatgtcgtctcctccacggtgacccagctgagctgggctgagccggctgagaccaacggtgagatcacagcctacgaggtctgctatggcctggtcaacgatgacaaccgacctattgggcccatgaagaaagtgctggttgacaaccctaagaaccggatgctgcttattgagaaccttcgggagtcccagccctaccgctacacggtgaaggcgcgcaacggggccggctgggggcctgagcgggaggccatcatcaacctggccacccagcccaagaggcccatgtccatccccatcatccctgacatccctatcgtggacgcccagagcggggaggactacgacagcttccttatgtacagcgatgacgttctacgctctccatcgggcagccagaggcccagcgtctccgatgacactggctgcggctggaagttcgagcccctgctgggggaggagctggacctgcggcgcgtcacgtggcggctgcccccggagctcatcccgcgcctgtcggccagcagcgggcgctcctccgacgccgaggcgccccacgggcccccggacgacggcggcgcgggcgggaagggcggcagcctgccccgcagtgcgacacccgggccccccggagagcacctggtgaatggccggatggactttgccttcccgggcagcaccaactccctgcacaggatgaccacgaccagtgctgctgcctatggcacccacctgagcccacacgtgccccaccgcgtgctaagcacatcctccaccctcacacgggactacaactcactgacccgctcagaacactcacactcgaccacactgcccagggactactccaccctcacctccgtctcctcccacgactctcgcctgactgctggtgtgcccgacacgcccacccgcctggtgttctctgccctggggcccacatctctcagagtgagctggcaggagccgcggtgcgagcggccgctgcagggctacagtgtggagtaccagctgctgaacggcggtgagctgcatcggctcaacatccccaaccctgcccagacctcggtggtggtggaagacctcctgcccaaccactcctacgtgttccgcgtgcgggcccagagccaggaaggctggggccgagagcgtgagggtgtcatcaccattgaatcccaggtgcacccgcagagcccactgtgtcccctgccaggctccgccttcactttgagcactcccagtgccccaggcccgctggtgttcactgccctgagcccagactcgctgcagctgagctgggagcggccacggaggcccaatggggatatcgtcggctacctggtgacctgtgagatggcccaaggaggagggccagccaccgcattccgggtggatggagacagccccgagagccggctgaccgtgccgggcctcagcgagaacgtgccctacaagttcaaggtgcaggccaggaccactgagggcttcgggccagagcgcgagggcatcatcaccatagagtcccaggatggaggacccttcccgcagctgggcagccgtgccgggctcttccagcacccgctgcaaagcgagtacagcagcatcaccaccacccacaccagcgccaccgagcccttcctagtggatgggctgaccctgggggcccagcacctggaggcaggcggctccctcacccggcatgtgacccaggagtttgtgagccggacactgaccaccagcggaacccttagcacccacatggaccaacagttcttccaaacttgaccgcaccctgccccacccccgccacgtcccactaggcgtcctcccgactcctctcccggagcctcctcagctactccatccttgcacccctgggggcccagcccacccgcatgcacagagcaggggctaggtgtctcctgggaggcatgaagggggcaaggtccgtcctctgtgggcccaaacctatttgtaaccaaagagctgggagcagcacaaggacccagcctttgttctgcacttaataaatggttttgctactgct

SEQ ID NO: 294404 - protein, 1805 aa, Artificial Sequence
  derived and/or modified sequence
MAGPRPSPWARLLLAALISVSLSGTLANRCKKAPVKSCTECVRVDKDCAYCTDEMFRDRRCNTQAELLAAGCQRESIVVMESSFQITEETQIDTTLRRSQMSPQGLRVRLRPGEERHFELEVFEPLESPVDLYILMDFSNSMSDDLDNLKKMGQNLARVLSQLTSDYTIGFGKFVDKVSVPQTDMRPEKLKEPWPNSDPPFSFKNVISLTEDVDEFRNKLQGERISGNLDAPEGGFDAILQTAVCTRDIGWRPDSTHLLVFSTESAFHYEADGANVLAGIMSRNDERCHLDTTGTYTQYRTQDYPSVPTLVRLLAKHNIIPIFAVTNYSYSYYEKLHTYFPVSSLGVLQEDSSNIVELLEEAFNRIRSNLDIRALDSPRGLRTEVTSKMFQKTRTGSFHIRRGEVGIYQVQLRALEHVDGTHVCQLPEDQKGNIHLKPSFSDGLKMDAGIICDVCTCELQKEVRSARCSFNGDFVCGQCVCSEGWSGQTCNCSTGSLSDIQPCLREGEDKPCSGRGECQCGHCVCYGEGRYEGQFCEYDNFQCPRTSGFLCNDRGRCSMGQCVCEPGWTGPSCDCPLSNATCIDSNGGICNGRGHCECGRCHCHQQSLYTDTICEINYSAIHPGLCEDLRSCVQCQAWGTGEKKGRTCEECNFKVKMVDELKRAEEVVVRCSFRDEDDDCTYSYTMEGDGAPGPNSTVLVHKKKDCPPGSFWWLIPLLLLLLPLLALLLLLCWKYCACCKACLALLPCCNRGHMVGFKEDHYMLRENLMASDHLDTPMLRSGNLKGRDVVRWKVTNNMQRPGFATHAASINPTELVPYGLSLRLARLCTENLLKPDTRECAQLRQEVEENLNEVYRQISGVHKLQQTKFRQQPNAGKKQDHTIVDTVLMAPRSAKPALLKLTEKQVEQRAFHDLKVAPGYYTLTADQDARGMVEFQEGVELVDVRVPLFIRPEDDDEKQLLVEAIDVPAGTATLGRRLVNITIIKEQARDVVSFEQPEFSVSRGDQVARIPVIRRVLDGGKSQVSYRTQDGTAQGNRDYIPVEGELLFQPGEAWKELQVKLLELQEVDSLLRGRQVRRFHVQLSNPKFGAHLGQPHSTTIIIRDPDELDRSFTSQMLSSQPPPHGDLGAPQNPNAKAAGSRKIHFNWLPPSGKPMGYRVKYWIQGDSESEAHLLDSKVPSVELTNLYPYCDYEMKVCAYGAQGEGPYSSLVSCRTHQEVPSEPGRLAFNVVSSTVTQLSWAEPAETNGEITAYEVCYGLVNDDNRPIGPMKKVLVDNPKNRMLLIENLRESQPYRYTVKARNGAGWGPEREAIINLATQPKRPMSIPIIPDIPIVDAQSGEDYDSFLMYSDDVLRSPSGSQRPSVSDDTEHLVNGRMDFAFPGSTNSLHRMTTTSAAAYGTHLSPHVPHRVLSTSSTLTRDYNSLTRSEHSHSTTLPRDYSTLTSVSSHGLPPIWEHGRSRLPLSWALGSRSRAQMKGFPPSRGPRDSIILAGRPAAPSWGPDSRLTAGVPDTPTRLVFSALGPTSLRVSWQEPRCERPLQGYSVEYQLLNGGELHRLNIPNPAQTSVVVEDLLPNHSYVFRVRAQSQEGWGREREGVITIESQVHPQSPLCPLPGSAFTLSTPSAPGPLVFTALSPDSLQLSWERPRRPNGDIVGYLVTCEMAQGGGPATAFRVDGDSPESRLTVPGLSENVPYKFKVQARTTEGFGPEREGIITIESQDGGPFPQLGSRAGLFQHPLQSEYSSITTTHTSATEPFLVDGLTLGAQHLEAGGSLTRHVTQEFVSRTLTTSGTLSTHMDQQFFQT

SEQ ID NO: 294405 - DNA, 5867 bp, Artificial Sequence
  derived and/or modified sequence
gcgctgcccgcctcgtccccacccccccaacccccgcgcccgccctcggacagtccctgctcgcccgcgcgctgcagccccatctcctagcggcagcccaggcgcggagggagcgagtccgccccgaggtaggtccaggacgggcgcacagcagcagccgaggctggccgggagagggaggaagaggatggcagggccacgccccagcccatgggccaggctgctcctggcagccttgatcagcgtcagcctctctgggaccttggcaaaccgctgcaagaaggccccagtgaagagctgcacggagtgtgtccgtgtggataaggactgcgcctactgcacagacgagatgttcagggaccggcgctgcaacacccaggcggagctgctggccgcgggctgccagcgggagagcatcgtggtcatggagagcagcttccaaatcacagaggagacccagattgacaccaccctgcggcgcagccagatgtccccccaaggcctgcgggtccgtctgcggcccggtgaggagcggcattttgagctggaggtgtttgagccactggagagccccgtggacctgtacatcctcatggacttctccaactccatgtccgatgatctggacaacctcaagaagatggggcagaacctggctcgggtcctgagccagctcaccagcgactacactattggatttggcaagtttgtggacaaagtcagcgtcccgcagacggacatgaggcctgagaagctgaaggagccctggcccaacagtgacccccccttctccttcaagaacgtcatcagcctgacagaagatgtggatgagttccggaataaactgcagggagagcggatctcaggcaacctggatgctcctgagggcggcttcgatgccatcctgcagacagctgtgtgcacgagggacattggctggcgcccggacagcacccacctgctggtcttctccaccgagtcagccttccactatgaggctgatggcgccaacgtgctggctggcatcatgagccgcaacgatgaacggtgccacctggacaccacgggcacctacacccagtacaggacacaggactacccgtcggtgcccaccctggtgcgcctgctcgccaagcacaacatcatccccatctttgctgtcaccaactactcctatagctactacgagaagcttcacacctatttccctgtctcctcactgggggtgctgcaggaggactcgtccaacatcgtggagctgctggaggaggccttcaatcggatccgctccaacctggacatccgggccctagacagcccccgaggccttcggacagaggtcacctccaagatgttccagaagacgaggactgggtcctttcacatccggcggggggaagtgggtatataccaggtgcagctgcgggcccttgagcacgtggatgggacgcacgtgtgccagctgccggaggaccagaagggcaacatccatctgaaaccttccttctccgacggcctcaagatggacgcgggcatcatctgtgatgtgtgcacctgcgagctgcaaaaagaggtgcggtcagctcgctgcagcttcaacggagacttcgtgtgcggacagtgtgtgtgcagcgagggctggagtggccagacctgcaactgctccaccggctctctgagtgacattcagccctgcctgcgggagggcgaggacaagccgtgctccggccgtggggagtgccagtgcgggcactgtgtgtgctacggcgaaggccgctacgagggtcagttctgcgagtatgacaacttccagtgtccccgcacttccgggttcctctgcaatgaccgaggacgctgctccatgggccagtgtgtgtgtgagcctggttggacaggcccaagctgtgactgtcccctcagcaatgccacctgcatcgacagcaatgggggcatctgtaatggacgtggccactgtgagtgtggccgctgccactgccaccagcagtcgctctacacggacaccatctgcgagatcaactactcggcgatccacccgggcctctgcgaggacctacgctcctgcgtgcagtgccaggcgtggggcaccggcgagaagaaggggcgcacgtgtgaggaatgcaacttcaaggtcaagatggtggacgagcttaagagagccgaggaggtggtggtgcgctgctccttccgggacgaggatgacgactgcacctacagctacaccatggaaggtgacggcgcccctgggcccaacagcactgtcctggtgcacaagaagaaggactgccctccgggctccttctggtggctcatccccctgctcctcctcctcctgccgctcctggccctgctactgctgctatgctggaagtactgtgcctgctgcaaggcctgcctggcacttctcccgtgctgcaaccgaggtcacatggtgggctttaaggaagaccactacatgctgcgggagaacctgatggcctctgaccacttggacacgcccatgctgcgcagcgggaacctcaagggccgtgacgtggtccgctggaaggtcaccaacaacatgcagcggcctggctttgccactcatgccgccagcatcaaccccacagagctggtgccctacgggctgtccttgcgcctggcccgcctttgcaccgagaacctgctgaagcctgacactcgggagtgcgcccagctgcgccaggaggtggaggagaacctgaacgaggtctacaggcagatctccggtgtacacaagctccagcagaccaagttccggcagcagcccaatgccgggaaaaagcaagaccacaccattgtggacacagtgctgatggcgccccgctcggccaagccggccctgctgaagcttacagagaagcaggtggaacagagggccttccacgacctcaaggtggcccccggctactacaccctcactgcagaccaggacgcccggggcatggtggagttccaggagggcgtggagctggtggacgtacgggtgcccctctttatccggcctgaggatgacgacgagaagcagctgctggtggaggccatcgacgtgcccgcaggcactgccaccctcggccgccgcctggtaaacatcaccatcatcaaggagcaagccagagacgtggtgtcctttgagcagcctgagttctcggtcagccgcggggaccaggtggcccgcatccctgtcatccggcgtgtcctggacggcgggaagtcccaggtctcctaccgcacacaggatggcaccgcgcagggcaaccgggactacatccccgtggagggtgagctgctgttccagcctggggaggcctggaaagagctgcaggtgaagctcctggagctgcaagaagttgactccctcctgcggggccgccaggtccgccgtttccacgtccagctcagcaaccctaagtttggggcccacctgggccagccccactccaccaccatcatcatcagggacccagatgaactggaccggagcttcacgagtcagatgttgtcatcacagccaccccctcacggcgacctgggcgccccgcagaaccccaatgctaaggccgctgggtccaggaagatccatttcaactggctgcccccttctggcaagccaatggggtacagggtaaagtactggattcagggtgactccgaatccgaagcccacctgctcgacagcaaggtgccctcagtggagctcaccaacctgtacccgtattgcgactatgagatgaaggtgtgcgcctacggggctcagggcgagggaccctacagctccctggtgtcctgccgcacccaccaggaagtgcccagcgagccagggcgtctggccttcaatgtcgtctcctccacggtgacccagctgagctgggctgagccggctgagaccaacggtgagatcacagcctacgaggtctgctatggcctggtcaacgatgacaaccgacctattgggcccatgaagaaagtgctggttgacaaccctaagaaccggatgctgcttattgagaaccttcgggagtcccagccctaccgctacacggtgaaggcgcgcaacggggccggctgggggcctgagcgggaggccatcatcaacctggccacccagcccaagaggcccatgtccatccccatcatccctgacatccctatcgtggacgcccagagcggggaggactacgacagcttccttatgtacagcgatgacgttctacgctctccatcgggcagccagaggcccagcgtctccgatgacactgagcacctggtgaatggccggatggactttgccttcccgggcagcaccaactccctgcacaggatgaccacgaccagtgctgctgcctatggcacccacctgagcccacacgtgccccaccgcgtgctaagcacatcctccaccctcacacgggactacaactcactgacccgctcagaacactcacactcgaccacactgcccagggactactccaccctcacctccgtctcctcccacggcctccctcccatctgggaacacgggaggagcaggcttccgctgtcctgggccctggggtcccggagtcgggctcagatgaaagggttccccccttccaggggcccacgagactctataatcctggctgggaggccagcagcgccctcctggggcccagactctcgcctgactgctggtgtgcccgacacgcccacccgcctggtgttctctgccctggggcccacatctctcagagtgagctggcaggagccgcggtgcgagcggccgctgcagggctacagtgtggagtaccagctgctgaacggcggtgagctgcatcggctcaacatccccaaccctgcccagacctcggtggtggtggaagacctcctgcccaaccactcctacgtgttccgcgtgcgggcccagagccaggaaggctggggccgagagcgtgagggtgtcatcaccattgaatcccaggtgcacccgcagagcccactgtgtcccctgccaggctccgccttcactttgagcactcccagtgccccaggcccgctggtgttcactgccctgagcccagactcgctgcagctgagctgggagcggccacggaggcccaatggggatatcgtcggctacctggtgacctgtgagatggcccaaggaggagggccagccaccgcattccgggtggatggagacagccccgagagccggctgaccgtgccgggcctcagcgagaacgtgccctacaagttcaaggtgcaggccaggaccactgagggcttcgggccagagcgcgagggcatcatcaccatagagtcccaggatggaggacccttcccgcagctgggcagccgtgccgggctcttccagcacccgctgcaaagcgagtacagcagcatcaccaccacccacaccagcgccaccgagcccttcctagtggatgggctgaccctgggggcccagcacctggaggcaggcggctccctcacccggcatgtgacccaggagtttgtgagccggacactgaccaccagcggaacccttagcacccacatggaccaacagttcttccaaacttgaccgcaccctgccccacccccgccacgtcccactaggcgtcctcccgactcctctcccggagcctcctcagctactccatccttgcacccctgggggcccagcccacccgcatgcacagagcaggggctaggtgtctcctgggaggcatgaagggggcaaggtccgtcctctgtgggcccaaacctatttgtaaccaaagagctgggagcagcacaaggacccagcctttgttctgcacttaataaatggttttgctactgct

SEQ ID NO: 294406 - DNA, 5688 bp, Artificial Sequence
  derived and/or modified sequence
ggaagaggatggcagggccacgccccagcccatgggccaggctgctcctggcagccttgatcagcgtcagcctctctgggaccttggcaaaccgctgcaagaaggccccagtgaagagctgcacggagtgtgtccgtgtggataaggactgcgcctactgcacagacgagatgttcagggaccggcgctgcaacacccaggcggagctgctggccgcgggctgccagcgggagagcatcgtggtcatggagagcagcttccaaatcacagaggagacccagattgacaccaccctgcggcgcagccagatgtccccccaaggcctgcgggtccgtctgcggcccggtgaggagcggcattttgagctggaggtgtttgagccactggagagccccgtggacctgtacatcctcatggacttctccaactccatgtccgatgatctggacaacctcaagaagatggggcagaacctggctcgggtcctgagccagctcaccagcgactacactattggatttggcaagtttgtggacaaagtcagcgtcccgcagacggacatgaggcctgagaagctgaaggagccctggcccaacagtgacccccccttctccttcaagaacgtcatcagcctgacagaagatgtggatgagttccggaataaactgcagggagagcggatctcaggcaacctggatgctcctgagggcggcttcgatgccatcctgcagacagctgtgtgcacgagggacattggctggcgcccggacagcacccacctgctggtcttctccaccgagtcagccttccactatgaggctgatggcgccaacgtgctggctggcatcatgagccgcaacgatgaacggtgccacctggacaccacgggcacctacacccagtacaggacacaggactacccgtcggtgcccaccctggtgcgcctgctcgccaagcacaacatcatccccatctttgctgtcaccaactactcctatagctactacgagaagcttcacacctatttccctgtctcctcactgggggtgctgcaggaggactcgtccaacatcgtggagctgctggaggaggccttcaatcggatccgctccaacctggacatccgggccctagacagcccccgaggccttcggacagaggtcacctccaagatgttccagaagacgaggactgggtcctttcacatccggcggggggaagtgggtatataccaggtgcagctgcgggcccttgagcacgtggatgggacgcacgtgtgccagctgccggaggaccagaagggcaacatccatctgaaaccttccttctccgacggcctcaagatggacgcgggcatcatctgtgatgtgtgcacctgcgagctgcaaaaagaggtgcggtcagctcgctgcagcttcaacggagacttcgtgtgcggacagtgtgtgtgcagcgagggctggagtggccagacctgcaactgctccaccggctctctgagtgacattcagccctgcctgcgggagggcgaggacaagccgtgctccggccgtggggagtgccagtgcgggcactgtgtgtgctacggcgaaggccgctacgagggtcagttctgcgagtatgacaacttccagtgtccccgcacttccgggttcctctgcaatgaccgaggacgctgctccatgggccagtgtgtgtgtgagcctggttggacaggcccaagctgtgactgtcccctcagcaatgccacctgcatcgacagcaatgggggcatctgtaatggacgtggccactgtgagtgtggccgctgccactgccaccagcagtcgctctacacggacaccatctgcgagatcaactactcggcgatccacccgggcctctgcgaggacctacgctcctgcgtgcagtgccaggcgtggggcaccggcgagaagaaggggcgcacgtgtgaggaatgcaacttcaaggtcaagatggtggacgagcttaagagagccgaggaggtggtggtgcgctgctccttccgggacgaggatgacgactgcacctacagctacaccatggaaggtgacggcgcccctgggcccaacagcactgtcctggtgcacaagaagaaggactgccctccgggctccttctggtggctcatccccctgctcctcctcctcctgccgctcctggccctgctactgctgctatgctggaagtactgtgcctgctgcaaggcctgcctggcacttctcccgtgctgcaaccgaggtcacatggtgggctttaaggaagaccactacatgctgcgggagaacctgatggcctctgaccacttggacacgcccatgctgcgcagcgggaacctcaagggccgtgacgtggtccgctggaaggtcaccaacaacatgcagcggcctggctttgccactcatgccgccagcatcaaccccacagagctggtgccctacgggctgtccttgcgcctggcccgcctttgcaccgagaacctgctgaagcctgacactcgggagtgcgcccagctgcgccaggaggtggaggagaacctgaacgaggtctacaggcagatctccggtgtacacaagctccagcagaccaagttccggcagcagcccaatgccgggaaaaagcaagaccacaccattgtggacacagtgctgatggcgccccgctcggccaagccggccctgctgaagcttacagagaagcaggtggaacagagggccttccacgacctcaaggtggcccccggctactacaccctcactgcagaccaggacgcccggggcatggtggagttccaggagggcgtggagctggtggacgtacgggtgcccctctttatccggcctgaggatgacgacgagaagcagctgctggtggaggccatcgacgtgcccgcaggcactgccaccctcggccgccgcctggtaaacatcaccatcatcaaggagcaagccagagacgtggtgtcctttgagcagcctgagttctcggtcagccgcggggaccaggtggcccgcatccctgtcatccggcgtgtcctggacggcgggaagtcccaggtctcctaccgcacacaggatggcaccgcgcagggcaaccgggactacatccccgtggagggtgagctgctgttccagcctggggaggcctggaaagagctgcaggtgaagctcctggagctgcaagaagttgactccctcctgcggggccgccaggtccgccgtttccacgtccagctcagcaaccctaagtttggggcccacctgggccagccccactccaccaccatcatcatcagggacccagatgaactggaccggagcttcacgagtcagatgttgtcatcacagccaccccctcacggcgacctgggcgccccgcagaaccccaatgctaaggccgctgggtccaggaagatccatttcaactggctgcccccttctggcaagccaatggggtacagggtaaagtactggattcagggtgactccgaatccgaagcccacctgctcgacagcaaggtgccctcagtggagctcaccaacctgtacccgtattgcgactatgagatgaaggtgtgcgcctacggggctcagggcgagggaccctacagctccctggtgtcctgccgcacccaccaggaagtgcccagcgagccagggcgtctggccttcaatgtcgtctcctccacggtgacccagctgagctgggctgagccggctgagaccaacggtgagatcacagcctacgaggtctgctatggcctggtcaacgatgacaaccgacctattgggcccatgaagaaagtgctggttgacaaccctaagaaccggatgctgcttattgagaaccttcgggagtcccagccctaccgctacacggtgaaggcgcgcaacggggccggctgggggcctgagcgggaggccatcatcaacctggccacccagcccaagaggcccatgtccatccccatcatccctgacatccctatcgtggacgcccagagcggggaggactacgacagcttccttatgtacagcgatgacgttctacgctctccatcgggcagccagaggcccagcgtctccgatgacactgagcacctggtgaatggccggatggactttgccttcccgggcagcaccaactccctgcacaggatgaccacgaccagtgctgctgcctatggcacccacctgagcccacacgtgccccaccgcgtgctaagcacatcctccaccctcacacgggactacaactcactgacccgctcagaacactcacactcgaccacactgcccagggactactccaccctcacctccgtctcctcccacggcctccctcccatctgggaacacgggaggagcaggcttccgctgtcctgggccctggggtcccggagtcgggctcagatgaaagggttccccccttccaggggcccacgagactctataatcctggctgggaggccagcagcgccctcctggggcccagactctcgcctgactgctggtgtgcccgacacgcccacccgcctggtgttctctgccctggggcccacatctctcagagtgagctggcaggagccgcggtgcgagcggccgctgcagggctacagtgtggagtaccagctgctgaacggcggtgagctgcatcggctcaacatccccaaccctgcccagacctcggtggtggtggaagacctcctgcccaaccactcctacgtgttccgcgtgcgggcccagagccaggaaggctggggccgagagcgtgagggtgtcatcaccattgaatcccaggtgcacccgcagagcccactgtgtcccctgccaggctccgccttcactttgagcactcccagtgccccaggcccgctggtgttcactgccctgagcccagactcgctgcagctgagctgggagcggccacggaggcccaatggggatatcgtcggctacctggtgacctgtgagatggcccaaggaggagggccagccaccgcattccgggtggatggagacagccccgagagccggctgaccgtgccgggcctcagcgagaacgtgccctacaagttcaaggtgcaggccaggaccactgagggcttcgggccagagcgcgagggcatcatcaccatagagtcccaggatggaggacccttcccgcagctgggcagccgtgccgggctcttccagcacccgctgcaaagcgagtacagcagcatcaccaccacccacaccagcgccaccgagcccttcctagtggatgggctgaccctgggggcccagcacctggaggcaggcggctccctcacccggcatgtgacccaggagtttgtgagccggacactgaccaccagcggaacccttagcacccacatggaccaacagttcttccaaacttgaccgcaccctgccccacccccgccacgtcccactaggcgtcctcccgactcctctcccggagcctcctcagctactccatccttgcacccctgggggcccagcccacccgcatgcacagagcaggggctaggtgtctcctgggaggcatgaagggggcaaggtccgtcctctgtgggcccaaacctatttgtaaccaaagagctgggagcagcacaaggacccagcctttgttctgcacttaataaatggttttgctactgct

SEQ ID NO: 294407 - protein, 643 aa, Artificial Sequence
  derived and/or modified sequence
GGIEETQIDTTLRRSQMSPQGLRVRLRPGEERHFELEVFEPLESPVDLYILMDFSNSMSDDLDNLKKMGQNLARVLSQLTSDYTIGFGKFVDKVSVPQTDMRPEKLKEPWPNSDPPFSFKNVISLTEDVDEFRNKLQGERISGNLDAPEGGFDAILQTAVCTRDIGWRPDSTHLLVFSTESAFHYEADGANVLAGIMSRNDERCHLDTTGTYTQYRTQDYPSVPTLVRLLAKHNIIPIFAVTNYSYSYYEKLHTYFPVSSLGVLQEDSSNIVELLEEAFNRIRSNLDIRALDSPRGLRTEVTSKMFQKTRTGSFHIRRGEVGIYQVQLRALEHVDGTHVCQLPEDQKGNIHLKPSFSDGLKMDAGIICDVCTCELQKEVRSARCSFNGDFVCGQCVCSEGWSGQTCNCSTGSLSDIQPCLREGEDKPCSGRGECQCGHCVCYGEGRYEGQFCEYDNFQCPRTSGFLCNDRGRCSMGQCVCEPGWTGPSCDCPLSNATCIDSNGGICNGRGHCECGRCHCHQQSLYTDTICEINYSAIHPGLCEDLRSCVQCQAWGTGEKKGRTCEECNFKVKMVDELKRAEEVVVRCSFRDEDDDCTYSYTMEGDGAPGPNSTVLVHKKKDCPPGSFWWLIPLLLLLLPLLAL

SEQ ID NO: 294408 - protein, 745 aa, Artificial Sequence
  derived and/or modified sequence
MEVMNLMEQPIKVTEWQQTYTYDSGIHSGANTCVPSVSSKGIMEEDEACGRQYTLKKTTTYTQGVPPSQGDLEYQMSTTARAKRVREAMCPGVSGEDSSLLLATQVEGQATNLQRLAEPSQLLKSAIVHLINYQDDAELATRALPELTKLLNDEDPVVVTKAAMIVNQLSKKEASRRALMGSPQLVAAVVRTMQNTSDLDTARCTTSILHNLSHHREGLLAIFKSGGIPALVRMLSSPVESVLFYAITTLHNLLLYQEGAKMAVRLADGLQKMVPLLNKNNPKFLAITTDCLQLLAYGNQESKLIILANGGPQALVQIMRNYSYEKLLWTTSRVLKVLSVCPSNKPAIVEAGGMQALGKHLTSNSPRLVQNCLWTLRNLSDVATKQEGLESVLKILVNQLSVDDVNVLTCATGTLSNLTCNNSKNKTLVTQNSGVEALIHAILRAGDKDDITEPAVCALRHLTSRHPEAEMAQNSVRLNYGIPAIVKLLNQPNQWPLVKATIGLIRNLALCPANHAPLQEAAVIPRLVQLLVKAHQDAQRHVAAGTQQPYTDGVRMEEIVEGCTGALHILARDPMNRMEIFRLNTIPLFVQLLYSSVENIQRVAAGVLCELAQDKEAADAIDAEGASAPLMELLHSRNEGTATYAAAVLFRISEDKNPDYRKRVSVELTNSLFKHDPAAWEAAQSMIPINEPYGDDMDATYRPMYSSDVPLDPLEMHMDMDGDYPIDTYSDGLRPPYPTADHMLA

SEQ ID NO: 294409 - protein, 277 aa, Artificial Sequence
  derived and/or modified sequence
MEVMNLMEQPIKVTEWQQTYTYDSGIHSGANTCVPSVSSKGIMEEDEACGRQYTLKKTTTYTQGVPPSQGDLEYQMSTTARAKRVREAMCPGVSGEDSSLLLATQVEGQATNLQRLAEPSQLLKSAIVHLINYQDDAELATRALPELTKLLNDEDPVVVTKAAMIVNQLSKKEASRRALMGSPQLVAAVVRTMQNTSDLDTARCTTSILHNLSHHREGLLAIFKSGGIPALVRMLSSPVESVLFYAITTLHNLLLYQEGAKMAVRLADGLQKMVPLL

SEQ ID NO: 294410 - protein, 235 aa, Artificial Sequence
  derived and/or modified sequence
MEVMNLMEQPIKVTEWQQTYTYDSGIHSGANTCVPSVSSKGIMEEDEACGRQYTLKKTTTYTQGVPPSQGDLEYQMSTTARAKRVREAMCPGVSGEDSSLLLATQVEGQATNLQRLAEPSQLLKSAIVHLINYQDDAELATRALPELTKLLNDEDPVVVTKAAMIVNQLSKKEASRRALMGSPQLVAAVVRTMQNTSDLDTARCTTSILHNLSHHREGLLAIFKSGGIPALVRML

SEQ ID NO: 294411 - protein, 296 aa, Artificial Sequence
  derived and/or modified sequence
MEVMNLMEQPIKVTEWQQTYTYDSGIHSGANTCVPSVSSKGIMEEDEACGRQYTLKKTTTYTQGVPPSQGDLEYQMSTTARAKRVREAMCPGVSGEDSSLLLATQVEGQATNLQRLAEPSQLLKSAIVHLINYQDDAELATRALPELTKLLNDEDPVVVTKAAMIVNQLSKKEASRRALMGSPQLVAAVVRTMQNTSDLDTARCTTSILHNLSHHREGLLAIFKSGGIPALVRMLSSPVESVLFYAITTLHNLLLYQEGAKMAVRLADGLQKMVPLLNKNNPKFLAITTDCLQLLA

SEQ ID NO: 294412 - protein, 86 aa, Artificial Sequence
  derived and/or modified sequence
MEVMNLMEQPIKVTEWQQTYTYDSGIHSGANTCVPSVSSKGIMEEDEACGRQYTLKKTTTYTQGVPPSQGDLEYQMSTTARAKRVR

SEQ ID NO: 294413 - protein, 298 aa, Artificial Sequence
  derived and/or modified sequence
MEVMNLMEQPIKVTEWQQTYTYDSGIHSGANTCVPSVSSKGIMEEDEACGRQYTLKKTTTYTQGVPPSQGDLEYQMSTTARAKRVREAMCPGVSGEDSSLLLATQVEGQATNLQRLAEPSQLLKSAIVHLINYQDDAELATRALPELTKLLNDEDPVVVTKAAMIVNQLSKKEASRRALMGSPQLVAAVVRTMQNTSDLDTARCTTSILHNLSHHREGLLAIFKSGGIPALVRMLSSPVESVLFYAITTLHNLLLYQEGAKMAVRLADGLQKMVPLLNKNNPKFLAITTDCLQLLAYG

SEQ ID NO: 294414 - protein, 591 aa, Artificial Sequence
  derived and/or modified sequence
MEVMNLMEQPIKVTEWQQTYTYDSGIHSGANTCVPSVSSKGIMEEDEACGRQYTLKKTTTYTQGVPPSQGDLEYQMSTTARAKRVREAMCPGVSGEDSSLLLATQVEGQATNLQRLAEPSQLLKSAIVHLINYQDDAELATRALPELTKLLNDEDPVVVTKAAMIVNQLSKKEASRRALMGSPQLVAAVVRTMQNTSDLDTARCTTSILHNLSHHREGLLAIFKSGGIPALVRMLSSPVESVLFYAITTLHNLLLYQEGAKMAVRLADGLQKMVPLLNKNNPKFLAITTDCLQLLAYGNQESKILTATVDNANILLQIDNARLAADDFRTKFETEQALRLSVEADINGLRRVLDELTLARADLEMQIENLKEELAYLKKNHEEEMNALRGQVGGEINVEMDAAPGVDLSRILNEMRDQYEKMAEKNRKDAEDWFFSKTEELNREVATNSELVQSGKSEISELRRTMQALEIELQSQLSMKASLEGNLAETENRYCVQLSQIQGLIGSVEEQLAQLRCEMEQQNQEYKILLDVKTRLEQEIATYRRLLEGEDAHLTQYKKEPVTTRQVRTIVEEVQDGKVISSREQVHQTTR

SEQ ID NO: 294415 - DNA, 2238 bp, Artificial Sequence
  derived and/or modified sequence
atggaggtgatgaacctgatggagcagcccatcaaggtgaccgagtggcagcagacctacacctacgacagcggcatccacagcggcgccaacacctgcgtgcccagcgtgagcagcaagggcatcatggaggaggacgaggcctgcggcagacagtacaccctgaagaagaccaccacctacacccagggcgtgccccccagccagggcgacctggagtaccagatgagcaccaccgccagagccaagagagtgagagaggccatgtgccccggcgtgagcggcgaggacagcagcctgctgctggccacccaggtggagggccaggccaccaacctgcagagactggccgagcccagccagctgctgaagagcgccatcgtgcacctgatcaactaccaggacgacgccgagctggccaccagagccctgcccgagctgaccaagctgctgaacgacgaggaccccgtggtggtgaccaaggccgccatgatcgtgaaccagctgagcaagaaggaggccagcagaagagccctgatgggcagcccccagctggtggccgccgtggtgagaaccatgcagaacaccagcgacctggacaccgccagatgcaccaccagcatcctgcacaacctgagccaccacagagagggcctgctggccatcttcaagagcggcggcatccccgccctggtgagaatgctgagcagccccgtggagagcgtgctgttctacgccatcaccaccctgcacaacctgctgctgtaccaggagggcgccaagatggccgtgagactggccgacggcctgcagaagatggtgcccctgctgaacaagaacaaccccaagttcctggccatcaccaccgactgcctgcagctgctggcctacggcaaccaggagagcaagctgatcatcctggccaacggcggcccccaggccctggtgcagatcatgagaaactacagctacgagaagctgctgtggaccaccagcagagtgctgaaggtgctgagcgtgtgccccagcaacaagcccgccatcgtggaggccggcggcatgcaggccctgggcaagcacctgaccagcaacagccccagactggtgcagaactgcctgtggaccctgagaaacctgagcgacgtggccaccaagcaggagggcctggagagcgtgctgaagatcctggtgaaccagctgagcgtggacgacgtgaacgtgctgacctgcgccaccggcaccctgagcaacctgacctgcaacaacagcaagaacaagaccctggtgacccagaacagcggcgtggaggccctgatccacgccatcctgagagccggcgacaaggacgacatcaccgagcccgccgtgtgcgccctgagacacctgaccagcagacaccccgaggccgagatggcccagaacagcgtgagactgaactacggcatccccgccatcgtgaagctgctgaaccagcccaaccagtggcccctggtgaaggccaccatcggcctgatcagaaacctggccctgtgccccgccaaccacgcccccctgcaggaggccgccgtgatccccagactggtgcagctgctggtgaaggcccaccaggacgcccagagacacgtggccgccggcacccagcagccctacaccgacggcgtgagaatggaggagatcgtggagggctgcaccggcgccctgcacatcctggccagagaccccatgaacagaatggagatcttcagactgaacaccatccccctgttcgtgcagctgctgtacagcagcgtggagaacatccagagagtggccgccggcgtgctgtgcgagctggcccaggacaaggaggccgccgacgccatcgacgccgagggcgccagcgcccccctgatggagctgctgcacagcagaaacgagggcaccgccacctacgccgccgccgtgctgttcagaatcagcgaggacaagaaccccgactacagaaagagagtgagcgtggagctgaccaacagcctgttcaagcacgaccccgccgcctgggaggccgcccagagcatgatccccatcaacgagccctacggcgacgacatggacgccacctacagacccatgtacagcagcgacgtgcccctggaccccctggagatgcacatggacatggacggcgactaccccatcgacacctacagcgacggcctgagacccccctaccccaccgccgaccacatgctggcctag

SEQ ID NO: 294416 - DNA, 2238 bp, Artificial Sequence
  derived and/or modified sequence
atggaagttatgaatctgatggagcaacctattaaagtcaccgagtggcaacagacttacacatatgactcaggtatacatagtggggccaacacatgtgtacccagcgtctctagtaaggggattatggaagaggacgaggcatgcggacgccaatacacactgaagaagactactacttacacacagggcgttcctccatcacagggggacctggagtatcaaatgtccactactgcgagagctaaaagggtgcgggaagctatgtgtcctggcgtcagcggcgaggacagtagtttactgcttgccacacaggtcgaagggcaggcaactaatcttcagcgccttgccgagccctcccagctcctgaagtccgcaatcgtccacctgatcaactatcaagacgacgccgagctggctacccgggccctgcctgagctcaccaagctgctgaatgacgaagatccggtggtggtcacaaaggctgcgatgattgtaaatcagctctcaaaaaaagaggcaagccggagagcactgatgggatccccacagctggttgccgccgtggtgcgcaccatgcagaacacaagcgatctggacacagcccggtgtacgacttcaatactgcataacttgtctcatcacagagaggggctgcttgctattttcaagtccgggggcattcctgccttggttaggatgctctcatcccccgtggagtctgtgctgttctacgccataacaaccctgcataacttgttattgtatcaggagggcgcaaagatggccgttaggctcgctgacggacttcagaagatggtgcctcttctgaataaaaataatcctaaatttcttgcaattacaaccgactgccttcagcttctcgcctacgggaatcaggagagtaaattgataatccttgctaatggggggccccaggcgctggtgcagataatgcgcaattattcatacgagaaactcctgtggactacctcaagggttctgaaagttttatctgtttgtccaagcaataagccagcgatagtcgaagctggaggtatgcaggcactgggaaagcatctgacgtctaactctccacgcctcgtgcagaactgtctgtggacactccgcaatctgagtgatgtggccacaaaacaggaaggcctggaaagtgtgctgaagatcttagtcaatcaactgtctgtggacgatgttaatgtccttacttgtgcaacaggcacactgagcaacctgacttgtaacaatagtaaaaacaagacactggtgacacaaaattctggagtcgaagctttaatccacgccatcctccgcgcaggggacaaagatgacatcaccgagcccgccgtgtgcgctctcagacacttgacctcacgacatccggaagccgaaatggctcagaattcagtgcgactgaattatggaattcctgctattgtaaagctgctcaatcagccaaaccagtggcccttagtcaaggctacaattggcttgatccgcaatttggcactgtgccctgctaatcatgctcccctccaggaggccgccgtcattcctaggctggtgcaactcttagtgaaagcccaccaagatgcccaacggcacgtagccgctggtactcagcaaccttatactgacggcgttcgcatggaggaaatcgtggagggttgcacaggagccttgcatattctggctcgtgatccaatgaataggatggagatattccgactcaacacgataccgcttttcgttcagctgctgtacagctccgtcgaaaacatccagagggtggccgccggagtgctgtgcgaacttgcacaagacaaggaagcagccgacgctattgatgcagagggagccagtgcgccgctcatggagctgttgcattctcggaacgagggaacggccacgtatgcagctgccgtcctgttcagaatttccgaagataagaatccagattacagaaaaagggtgtctgttgagctgacgaactctctttttaagcacgatccagctgcttgggaggcagcacaaagtatgattcctatcaatgagccctacggtgacgatatggacgccacctacaggcccatgtactcctcagatgtaccacttgatccactggaaatgcacatggacatggatggggactatcccatcgacacctattctgacggtctgcgtccaccatacccaactgcagaccacatgttggcttag

SEQ ID NO: 294417 - DNA, 2238 bp, Artificial Sequence
  derived and/or modified sequence
atggaggtgatgaaccttatggagcagcccatcaaggtgacagagtggcagcagacttacacctatgattcagggatacacagcggcgctaacacgtgtgtgccatcagtgtctagcaagggtatcatggaggaggatgaggcatgcggccgccagtatactctcaaaaagaccactacctatacacagggcgtgccaccatcgcagggcgatcttgagtatcagatgagcaccacagctagggccaagcgagttagggaagctatgtgtcctggcgtctctggagaggatagcagcttgttgcttgccacgcaggtcgaaggtcaggccacaaacctacagcgactggccgaaccctcacagcttctgaagtctgccatcgtccatctgattaactaccaggatgacgctgaattagctacaagggcactccccgagctaacaaagctgctgaacgatgaggatccagttgtggtcacaaaggccgccatgatcgtgaaccagcttagcaagaaggaggcaagtagaagagctctgatgggatccccccagctcgttgccgcagtggtgaggaccatgcaaaatacgtctgatctggataccgcccgttgcactacctcgattctccacaatttgtcacaccaccgtgaaggccttctggccattttcaaaagtggcgggatccccgccttggtccgaatgctcagttcacctgtcgagtcagtacttttctacgctattactaccttacacaacctcctgctctaccaagaaggtgccaaaatggcggtgcgcctggctgacgggctccagaagatggtgccacttctgaataagaataacccaaagtttctagctatcaccacagactgccttcagctgcttgcttatggcaaccaagagtctaagttgattattctggccaacggtgggcctcaagcactcgtccaaatcatgcgcaactatagttacgaaaaactactgtggacaactagtagagtgctgaaagtactgtcagtgtgtccatcgaacaagcctgccatagttgaagctggggggatgcaggcactggggaagcacctgacatctaactccccacggttggttcagaactgtctttggacactgcgaaacctgtcagatgtggccacaaaacaagaggggcttgagtccgtgttaaagattctggtgaatcagttatcagtggacgatgtgaatgtactgacatgcgctaccggcacattgtctaacttgacctgcaacaatagcaagaataaaactttagtcacccagaactctggggttgaagcattaatccacgccatactgagggccggggataaagatgatattaccgaaccagccgtgtgcgctcttaggcacctgacttcgcggcatcctgaggcagagatggctcagaatagtgtccggctgaactacgggattcccgcaattgttaaactgctgaatcaaccaaaccagtggcccctggttaaggccaccataggactgattcgtaacctggccctgtgccccgctaatcacgcaccgctgcaagaagcagcggtgatacctcggctcgtgcagctactggtgaaggcacaccaagatgcccaaaggcatgtggcagctggcacccagcagccttatacagacggagtccgaatggaggagattgttgaaggctgtaccggcgccctccacatcttagcccgcgaccctatgaatcgcatggaaatttttcgcctaaatacaatcccactatttgttcagctgctgtacagctcagtggaaaacatacagcgtgtggcagcaggcgtgctgtgtgaactcgcccaagacaaagaagccgccgacgcaatcgacgccgaaggtgcatcggcacctctcatggaactgctccatagccgtaacgaagggacagccacgtatgcagccgccgtcctcttccgcatcagcgaagacaaaaatcccgactaccgaaaaagggtatctgttgagctgacaaatagtctctttaaacacgaccccgccgcttgggaagcggcccaaagcatgataccgattaacgagccttacggtgacgacatggacgccacctacagacccatgtactcatcagacgtgcctctcgaccccctggagatgcatatggacatggacggtgactatccaatagacacttatagcgacgggcttcgccctccctaccctacagcagatcatatgcttgcttag

SEQ ID NO: 294418 - DNA, 2238 bp, Artificial Sequence
  derived and/or modified sequence
atggaggtgatgaacctgatggagcagcccatcaaggtgacagagtggcagcagacctacacctatgacagcggcatccacagcggggccaacacctgtgtgcccagcgtgagcagcaagggcatcatggaggaggatgaggcctgtggccggcagtacaccctgaagaagaccaccacctacacccagggcgtgccccccagccagggcgacctggagtaccagatgagcaccacagcccgggccaagagggtgcgggaggccatgtgccctggggtgtctggagaggacagcagcctgctgctggccacccaggtggagggccaggccaccaacctgcagaggctggccgagcccagccagctgctgaagagcgccatcgtgcacctgatcaactaccaggatgatgctgagctggccacccgggccctgcctgagctgaccaagctgctgaatgatgaggaccctgtggtggtgaccaaggccgccatgattgtgaaccagctgagcaagaaggaggccagccggcgggccctgatgggcagcccccagctggtggccgctgtggtgaggaccatgcagaacaccagtgacctggacacagcccgctgcaccaccagcatcctgcacaacctgagccaccaccgggagggcctgctggccatcttcaagagcggcggcatcccagccctggtgaggatgctgagcagccctgtggagagcgtgctcttctacgccatcaccaccctgcacaacctgctgctgtaccaggagggcgccaagatggctgtgcggctggctgatggcctgcagaagatggtgcccctgctgaacaagaacaaccccaagttcctggccatcaccacagactgcctgcagctgctggcctacggcaaccaggagagcaagctgatcatcctggccaatggaggcccccaggccctggtgcagatcatgaggaactacagctatgagaagctgctgtggaccaccagccgggtgctgaaggtgctgtctgtgtgccccagcaacaagccagccatcgtggaggccggcggcatgcaggccctgggcaagcacctgaccagcaacagcccccggctggtgcagaactgcctgtggaccctgaggaacctgagtgatgtggccaccaagcaggagggcctggagagcgtgctgaagatcctggtgaaccagctgtctgtggatgatgtgaatgtgctgacctgtgccaccggcaccctgagcaacctgacctgcaacaacagcaagaacaagaccctggtgacccagaacagcggcgtggaggccctgatccacgccatcctgcgggccggggacaaggatgacatcacagagcctgctgtgtgtgccctgcggcacctgaccagccgccaccctgaggccgagatggcccagaacagcgtgcggctgaactacggcatcccagccatcgtgaagctgctgaaccagcccaaccagtggcccctggtgaaggccaccatcggcctcatccggaacctggccctgtgcccagccaaccacgcccccctgcaggaggccgccgtcatcccccggctggtgcagctgctggtgaaggcccaccaggatgcccagagacatgtggccgccggcacccagcagccctacacagatggagtgaggatggaggagatcgtggagggctgcaccggggccctgcacatcctggcccgggaccccatgaacaggatggagatcttccggctgaacaccatccccctgtttgtgcagctgctgtacagctctgtggagaacatccagagggtggccgccggcgtgctgtgtgagctggcccaggacaaggaggccgcagatgccattgatgctgagggcgccagcgcccccctgatggagctgctgcacagcagaaatgaaggaacagccacctatgctgctgctgtgctcttccgcatcagcgaggacaagaacccagactacaggaagagggtgtctgtggagctgaccaacagcctcttcaagcatgaccctgctgcctgggaggccgcccagagcatgatccccatcaatgagccctatggagatgacatggatgccacctaccggcccatgtacagcagtgatgtgcccctggaccccctggagatgcacatggacatggatggagactaccccatcgacacctacagtgatggcctgcggcccccctaccccacagctgaccacatgctggcctag

SEQ ID NO: 294419 - DNA, 3200 bp, Artificial Sequence
  derived and/or modified sequence
ggccagagtccggagcagccgccgcccgaccacgccgagctcagttcgctgtccgcgccggctcccaccccggcccgaccccgacccggcccggtcaggccccatactcagtagccacgatggaggtgatgaacctgatggagcagcctatcaaggtgactgagtggcagcagacatacacctacgactcgggtatccactcgggcgccaacacctgcgtgccctccgtcagcagcaagggcatcatggaggaggatgaggcctgcgggcgccagtacacgctcaagaaaaccaccacttacacccagggggtgccccccagccaaggtgatctggagtaccagatgtccacaacagccagggccaaacgggtgcgggaggccatgtgccctggtgtgtcaggcgaggacagctcgcttctgctggccacccaggtggaggggcaggccaccaacctgcagcgactggccgagccgtcccagctgctcaagtcggccattgtgcatctcatcaactaccaggacgatgccgagctggccactcgcgccctgcccgagctcaccaaactgctcaacgacgaggacccggtggtggtgaccaaggcggccatgattgtgaaccagctgtcgaagaaggaggcgtcgcggcgggccctgatgggctcgccccagctggtggccgctgtcgtgcgtaccatgcagaataccagcgacctggacacagcccgctgcaccaccagcatcctgcacaacctctcccaccaccgggaggggctgctcgccatcttcaagtcgggtggcatccctgctctggtccgcatgctcagctcccctgtggagtcggtcctgttctatgccatcaccacgctgcacaacctgctcctgtaccaggagggcgccaagatggccgtgcgcctggccgacgggctgcaaaagatggtgcccctgctcaacaagaacaaccccaagttcctggccatcaccaccgactgcctgcagctcctggcctacggcaaccaggagagcaagctgatcatcctggccaatggtgggccccaggccctcgtgcagatcatgcgtaactacagttatgaaaagctgctctggaccaccagtcgtgtgctcaaggtgctatccgtgtgtcccagcaataagcctgccattgtggaggctggtgggatgcaggccctgggcaagcacctgaccagcaacagcccccgcctggtgcagaactgcctgtggaccctgcgcaacctctcagatgtggccaccaagcaggagggcctggagagtgtgctgaagattctggtgaatcagctgagtgtggatgacgtcaacgtcctcacctgtgccacgggcacactctccaacctgacatgcaacaacagcaagaacaagacgctggtgacacagaacagcggtgtggaggctctcatccatgccatcctgcgtgctggtgacaaggacgacatcacggagcctgccgtctgcgctctgcgccacctcactagccgccaccctgaggccgagatggcccagaactctgtgcgtctcaactatggcatcccagccatcgtgaagctgctcaaccagcccaaccagtggccactggtcaaggcaaccatcggcttgatcaggaatctggccctgtgcccagccaaccatgccccgctgcaggaggcagcggtcatcccccgcctcgtccaactgctggtgaaggcccaccaggatgcccagcgccacgtagctgcaggcacacagcagccctacacggatggtgtgaggatggaggagattgtggagggctgcaccggagcactgcacatcctcgcccgggaccccatgaaccgcatggagatcttccggctcaacaccattcccctgtttgtgcagctcctgtactcgtcggtggagaacatccagcgcgtggctgccggggtgctgtgtgagctggcccaggacaaggaggcggccgacgccattgatgcagagggggcctcggccccactcatggagttgctgcactcccgcaacgagggcactgccacctacgctgctgccgtcctgttccgcatctccgaggacaagaacccagactaccggaagcgcgtgtccgtggagctcaccaactccctcttcaagcatgacccggctgcctgggaggctgcccagagcatgattcccatcaatgagccctatggagatgacatggatgccacctaccgccccatgtactccagcgatgtgccccttgacccgctggagatgcacatggacatggatggagactaccccatcgacacctacagcgacggcctcaggcccccgtaccccactgcagaccacatgctggcctaggcggcctggccccagtgcggttcctcatctgagaggctctccgtgcaggcgatggggcaagacagaaaagtgcctgagctggggaagccggggtgtaacttcctgctgcaccctgcgcctccagaggtcctccgtagggtctttcttgggatagtgttctgctcctgcttttctgtcctgggcatgggtccagggcctgacaccccctccccgcccctgtggccctggccactaaagcttcagactcaagtacccattctgttttcccccagcaacgcccctccaaacctccagcctccctgtctccagctgcctgggcccggaagggctttggttccttctctgggtctgattttctcactgaactccaccgaccaactgccctaagcccccagggcctccagggcccaggttcgagacccaaacccccaaaatccaaaacttctcttgaaaagttcagggaccgtccaggggagatggggaggagatatggagtgagtcacctgctccagaagatgccagcttctctctccagggtgcttagttggctttgcccacccctcactccccagggagctctggggacagcttcctcacacccctgtcccacccacacagctgccctagctgaccccgagaagtgctcttggctgacccctctggtgtgtggtgaggggctttctcttccccttcctgtttcagacccccccatttcccgcacatggtgtggggggctgggggaggtccaagcagagtgttttattattatcgctttatgtttttggttattggtttttttgtatagaccaaagcaaagaaaataaaaataacacagatgcgttg

SEQ ID NO: 294420 - DNA, 3497 bp, Artificial Sequence
  derived and/or modified sequence
ggccagagtccggagcagccgccgcccgaccacgccgagctcagttcgctgtccgcgccggctcccaccccggcccgaccccgacccggcccggtcaggccccatactcagtagccacgatggaggtgatgaacctgatggagcagcctatcaaggtgactgagtggcagcagacatacacctacgactcgggtatccactcgggcgccaacacctgcgtgccctccgtcagcagcaagggcatcatggaggaggatgaggcctgcgggcgccagtacacgctcaagaaaaccaccacttacacccagggggtgccccccagccaaggtgatctggagtaccagatgtccacaacagccagggccaaacgggtgcgggaggccatgtgccctggtgtgtcaggcgaggacagctcgcttctgctggccacccaggtggaggggcaggccaccaacctgcagcgactggccgagccgtcccagctgctcaagtcggccattgtgcatctcatcaactaccaggacgatgccgagctggccactcgcgccctgcccgagctcaccaaactgctcaacgacgaggacccggtggtggtgaccaaggcggccatgattgtgaaccagctgtcgaagaaggaggcgtcgcggcgggccctgatgggctcgccccagctggtggccgctgtcgtgcgtaccatgcagaataccagcgacctggacacagcccgctgcaccaccagcatcctgcacaacctctcccaccaccgggaggggctgctcgccatcttcaagtcgggtggcatccctgctctggtccgcatgctcagctcccctgtggagtcggtcctgttctatgccatcaccacgctgcacaacctgctcctgtaccaggagggcgccaagatggccgtgcgcctggccgacgggctgcaaaagatggtgcccctgctcaacaagaacaaccccaagttcctggccatcaccaccgactgcctgcagctcctggcctacggcaaccaggagagcaagctgatcatcctggccaatggtgggccccaggccctcgtgcagatcatgcgtaactacagttatgaaaagctgctctggaccaccagtcgtgtgctcaaggtgctatccgtgtgtcccagcaataagcctgccattgtggaggctggtgggatgcaggccctgggcaagcacctgaccagcaacagcccccgcctggtgcagaactgcctgtggaccctgcgcaacctctcagatgtggccaccaagcaggagggcctggagagtgtgctgaagattctggtgaatcagctgagtgtggatgacgtcaacgtcctcacctgtgccacgggcacactctccaacctgacatgcaacaacagcaagaacaagacgctggtgacacagaacagcggtgtggaggctctcatccatgccatcctgcgtgctggtgacaaggacgacatcacggagcctgccgtctgcgctctgcgccacctcactagccgccaccctgaggccgagatggcccagaactctgtgcgtctcaactatggcatcccagccatcgtgaagctgctcaaccagcccaaccagtggccactggtcaaggcaaccatcggcttgatcaggaatctggccctgtgcccagccaaccatgccccgctgcaggaggcagcggtcatcccccgcctcgtccaactgctggtgaaggcccaccaggatgcccagcgccacgtagctgcaggcacacagcagccctacacggatggtgtgaggatggaggagattgtggagggctgcaccggagcactgcacatcctcgcccgggaccccatgaaccgcatggagatcttccggctcaacaccattcccctgtttgtgcagctcctgtactcgtcggtggagaacatccagcgcgtggctgccggggtgctgtgtgagctggcccaggacaaggaggcggccgacgccattgatgcagagggggcctcggccccactcatggagttgctgcactcccgcaacgagggcactgccacctacgctgctgccgtcctgttccgcatctccgaggacaagaacccagactaccggaagcgcgtgtccgtggagctcaccaactccctcttcaagcatgacccggctgcctgggaggctgcccagagcatgattcccatcaatgagccctatggagatgacatggatgccacctaccgccccatgtactccagcgatgtgccccttgacccgctggagatgcacatggacatggatggagactaccccatcgacacctacagcgacggcctcaggcccccgtaccccactgcagaccacatgctggcctaggcggcctggccccagtacggccccctctttgcaggcttttcctcctctctagaacctccttctgttggaggccctcccatctccccgctgaaacctgcgctccttttttggggggatcctttgctgctgagcttccccaagcacggtgtgccctggcctgccttcttcttgtgtctttggtggggatggggaggcctattcctgctggccccttctgggggtggtgggcaggtgacacggagtggcttgagcttctggggatgcaggtccaccgagcccctgacccctgtctgtccccgctcccctaacaggtgcggttcctcatctgagaggctctccgtgcaggcgatggggcaagacagaaaagtgcctgagctggggaagccggggtgtaacttcctgctgcaccctgcgcctccagaggtcctccgtagggtctttcttgggatagtgttctgctcctgcttttctgtcctgggcatgggtccagggcctgacaccccctccccgcccctgtggccctggccactaaagcttcagactcaagtacccattctgttttcccccagcaacgcccctccaaacctccagcctccctgtctccagctgcctgggcccggaagggctttggttccttctctgggtctgattttctcactgaactccaccgaccaactgccctaagcccccagggcctccagggcccaggttcgagacccaaacccccaaaatccaaaacttctcttgaaaagttcagggaccgtccaggggagatggggaggagatatggagtgagtcacctgctccagaagatgccagcttctctctccagggtgcttagttggctttgcccacccctcactccccagggagctctggggacagcttcctcacacccctgtcccacccacacagctgccctagctgaccccgagaagtgctcttggctgacccctctggtgtgtggtgaggggctttctcttccccttcctgtttcagacccccccatttcccgcacatggtgtggggggctgggggaggtccaagcagagtgttttattattatcgctttatgtttttggttattggtttttttgtatagaccaaagcaaagaaaataaaaataacacagatgcgttg

SEQ ID NO: 294421 - DNA, 2238 bp, Artificial Sequence
  derived and/or modified sequence
atggaggtgatgaacctgatggagcagcccatcaaggtgaccgagtggcaacagacttacacgtatgactccggcatccacagcggagcaaacacatgcgtgccatctgtgagctccaaaggcatcatggaggaagacgaggcgtgcggacgacaatatacccttaagaaaaccaccacctatacgcagggggtgcctccatctcagggtgatttagagtatcagatgtccaccaccgcacgggcaaagcgtgtccgcgaggcaatgtgtcctggcgtgagcggtgaagactcgagcctgcttcttgccacccaggtggaaggtcaggcaaccaatctgcagcgcctggccgaacccagccagctactcaagtcagctatcgttcatctcatcaattatcaggacgacgcagaactcgcaacaagagccctccctgaactaaccaaacttctgaacgatgaggaccccgtagttgtaacaaaagccgccatgattgtgaatcaactgtctaagaaagaggcgagcagaagagcgttgatggggtctcctcagttagtcgctgcggttgtccgcactatgcagaatacctctgacttggacacagcccgctgtaccacttcgattcttcataatctcagtcatcatcgagaaggcctcctcgcgattttcaaaagcggcgggatacctgcccttgttcgtatgctctcaagccctgtggagagcgtcttgttctacgctatcacaacccttcacaatctgttactctatcaggagggtgcaaagatggcggttcgccttgccgatggtctgcaaaaaatggtgccattactgaacaaaaacaatcccaaattcctggctattaccaccgattgcctgcagcttcttgcctatggtaatcaggagtcgaagctgattattttagctaacggcgggccccaggcactggtgcagataatgcgaaactactcttacgagaagctcctctggaccacttcccgcgtactcaaggtgttaagtgtatgtccctctaataagcctgcaattgtggaagctggcggtatgcaagccctaggtaagcatttgacaagtaattcgcctcggttggtccagaattgtctgtggactctgcgtaatttaagtgacgtggcaaccaagcaggaaggactggaatccgtattaaagattttagtgaatcagctctcggtggacgatgtaaacgtccttacttgcgctactggaaccctgagcaatttgacgtgtaataattcaaaaaataagaccctggtaacccagaattccggggtcgaggctctaattcacgccatcctgcgtgcaggcgataaagatgacatcacggagcctgcagtgtgcgccctgagacacctaaccagcaggcatccagaagccgagatggcacagaacagtgttcgtctgaattatggcatccccgcaatcgtgaaactactgaaccaacccaatcagtggcctctggtgaaggctacgatcggccttattaggaaccttgctctgtgtcctgccaaccacgcaccattgcaggaggccgccgtaattccaaggttggtccagctgttggtcaaagctcaccaggacgctcagaggcacgtcgcagctggcacccagcagccttatactgatggggttcgaatggaggaaatcgtggagggttgtaccggtgccctacatatcctcgcccgcgatcctatgaatagaatggaaattttccggctgaacaccatccccttgtttgtgcagctgctatactcatctgttgaaaatatccagagggttgcagctggggttttgtgtgaattggcccaagataaagaagctgcagatgccattgatgcggagggggccagcgcacctctgatggagctccttcacagccgcaatgaaggtacggccacatacgctgctgctgtgctgtttagaattagcgaggacaaaaatcctgactatcgcaaaagagtttccgtcgaacttacaaattccctatttaagcatgaccctgccgcatgggaggcagcacagtcaatgattcctataaacgagccctacggggacgacatggatgctacctaccggcctatgtattctagtgacgttcccctggatcccttggaaatgcacatggacatggatggggactaccccatcgacacttactcagatggtctgcggccaccgtacccaaccgctgatcatatgctggcttag

SEQ ID NO: 294422 - DNA, 2238 bp, Artificial Sequence
  derived and/or modified sequence
atggaggtgatgaacctgatggagcagcccatcaaggtgaccgagtggcaacagacctatacatatgactccggcattcatagcggggcaaacacctgtgtcccatctgtctcctccaagggcattatggaagaggatgaggcctgtgggcgacagtatactctgaagaagaccacaacctacactcaaggcgtaccccctagccagggagacctggagtatcaaatgtctaccactgcccgagccaaaagagtcagggaagctatgtgtcccggcgtaagtggagaggattcttcgctgctgctggcgacccaggtcgaaggtcaagctacaaatttgcaacggctggctgaacccagccagttgctgaaatccgccatcgtccatttaatcaactaccaggatgacgccgaactggcaactagagcacttcccgagctgacaaagctgctgaacgacgaggatcccgtagtcgttactaaagcagccatgattgttaatcagcttagtaagaaggaggccagtagaagggccttgatgggaagcccccagctggtggccgcagttgtcaggactatgcaaaacacatcagacttagacacggccagatgcaccactagcatcctacataacctgagccaccatagagagggattgctggctattttcaaatcaggaggcataccggccctggtgaggatgctgagttcacccgtggaaagcgtcctcttttacgcaataaccactttgcacaatctgcttctatatcaggaaggggccaagatggccgtacggctcgctgatggcctgcaaaaaatggtgccccttctgaacaagaacaatcccaagtttttggctataaccacggattgtttgcagctgctggcttacggaaatcaggaatcaaagctgatcatcctcgcaaacggcgggccccaggcactcgtccagatcatgagaaattattcatatgaaaagttactgtggactaccagccgggtgcttaaagtgctgtctgtgtgtccaagcaataagcctgctattgtggaagccggcgggatgcaagccttaggcaaacacctaacatccaacagtccgcgcctcgtgcagaattgcttatggactctgcggaacctttccgacgtcgccaccaagcaggaaggactggagagcgttcttaaaattctcgtgaatcagctgagtgtggacgatgtcaatgttctgacttgtgccaccggaactttatctaatctaacatgcaataatagcaaaaataagactctggttacacagaattcaggcgtagaggccctgatccacgcaatccttagagctggtgataaggacgatattacagaacccgctgtctgtgctctgcggcacctgacttctcgtcatcctgaggcagagatggcacagaatagcgtccgcctgaactatggcatccctgccatcgtcaaactgctcaatcagcctaaccaatggccacttgtaaaggctacaattggtttgattcgaaatctagccctctgcccagccaaccacgcccccctgcaggaagccgccgtgatcccgcggctggtgcaacttcttgtgaaggcccatcaggatgcacagcgacatgtggccgcggggacacagcagccctataccgatggtgtgaggatggaagaaatcgtggagggatgcacaggggccctccatatcctggcaagagaccccatgaatcgcatggaaatttttcgcctgaacaccattccactgttcgtgcagctgttatactcgtccgtggagaatatacagcgagtcgccgctggcgtgctttgtgagctggcacaggataaagaagccgcagatgccattgatgcagagggagcctccgcaccgcttatggaattgctgcattccagaaatgagggcaccgctacctacgcggcagcagtgctgttccggatttcagaggataaaaatcccgactatcgcaaaagggtcagcgtggagcttactaacagtctgttcaaacacgaccccgcagcttgggaggctgctcagagtatgatccccataaatgaaccgtatggagacgatatggacgcaacttatcggccaatgtactcttccgacgtaccattggaccctttggagatgcatatggatatggacggcgattatcctattgacacatactccgacggtctgcgccccccctacccaaccgcggaccatatgttagcctag

SEQ ID NO: 294423 - DNA, 2238 bp, Artificial Sequence
  derived and/or modified sequence
atggaggtcatgaatctaatggaacagcccattaaggttacagagtggcagcagacatatacctacgatagcggaatccatagcggggctaacacctgcgtcccctccgtgagcagcaagggtatcatggaagaagacgaggcctgcggacggcaatacacactgaagaagactacaacctacacccaaggcgtcccacccagtcagggggatctggagtaccagatgtccacaactgccagagccaaacgcgtacgcgaggctatgtgtcctggagtgagtggagaggattccagtttacttctcgccactcaggtagaagggcaagcgactaatctgcagagactcgcggaaccatcacagttgctcaaatctgctattgtgcacctgatcaactatcaggatgacgccgagctagccacaagggcactgcccgagctgaccaagctgctgaacgatgaagatcctgttgtggtgacaaaggccgctatgatagtgaatcagctgtctaaaaaggaggcatcgagacgggcactgatgggcagccctcaactggtcgctgccgtcgttcgcaccatgcagaatactagcgacctagatactgctagatgtacaactagtatccttcataatctcagccaccaccgcgaaggacttctagccatctttaaatcaggaggcataccagctttagtgaggatgttgtcgagccccgtcgagagcgtgcttttctacgctatcaccaccttacataatttgttgctgtatcaggagggggctaagatggcggttcgcctcgcagatggcctacagaagatggtacccctattaaataagaacaacccgaagtttctggccatcaccaccgattgcctgcagctgctggcgtatggaaaccaggaatccaaacttataatacttgcgaatggcggtccacaagcactggtgcagattatgagaaattacagctacgaaaagctgctttggacaactagtagagtgttgaaagtcttgtctgtgtgcccctccaataaaccagccatcgtggaagctggagggatgcaagcgctgggaaagcacttaaccagtaattcccccaggctagttcagaactgtctctggactctgagaaatttgagtgacgtggcaaccaaacaggaaggcctggagagcgtgcttaagatccttgtgaatcagctatcggtggacgacgtaaacgtactgacctgcgccaccgggactctgagcaaccttacctgcaacaactcaaagaacaagactctagtgacccaaaactccggcgtggaggcactgatccatgcaattctccgagccggtgacaaggacgatataacggagccggctgtctgtgccttgcgtcaccttacatctagacaccccgaagccgagatggcacagaactctgtgaggcttaactatgggattcctgccatagttaaactgctaaaccaacctaaccaatggcctcttgttaaagctactatcggattaatcaggaatctcgctctgtgccccgcaaaccacgctcccttacaggaagctgccgttattcccagactggtccagcttctggtgaaggcacaccaggatgcacagaggcatgtggcagctggaactcagcaaccctacacggacggggtgcggatggaggagatcgtggagggatgcactggagcccttcatatcctcgcgagagaccccatgaataggatggagatcttccgcctgaacaccattcctttgttcgtgcagttgctgtactccagcgtcgagaatatccagagagtggctgcaggtgtcctgtgtgaactggcacaggacaaagaagccgcagacgccatagacgcggagggggctagcgccccacttatggagttactgcatagtaggaacgaaggcactgctacttatgccgcagcagtgttgttccgaatttcggaggacaagaatcctgactacaggaagagagtatccgtagagctgacaaattcccttttcaagcatgatccggcagcttgggaggctgcccaatctatgataccaatcaacgaaccctacggggacgacatggatgcgacataccggccaatgtactccagcgatgttccactcgacccactcgaaatgcacatggacatggatggcgattatccaattgacacctatagcgatggcctgcggccaccctacccaacagcagatcatatgttggcctag

SEQ ID NO: 294424 - DNA, 2238 bp, Artificial Sequence
  derived and/or modified sequence
atggaggtgatgaatttaatggaacagccaatcaaagtcactgaatggcagcagacatacacctatgattctggcatccactccggggcaaacacctgtgtgccttctgtgagttcaaagggaataatggaagaagacgaggcctgtggacggcagtataccctcaaaaaaaccacaacttatacacagggtgtgcccccatcacagggtgacctcgaataccaaatgagcacaaccgcaagggcaaagagagtgagggaagccatgtgtccaggcgtctcaggtgaagacagctccctcctgctggctacacaggttgaaggccaggcgaccaacctgcaacggttagcagaaccatctcaacttctcaaatcggcaatcgtgcacctcattaactatcaggacgacgccgaactagccacgcgcgctctccccgagttgaccaagctgctcaatgacgaggacccggtggtcgtgacaaaagctgccatgattgtgaaccaattatccaagaaggaagcttccagaagagcactcatgggatccccccagctggtcgcggctgttgttcgcacgatgcaaaacacctcagacctggatactgcaaggtgtacaacaagcatcttgcacaatcttagtcatcaccgggagggactgctcgctattttcaagagcggaggcatacccgctctagtcagaatgttatcttcccctgtggaaagcgttttgttctacgctataactacactgcacaacttgctgctatatcaagagggagcaaaaatggcggtgcggctcgccgatggcctgcagaagatggtgcctctgctgaataagaacaatcctaaattcctagcaatcaccactgattgcctccaactgcttgcttacggcaaccaagagtccaaacttattattcttgccaatggaggccctcaagccctggttcagatcatgcgaaattactcatatgagaaactgctttggaccacatctagggtgctgaaggttctctctgtatgtccttctaacaaaccggcaattgtggaggccggaggtatgcaggccctgggcaagcatttgacctctaattctcccagattagtgcaaaactgcctttggacgctcaggaatctgagcgatgtggcaacgaaacaagaggggctggagagtgttttgaaaatcctcgtcaatcagctgagcgtcgacgatgtaaacgtgttgacctgcgcaacaggtaccctgtcgaaccttacatgtaataacagcaaaaataaaacactggtgactcagaactctggtgtagaggcactcatccacgctattctgagagctggggacaaagatgacatcaccgagcctgccgtatgtgctttgcggcacctgacatcccgacatcctgaagccgagatggcacagaactccgtgcgactcaactacggcatccctgcaatcgtaaagctgctgaatcagcccaatcagtggcctttagtgaaggccacaattggactgatccggaacctggcgctatgtcctgccaatcacgctcccctgcaggaggctgccgtaataccgagacttgtccagctcctcgtgaaagcacaccaggacgcacaacggcatgtcgccgctgggactcagcagccgtacacggacggcgtcaggatggaagagattgtcgagggatgcaccggcgcactccacatacttgcgagggaccctatgaatagaatggagattttccgcctgaacactattccactgttcgtgcaattactatattcaagcgtggaaaacattcagagagtcgccgcaggcgtcctgtgcgagctggcccaggacaaggaggcggcagacgccatcgatgcggagggcgcttccgctccactgatggagctactgcattcacgaaacgagggtacagctacctacgccgcagctgtcttattcaggatcagcgaagacaagaaccccgactacaggaaaagagtaagcgttgaacttaccaactctctatttaagcacgatccagcagcttgggaggctgcccaatcgatgatccccatcaatgaaccctacggggacgacatggacgcaacctatcgccctatgtactcttcagacgtgcccctcgaccctctcgagatgcacatggacatggacggggattatccaatagacacatactcagacggactccgccctccttacccaaccgctgatcatatgctagcctag

SEQ ID NO: 294425 - DNA, 2238 bp, Artificial Sequence
  derived and/or modified sequence
atggaggtgatgaacctgatggagcagcctatcaaagtgaccgaatggcagcagacttatacctatgacagtggcatccatagtggtgctaatacttgtgtgccttctgtttctagcaagggtatcatggaggaggacgaagcatgcgggcgccaatatactcttaagaaaacaaccacctacacccagggggtccccccctcccaaggggatcttgaatatcagatgtctaccaccgctcgcgctaaaagagtcagagaggcaatgtgtcccggagtgtccggtgaagatagttctctgctgctggcgactcaggttgagggccaggctaccaaccttcagaggttggccgagcccagccagctgctcaagagcgcgattgtgcatttgattaattatcaggatgatgccgagctggccacgcgagctcttcccgaacttactaaactcttgaacgacgaagaccctgtagtggtaacaaaggcggcgatgatagtgaaccagctttcgaagaaggaagcctctcgacgagctctgatggggtcccctcagctggtggcagcggtggttcgcacaatgcagaatacgagcgacttagatacagcaagatgtaccacaagcatactgcataatctgtcacaccacagggaagggctgttggccatttttaagtctggggggatcccagccttagttaggatgttaagttcacctgtcgagtccgtcctcttttacgccatcaccacccttcacaatcttctgctgtatcaggaaggcgccaagatggcagtccgactcgccgacgggctccaaaaaatggtgcccttactgaacaagaacaaccccaaatttttggctatcaccacagactgcctgcagctcctggcttacggcaaccaggagtctaaactgatcatcctggcaaatggcgggccgcaggcactggtccaaatcatgcgaaactacagttatgaaaaactgctgtggacaacatctagagtattgaaggtcctgtccgtctgcccgtccaacaaacccgctatcgttgaggccggcggaatgcaggctctaggcaagcatctcacatcgaactcaccccgactggtgcagaactgcttatggacgcttagaaacctgtccgatgtggcgacaaaacaagaagggcttgagtctgtgctcaagattctggttaaccagctgagcgtagacgacgttaatgttctcacatgtgctaccggtacattgtccaatctgacatgcaataacagcaagaataagacacttgttacacagaacagcggagttgaggccctcattcatgctatattgagagccggtgataaggacgacattacagagccagctgtctgcgcgctgcgtcatcttacatctcgtcatcccgaagcagaaatggcacaaaattctgttcgcctgaactatggcatccccgcaatcgtaaagctgttgaaccagcccaaccagtggcctctggtgaaggccacgattggacttatccggaacctcgccctgtgtcccgccaaccacgcccctctacaggaagctgccgtgatcccccggctggttcagttactcgtcaaggcacaccaggacgcacagcgccacgtcgctgcaggaacgcaacaaccatacactgacggggtcagaatggaggaaatagtagaaggctgtacgggcgctctgcacatcctggctcgcgaccctatgaaccgcatggaaattttcagacttaacactatccccctgttcgtgcagctgctctattccagcgtggagaatattcaacgggtcgccgcaggcgtgctctgtgaactagcccaagacaaagaggctgccgatgcaatcgacgcggaaggggcctcagccccgctcatggaattgctacatagccgcaacgaagggactgctacctacgccgccgctgtcctgtttcgaatttccgaagacaagaatcctgactaccggaagagagttagtgtcgagctgacaaatagcctgttcaagcacgaccccgcggcctgggaggctgctcagtcgatgattccgattaatgagccatatggagatgacatggacgctacatatcgccccatgtacagctcagacgtcccactcgacccactggagatgcacatggacatggatggcgattatcctatcgatacatattccgatggcctgcgccccccatatcctacagctgatcatatgctcgcctag

SEQ ID NO: 294426 - DNA, 2238 bp, Artificial Sequence
  derived and/or modified sequence
atggaagttatgaatctcatggaacagcctatcaaagtgacagagtggcagcagacatacacgtacgattcgggcattcatagcggcgctaatacctgtgttccatctgtctcgtcgaaaggtatcatggaggaagatgaggcctgtggtaggcaatacaccctgaagaagaccacaacatatacacaaggagtccctcctagccagggtgacctcgagtatcagatgtccaccacagcccgcgcaaagcgcgtgcgggaagctatgtgtcctggtgtgagtggcgaggattctagcttactgctagcaacgcaggttgaaggccaggctacgaacctccaaagactggctgagccttcccagctgctgaagtcagctatcgtccatctgatcaactaccaggacgatgccgagctggctactcgggctctgccggaactgacgaaactgctaaacgacgaagacccagtggtggtgacaaaagctgctatgatcgttaatcagctgtctaagaaggaggcaagtaggagagcactaatgggttcccctcaacttgtggccgccgtggtccggaccatgcagaatacctcagatttggataccgccaggtgcacaaccagtatcttacacaacctgtcccatcaccgcgaaggtctcctagcgatattcaagagtggaggaattccagccttggtacgcatgctttcttcaccagtggaaagtgtgctgttttatgcgattactacattacataatcttctcctataccaggagggcgctaaaatggccgtgcgcttagccgatggattacagaagatggtgcccttactaaataagaataaccccaagttcctagcgatcaccacggactgcctgcagctgctcgcttacggaaatcaagaatctaagctgattatcctggccaacggcggccctcaggcactggttcagatcatgcgtaactactcatacgagaagcttctctggacgacaagcagagtgctgaaggtgctaagtgtgtgccccagcaataaacccgctatagtggaggctggcggaatgcaggccctagggaagcatctgacctctaactcaccacgtctggttcagaattgcctgtggaccctgcggaatctgtcagatgtcgctactaagcaggaaggccttgagtctgttctaaagatcttggttaaccagctgtccgtcgatgatgtgaacgtattgacctgcgcaaccggaacattgagcaacctgacctgtaataattccaaaaataaaaccctagtgacacagaactctggggtcgaggctctgattcatgccatcctgcgcgcaggcgataaggacgacatcacggaacctgctgtctgtgcacttcgtcatttgacttcccgccatccagaggcagaaatggctcagaactccgtccggctcaactatgggatccccgccattgttaagctactcaatcaaccaaatcagtggccactcgtgaaggcaacaatagggctgatccgtaatctcgctttgtgtccggctaaccatgcacccttgcaggaggcagccgtcatccctaggctggtgcagctgctggtcaaggcccatcaagacgcccaacgtcatgtggcggccggcacacagcagccatatactgatggagtgaggatggaagaaattgtcgagggctgcacgggagccctccacattctagctagggaccctatgaaccggatggagatctttcgattgaatactatccccttatttgtccagctgctctattcgtccgtggaaaacatccagagagtagcagccggagtactgtgcgaactcgcgcaggacaaagaagccgctgacgccatagatgccgagggagccagtgcccccctcatggagctcctgcactctcgaaatgagggcacagctacatacgctgccgcagtgctgttcaggataagcgaggacaagaacccagattaccggaaacgggtctctgtcgaattaaccaactccttattcaagcacgaccctgctgcctgggaggccgcccagagcatgattcccattaacgaaccatacggggacgatatggacgcaacttatcgtcccatgtatagttctgacgtgcccctcgatccacttgagatgcacatggacatggacggcgactacccgatcgatacatatagcgacggtctgcgtcctccctacccaaccgccgaccacatgttagcctag

SEQ ID NO: 294427 - DNA, 2238 bp, Artificial Sequence
  derived and/or modified sequence
atggaggtgatgaacctcatggaacagcctatcaaggtgacggaatggcagcagacctacacttatgatagtgggatccactcaggtgcaaatacgtgtgtgccttcagtgtcaagtaaagggattatggaagaagacgaagcctgcggcaggcagtacactttgaagaagacgactacatatactcagggagtcccaccatcccagggggaccttgagtatcaaatgtccaccacagcccgcgcgaagagggttagagaagcaatgtgccccggcgtgtctggagaagactcctctctcctgctcgccacacaggtggagggacaggcaacaaacctgcagagactggctgagccctcacagctgctaaaaagcgcaatcgtgcacctaataaactatcaagatgacgctgaactcgcaaccagggctttgccggagcttaccaaacttcttaatgatgaagaccccgtcgtggtcactaaggctgcaatgatagtcaatcagcttagtaagaaagaagcgtcgaggagagccttaatggggagcccccagcttgtggcagccgtggtccgaactatgcagaatacctccgatctggacaccgcccggtgtaccacttccattctccacaatctgtctcaccaccgggaaggactcttggccatcttcaagagcggtgggatccctgccctggtgcgcatgttgagctcacccgtggaatcggttctattctatgcgatcactacgctccacaatcttctgttgtaccaggagggtgctaagatggcagtgcgattggccgatggactccagaagatggtacccctcctgaataagaacaaccccaagttcttggcaatcacaacggactgtttacagcttttggcctatggaaatcaagagtcaaaactgatcatcctggcaaacggaggtccccaagcattagttcagatcatgcgaaactacagctatgagaagctgctctggaccacaagtagagtactgaaagtactgtcggtatgtccctcaaataaacccgcaatagtagaggctggtggcatgcaagccctaggaaaacatctcaccagcaatagcccccgacttgtgcagaactgtctctggaccttacggaacttgagcgacgtggctaccaagcaggaaggccttgaaagcgttctcaagatcctcgtcaatcagttgtccgtggacgacgtgaatgttctgacctgtgctacaggtactttgtcaaacctcacttgcaataatagtaagaacaaaacccttgtgacccagaatagcggcgtggaagcgctgatccatgctatcctccgggcaggcgataaggatgacatcaccgagccagcagtgtgtgccctgcgccatctcacgtcccgccatcctgaggccgagatggctcagaacagtgttcgactcaactacggcatacccgctatcgtcaaattactaaaccagccaaatcagtggccccttgtcaaggcaactattggcctgatcaggaacctcgccctctgtcccgcaaatcacgctccactgcaggaagcagcagtaataccacgtctggtccagttgcttgttaaagctcatcaagatgcccagaggcacgtggccgcaggaacccagcagccctatactgacggcgtgcgaatggaggagattgtggagggttgcacgggcgctctccatatcttggctcgggaccccatgaatcgcatggagatcttccgcctcaataccattcccctgttcgtgcagctgctttattcaagcgtggagaacattcaacgcgtggctgctggtgtgctgtgcgaactagctcaggacaaagaggcagcggacgccatcgacgccgagggtgcttccgctcctctcatggagctgctgcactcaagaaacgagggaaccgccacgtatgcggccgccgtcctctttcgcatatccgaggataaaaaccccgactaccgaaagcgggtttccgtggaactcaccaattctcttttcaagcacgatccagcagcgtgggaggccgcacagagcatgatcccaattaatgagccctacggggacgatatggatgccacttatcgcccaatgtactccagcgatgtgccactcgatcctttggagatgcacatggacatggacggagactatcccatcgacacttattccgacggcttacgccctccgtatccaaccgccgatcacatgctggcgtag

SEQ ID NO: 294428 - DNA, 834 bp, Artificial Sequence
  derived and/or modified sequence
atggaagtgatgaatttaatggagcagcccatcaaggtcactgaatggcagcaaacgtatacatatgactcggggattcactcaggcgccaatacatgtgtccccagtgtgagctcaaagggaatcatggaagaagatgaagcttgtggacgtcagtatacgctcaagaagaccaccacgtatacccagggcgtgcccccatctcaaggtgatctcgaataccagatgagtaccaccgccagggctaaaagggtcagggaggccatgtgccctggggtgagcggtgaggactccagtctgcttctggcaacacaggttgaaggccaggccaccaatctgcagcgtctggccgagcccagtcaacttctgaaatccgctattgtgcacctcatcaactaccaggatgacgccgaactggcaactcgcgccttgccagaattaacaaaattgttgaacgacgaggaccccgtagtcgtgacaaaggctgcaatgattgtgaaccagctgagtaaaaaggaagctagccgccgggcactcatgggcagtccccaacttgtggctgccgttgtcaggacgatgcaaaacacctcggatttggacaccgcccggtgtactacgtctatccttcacaatttgagtcatcacagagaagggctcctggccattttcaaatcggggggcatccctgccctcgtgcgcatgctgtctagccctgtcgagtctgtgctcttctacgcaattacaaccctccataaccttctgctttatcaggagggagctaaaatggcagtgaggctcgcagatgggctccagaagatggtcccgcttttgtag

SEQ ID NO: 294429 - DNA, 708 bp, Artificial Sequence
  derived and/or modified sequence
atggaagttatgaacctgatggagcaacctatcaaggtgaccgaatggcaacagacctacacctacgatagcgggatccactcaggtgctaatacgtgtgtcccctccgtgtcgtcgaagggcataatggaggaggatgaggcttgtggacgccagtatacactgaagaagactaccacctatactcagggggtgcccccctctcagggcgacctggaataccaaatgagcacgactgctagagctaagagggtgagggaggcaatgtgcccgggggtgtcaggagaagattcgtcactcctgctggcaacccaggtagagggtcaggccacaaacttgcagcgccttgccgagccatctcagctcctgaaatcagcgatcgtacacctgattaactaccaggacgacgcagaactggccactcgggccctgcctgaactcacaaagctgctaaacgatgaggatccggttgttgtcactaaagccgccatgatcgttaaccaactctcaaagaaagaagcaagcagacgagcattaatgggatctcctcaactggttgcagccgtcgttaggacaatgcaaaacaccagcgacttggataccgcccggtgcaccacatctattttacataacttgagtcaccaccgcgagggactgttagccatattcaaatccggcggaatccctgccctggtgagaatgctgtag

SEQ ID NO: 294430 - DNA, 891 bp, Artificial Sequence
  derived and/or modified sequence
atggaagttatgaacctgatggagcagcccatcaaagtgaccgaatggcaacaaacttacacctacgatagcggcatccactctggggccaacacttgtgtgccttctgtgtcctccaagggcattatggaggaggatgaagcctgcggcaggcaatatactctgaaaaaaactactacctacactcaaggggtgccaccaagccagggcgatttggagtatcaaatgagcaccacagcccgagccaagagggtgcgcgaggccatgtgccctggcgtgtccggcgaagacagcagtctcctgctagccacacaggtagaaggacaggccacgaaccttcagcgtctcgccgaaccttcccaactgttaaaatccgccatcgtgcacctgatcaactaccaggatgacgcagaactggcgactcgagccttaccagaactgactaaactgctgaacgacgaagacccggtggttgtcactaaggcagccatgatcgtcaatcagctgtcaaaaaaggaggcctctcgccgggcccttatggggtctccacagctggtggctgctgtggtcagaaccatgcagaacacctcagacctagatacagcaagatgtaccactagtatactgcataatcttagccaccacagagaggggctgctggcaatcttcaagtcaggaggaatcccggctttggttaggatgcttagcagcccagtggaatccgtcctcttttatgccattactacactccacaatctgctcctctaccaggagggcgctaagatggctgtgcgtctggccgacgggttacaaaagatggttccactgctgaataagaacaaccccaaattcctggcgataacaactgattgtctccagttgttagcttag

SEQ ID NO: 294431 - DNA, 261 bp, Artificial Sequence
  derived and/or modified sequence
atggaggtcatgaatcttatggaacagcctataaaagtgaccgagtggcaacaaacttacacctatgacagtggtatccattcgggcgccaatacttgcgtcccatcagtcagctccaagggcataatggaggaagatgaagcttgtgggcgccagtacaccctaaaaaagacaactacttacacacagggtgtgcctccctcccagggagacttggaataccaaatgtcaacaacggctagagccaaacgggtgagatag

SEQ ID NO: 294432 - DNA, 897 bp, Artificial Sequence
  derived and/or modified sequence
atggaagttatgaatctcatggagcaacctatcaaggtcacagaatggcaacagacttacacttatgattccggtatccactctggagcaaatacctgtgtgccctcggtgtctagcaagggcatcatggaggaagatgaagcttgtgggcggcagtacacgctaaaaaagaccacgacttacacgcagggcgtgcctccttcacagggcgacctcgagtaccaaatgtccacgacagcccgcgctaagcgagtccgtgaggcgatgtgccctggtgtctcaggagaggacagctcactcctgctcgctacacaggtggagggacaggcgaccaatctgcagaggttagccgagccgtctcagcttcttaagtccgcgatcgtccatctgatcaactaccaggacgatgcggaacttgcgactcgggctcttcccgagctaaccaagctccttaacgacgaagaccccgtagtggtgacaaaagcagcaatgatcgtcaatcagctgagtaagaaggaggcctccagacgcgccttgatgggatcacctcagctggtggccgccgtcgtgaggactatgcagaacacttccgacttagatactgcgaggtgtaccacaagcatccttcacaacctgagtcaccatagggaaggactgctggccatattcaaaagtggcgggatcccggctctggtgaggatgctctccagccctgttgagtctgtgctgttctacgcaatcacgacattgcataacctcctgctttatcaggagggggctaaaatggctgttcgcttggccgatgggttacagaagatggtcccactacttaataagaacaacccaaaattccttgcaattacgaccgattgcctccaattactggcttatgggtag

SEQ ID NO: 294433 - DNA, 1776 bp, Artificial Sequence
  derived and/or modified sequence
atggaagttatgaatcttatggagcaaccgattaaggttacagagtggcagcagacatacacatatgacagcggaatccactctggcgcaaacacgtgcgtacccagtgtgtccagtaagggcattatggaggaagatgaagcctgcggacggcagtacactctcaagaaaaccacaacctacacccagggagttcccccctcccaaggtgaccttgaatatcagatgtccactacggccagagctaaacgcgtgagggaggccatgtgtcccggagtgagcggagaggatagtagtctgctgctggccacgcaagtagagggacaagcaacaaatctacagcgtctggccgagcccagtcaactactgaagagcgcaatcgtgcacttaataaactaccaggatgacgccgagctggcaacaagggctctccctgagctgaccaagctactcaatgatgaggatccagtggtcgtaacgaaggccgcaatgatagtgaaccagcttagcaagaaagaagcctccagacgggcactaatgggaagtcctcagctggtggccgccgtggtgcggaccatgcagaacacaagcgatctagacaccgctcggtgcaccacatctattctgcataatctgtcccatcacagggaagggctgctggccatcttcaagtcgggtggcataccggctttggttcgcatgctcagttccccagtcgaaagcgtgctgttttatgcaatcactactcttcataatcttctgctctatcaggagggcgcaaagatggctgtgcggctggcagatggcctccagaagatggttccactgctgaataagaataatccaaaatttctggctattactaccgactgcctccagctcttggcctacggaaatcaggaatccaaaattttgaccgctacagtggacaatgcaaacattcttcttcagatcgataacgcgcgccttgccgcagacgatttcagaaccaagtttgaaaccgagcaggccctgcgactgtccgttgaggcggacattaatggcctgcggcgagtcctggacgagctcacactagccagagccgatctggagatgcaaattgagaacttaaaggaggaactggcttacctgaaaaagaatcatgaggaagaaatgaacgctttgagagggcaggtcggcggggagatcaacgtagagatggatgcagcaccaggggtggatctgtccagaatcctcaacgagatgcgggatcagtacgaaaaaatggcggagaagaatagaaaggatgcggaggattggttcttctcgaagaccgaagagctgaacagggaggttgctactaattcagaactggttcagtcggggaaatcagagatttcagaactccggagaacaatgcaggcgttggaaattgaactccagtcccaactgtcaatgaaggcttcattagagggcaacctggcggaaaccgagaataggtactgcgttcagctgtcccagatccaagggctgattggatctgtggaggagcagctcgcccaactgcggtgtgagatggagcaacaaaaccaggaatataagatcctgttggacgtcaagaccaggctcgagcaggagattgcaacctatagaaggctcctggaaggcgaggatgctcacctcacacaatataaaaaagagcccgttaccacacgccaggttagaacgattgtggaggaagtgcaggacgggaaggttatatcctcccgagagcaggtacaccaaaccacccgctag

SEQ ID NO: 294434 - DNA, 3298 bp, Artificial Sequence
  derived and/or modified sequence
catgctttctggaggcctgcacagacctttcccacccgctttcctgaaagaatttgacagggaaagtgagaccgcaggaaggctttttgggggaaggtttcttcaatgctagactctctcaggcagagctgcatcgggccccctgccttccctgctcccaatttcctgagaccgcccccccccacccagaattggggatcttgatcaggtagccacgatggaggtgatgaacctgatggagcagcctatcaaggtgactgagtggcagcagacatacacctacgactcgggtatccactcgggcgccaacacctgcgtgccctccgtcagcagcaagggcatcatggaggaggatgaggcctgcgggcgccagtacacgctcaagaaaaccaccacttacacccagggggtgccccccagccaaggtgatctggagtaccagatgtccacaacagccagggccaaacgggtgcgggaggccatgtgccctggtgtgtcaggcgaggacagctcgcttctgctggccacccaggtggaggggcaggccaccaacctgcagcgactggccgagccgtcccagctgctcaagtcggccattgtgcatctcatcaactaccaggacgatgccgagctggccactcgcgccctgcccgagctcaccaaactgctcaacgacgaggacccggtggtggtgaccaaggcggccatgattgtgaaccagctgtcgaagaaggaggcgtcgcggcgggccctgatgggctcgccccagctggtggccgctgtcgtgcgtaccatgcagaataccagcgacctggacacagcccgctgcaccaccagcatcctgcacaacctctcccaccaccgggaggggctgctcgccatcttcaagtcgggtggcatccctgctctggtccgcatgctcagctcccctgtggagtcggtcctgttctatgccatcaccacgctgcacaacctgctcctgtaccaggagggcgccaagatggccgtgcgcctggccgacgggctgcaaaagatggtgcccctgctcaacaagaacaaccccaagttcctggccatcaccaccgactgcctgcagctcctggcctacggcaaccaggagagcaagctgatcatcctggccaatggtgggccccaggccctcgtgcagatcatgcgtaactacagttatgaaaagctgctctggaccaccagtcgtgtgctcaaggtgctatccgtgtgtcccagcaataagcctgccattgtggaggctggtgggatgcaggccctgggcaagcacctgaccagcaacagcccccgcctggtgcagaactgcctgtggaccctgcgcaacctctcagatgtggccaccaagcaggagggcctggagagtgtgctgaagattctggtgaatcagctgagtgtggatgacgtcaacgtcctcacctgtgccacgggcacactctccaacctgacatgcaacaacagcaagaacaagacgctggtgacacagaacagcggtgtggaggctctcatccatgccatcctgcgtgctggtgacaaggacgacatcacggagcctgccgtctgcgctctgcgccacctcactagccgccaccctgaggccgagatggcccagaactctgtgcgtctcaactatggcatcccagccatcgtgaagctgctcaaccagcccaaccagtggccactggtcaaggcaaccatcggcttgatcaggaatctggccctgtgcccagccaaccatgccccgctgcaggaggcagcggtcatcccccgcctcgtccaactgctggtgaaggcccaccaggatgcccagcgccacgtagctgcaggcacacagcagccctacacggatggtgtgaggatggaggagattgtggagggctgcaccggagcactgcacatcctcgcccgggaccccatgaaccgcatggagatcttccggctcaacaccattcccctgtttgtgcagctcctgtactcgtcggtggagaacatccagcgcgtggctgccggggtgctgtgtgagctggcccaggacaaggaggcggccgacgccattgatgcagagggggcctcggccccactcatggagttgctgcactcccgcaacgagggcactgccacctacgctgctgccgtcctgttccgcatctccgaggacaagaacccagactaccggaagcgcgtgtccgtggagctcaccaactccctcttcaagcatgacccggctgcctgggaggctgcccagagcatgattcccatcaatgagccctatggagatgacatggatgccacctaccgccccatgtactccagcgatgtgccccttgacccgctggagatgcacatggacatggatggagactaccccatcgacacctacagcgacggcctcaggcccccgtaccccactgcagaccacatgctggcctaggcggcctggccccagtgcggttcctcatctgagaggctctccgtgcaggcgatggggcaagacagaaaagtgcctgagctggggaagccggggtgtaacttcctgctgcaccctgcgcctccagaggtcctccgtagggtctttcttgggatagtgttctgctcctgcttttctgtcctgggcatgggtccagggcctgacaccccctccccgcccctgtggccctggccactaaagcttcagactcaagtacccattctgttttcccccagcaacgcccctccaaacctccagcctccctgtctccagctgcctgggcccggaagggctttggttccttctctgggtctgattttctcactgaactccaccgaccaactgccctaagcccccagggcctccagggcccaggttcgagacccaaacccccaaaatccaaaacttctcttgaaaagttcagggaccgtccaggggagatggggaggagatatggagtgagtcacctgctccagaagatgccagcttctctctccagggtgcttagttggctttgcccacccctcactccccagggagctctggggacagcttcctcacacccctgtcccacccacacagctgccctagctgaccccgagaagtgctcttggctgacccctctggtgtgtggtgaggggctttctcttccccttcctgtttcagacccccccatttcccgcacatggtgtggggggctgggggaggtccaagcagagtgttttattattatcgctttatgtttttggttattggtttttttgtatagaccaaagcaaagaaaataaaaataacacagatgcgttg

SEQ ID NO: 294435 - DNA, 915 bp, Artificial Sequence
  derived and/or modified sequence
cccaggggacctcagaagctgctagaagccctgagtgccttctcttgcccctgggagagttgggtcagggcagcaagtagccacgatggaggtgatgaacctgatggagcagcctatcaaggtgactgagtggcagcagacatacacctacgactcgggtatccactcgggcgccaacacctgcgtgccctccgtcagcagcaagggcatcatggaggaggatgaggcctgcgggcgccagtacacgctcaagaaaaccaccacttacacccagggggtgccccccagccaaggtgatctggagtaccagatgtccacaacagccagggccaaacgggtgcgggaggccatgtgccctggtgtgtcaggcgaggacagctcgcttctgctggccacccaggtggaggggcaggccaccaacctgcagcgactggccgagccgtcccagctgctcaagtcggccattgtgcatctcatcaactaccaggacgatgccgagctggccactcgcgccctgcccgagctcaccaaactgctcaacgacgaggacccggtggtggtgaccaaggcggccatgattgtgaaccagctgtcgaagaaggaggcgtcgcggcgggccctgatgggctcgccccagctggtggccgctgtcgtgcgtaccatgcagaataccagcgacctggacacagcccgctgcaccaccagcatcctgcacaacctctcccaccaccgggaggggctgctcgccatcttcaagtcgggtggcatccctgctctggtccgcatgctcagctcccctgtggagtcggtcctgttctatgccatcaccacgctgcacaacctgctcctgtaccaggagggcgccaagatggccgtgcgcctggccgacgggctgcaaaagatggtgcccctgct

SEQ ID NO: 294436 - DNA, 949 bp, Artificial Sequence
  derived and/or modified sequence
tgagttgctgccttggccagagtccggagcagccgccgcccgaccacgccgagctcagttcgctgtccgcgccggctcccaccccggcccgaccccgacccggcccggtcaggccccatactcagcctctgacctctgcaggtcagttcccaggacagtggagccaaacacagaccaagcgggaagttcacctccctggtacaaagttcggccctgctactcattaaccttcagtagccacgatggaggtgatgaacctgatggagcagcctatcaaggtgactgagtggcagcagacatacacctacgactcgggtatccactcgggcgccaacacctgcgtgccctccgtcagcagcaagggcatcatggaggaggatgaggcctgcgggcgccagtacacgctcaagaaaaccaccacttacacccagggggtgccccccagccaaggtgatctggagtaccagatgtccacaacagccagggccaaacgggtgcgggaggccatgtgccctggtgtgtcaggcgaggacagctcgcttctgctggccacccaggtggaggggcaggccaccaacctgcagcgactggccgagccgtcccagctgctcaagtcggccattgtgcatctcatcaactaccaggacgatgccgagctggccactcgcgccctgcccgagctcaccaaactgctcaacgacgaggacccggtggtggtgaccaaggcggccatgattgtgaaccagctgtcgaagaaggaggcgtcgcggcgggccctgatgggctcgccccagctggtggccgctgtcgtgcgtaccatgcagaataccagcgacctggacacagcccgctgcaccaccagcatcctgcacaacctctcccaccaccgggaggggctgctcgccatcttcaagtcgggtggcatccctgctctggtccgcatgctcag

SEQ ID NO: 294437 - DNA, 1029 bp, Artificial Sequence
  derived and/or modified sequence
ctagagccgactggcagtccccggggccaatggcaagcggataaacagaggcggccgtggaagaggactggaggcgaggctccgcccctccacgggacagtcaggcgagatagccagtgagctcgcaccagaggtagccacgatggaggtgatgaacctgatggagcagcctatcaaggtgactgagtggcagcagacatacacctacgactcgggtatccactcgggcgccaacacctgcgtgccctccgtcagcagcaagggcatcatggaggaggatgaggcctgcgggcgccagtacacgctcaagaaaaccaccacttacacccagggggtgccccccagccaaggtgatctggagtaccagatgtccacaacagccagggccaaacgggtgcgggaggccatgtgccctggtgtgtcaggcgaggacagctcgcttctgctggccacccaggtggaggggcaggccaccaacctgcagcgactggccgagccgtcccagctgctcaagtcggccattgtgcatctcatcaactaccaggacgatgccgagctggccactcgcgccctgcccgagctcaccaaactgctcaacgacgaggacccggtggtggtgaccaaggcggccatgattgtgaaccagctgtcgaagaaggaggcgtcgcggcgggccctgatgggctcgccccagctggtggccgctgtcgtgcgtaccatgcagaataccagcgacctggacacagcccgctgcaccaccagcatcctgcacaacctctcccaccaccgggaggggctgctcgccatcttcaagtcgggtggcatccctgctctggtccgcatgctcagctcccctgtggagtcggtcctgttctatgccatcaccacgctgcacaacctgctcctgtaccaggagggcgccaagatggccgtgcgcctggccgacgggctgcaaaagatggtgcccctgctcaacaagaacaaccccaagttcctggccatcaccaccgactgcctgcagctcctggc

SEQ ID NO: 294438 - DNA, 586 bp, Artificial Sequence
  derived and/or modified sequence
catgctttctggaggcctgcacagacctttcccacccgctttcctgaaagaatttgacagggaaagtgagaccgcaggaaggctttttgggggaaggtttcttcaatgctagactctctcaggcagagctgcatcgggccccctgccttccctgctcccaatttcctgagaccgcccccccccacccagaattggggatcttgatcaggcctctgacctctgcaggtcagttcccaggacagtggagccaaacacagaccaagcgggaagttcacctccctggtacaaagttcggccctgctactcattaaccttcagtagccacgatggaggtgatgaacctgatggagcagcctatcaaggtgactgagtggcagcagacatacacctacgactcgggtatccactcgggcgccaacacctgcgtgccctccgtcagcagcaagggcatcatggaggaggatgaggcctgcgggcgccagtacacgctcaagaaaaccaccacttacacccagggggtgccccccagccaaggtgatctggagtaccagatgtccacaacagccagggccaaacgggtgcggga

SEQ ID NO: 294439 - DNA, 1069 bp, Artificial Sequence
  derived and/or modified sequence
tgtgggggccgagcgcacattttcccagcgactctggccccacctgccgagcaggtgagcgcacggagtccagaggccctgccctccagctcccagagcctcgtcgatactacctgcggcgcctccctccacgccggtgggagcccggctctggcttcttcagcggagtagccacgatggaggtgatgaacctgatggagcagcctatcaaggtgactgagtggcagcagacatacacctacgactcgggtatccactcgggcgccaacacctgcgtgccctccgtcagcagcaagggcatcatggaggaggatgaggcctgcgggcgccagtacacgctcaagaaaaccaccacttacacccagggggtgccccccagccaaggtgatctggagtaccagatgtccacaacagccagggccaaacgggtgcgggaggccatgtgccctggtgtgtcaggcgaggacagctcgcttctgctggccacccaggtggaggggcaggccaccaacctgcagcgactggccgagccgtcccagctgctcaagtcggccattgtgcatctcatcaactaccaggacgatgccgagctggccactcgcgccctgcccgagctcaccaaactgctcaacgacgaggacccggtggtggtgaccaaggcggccatgattgtgaaccagctgtcgaagaaggaggcgtcgcggcgggccctgatgggctcgccccagctggtggccgctgtcgtgcgtaccatgcagaataccagcgacctggacacagcccgctgcaccaccagcatcctgcacaacctctcccaccaccgggaggggctgctcgccatcttcaagtcgggtggcatccctgctctggtccgcatgctcagctcccctgtggagtcggtcctgttctatgccatcaccacgctgcacaacctgctcctgtaccaggagggcgccaagatggccgtgcgcctggccgacgggctgcaaaagatggtgcccctgctcaacaagaacaaccccaagttcctggccatcaccaccgactgcctgcagctcctggcctacgg

SEQ ID NO: 294440 - DNA, 1930 bp, Artificial Sequence
  derived and/or modified sequence
atggaggtgatgaacctgatggagcagcctatcaaggtgactgagtggcagcagacatacacctacgactcgggtatccactcgggcgccaacacctgcgtgccctccgtcagcagcaagggcatcatggaggaggatgaggcctgcgggcgccagtacacgctcaagaaaaccaccacttacacccagggggtgccccccagccaaggtgatctggagtaccagatgtccacaacagccagggccaaacgggtgcgggaggccatgtgccctggtgtgtcaggcgaggacagctcgcttctgctggccacccaggtggaggggcaggccaccaacctgcagcgactggccgagccgtcccagctgctcaagtcggccattgtgcatctcatcaactaccaggacgatgccgagctggccactcgcgccctgcccgagctcaccaaactgctcaacgacgaggacccggtggtggtgaccaaggcggccatgattgtgaaccagctgtcgaagaaggaggcgtcgcggcgggccctgatgggctcgccccagctggtggccgctgtcgtgcgtaccatgcagaataccagcgacctggacacagcccgctgcaccaccagcatcctgcacaacctctcccaccaccgggaggggctgctcgccatcttcaagtcgggtggcatccctgctctggtccgcatgctcagctcccctgtggagtcggtcctgttctatgccatcaccacgctgcacaacctgctcctgtaccaggagggcgccaagatggccgtgcgcctggccgacgggctgcaaaagatggtgcccctgctcaacaagaacaaccccaagttcctggccatcaccaccgactgcctgcagctcctggcctacggcaaccaggagagcaagatcctcacagccaccgtggacaatgccaacatcctgctacagattgacaatgcccgtctggctgctgatgacttccgcaccaagtttgagacagagcaggccctgcgcctgagtgtggaggccgacatcaatggcctgcgcagggtgctggatgagctgaccctggccagagccgacctggagatgcagattgagaacctcaaggaggagctggcctacctgaagaagaaccacgaggaggagatgaacgccctgcgaggccaggtgggtggtgagatcaatgtggagatggacgctgccccaggcgtggacctgagccgcatcctcaacgagatgcgtgaccagtatgagaagatggcagagaagaaccgcaaggatgccgaggattggttcttcagcaagacagaggaactgaaccgcgaggtggccaccaacagtgagctggtgcagagtggcaagagtgagatctcggagctccggcgcaccatgcaggccttggagatagagctgcagtcccagctcagcatgaaagcatccctggagggcaacctggcggagacagagaaccgctactgcgtgcagctgtcccagatccaggggctgattggcagcgtggaggagcagctggcccagcttcgctgcgagatggagcagcagaaccaggaatacaaaatcctgctggatgtgaagacgcggctggagcaggagattgccacctaccgccgcctgctggagggagaggatgcccacctgactcagtacaagaaagaaccggtgaccacccgtcaggtgcgtaccattgtggaagaggtccaggatggcaaggtcatctcctcccgcgagcaggtccaccagaccacccgctgaggactcagctaccccggccggccacccaggaggcagggaggcagccgccccatctgccccacagtctccggcctctccagcctcagccccctgcttcagtcccttccccatgcttccttgcctgatgacaataaagcttgttgactcagctatg

SEQ ID NO: 294441 - DNA, 834 bp, Artificial Sequence
  derived and/or modified sequence
atggaggtgatgaacctgatggagcagcccatcaaggtgacagagtggcagcagacctacacctatgacagcggcatccacagcggggccaacacctgtgtgcccagcgtgagcagcaagggcatcatggaggaggatgaggcctgtggccggcagtacaccctgaagaagaccaccacctacacccagggcgtgccccccagccagggcgacctggagtaccagatgagcaccacagcccgggccaagagggtgcgggaggccatgtgccctggggtgtctggagaggacagcagcctgctgctggccacccaggtggagggccaggccaccaacctgcagaggctggccgagcccagccagctgctgaagagcgccatcgtgcacctgatcaactaccaggatgatgctgagctggccacccgggccctgcctgagctgaccaagctgctgaatgatgaggaccctgtggtggtgaccaaggccgccatgattgtgaaccagctgagcaagaaggaggccagccggcgggccctgatgggcagcccccagctggtggccgctgtggtgaggaccatgcagaacaccagtgacctggacacagcccgctgcaccaccagcatcctgcacaacctgagccaccaccgggagggcctgctggccatcttcaagagcggcggcatcccagccctggtgaggatgctgagcagccctgtggagagcgtgctcttctacgccatcaccaccctgcacaacctgctgctgtaccaggagggcgccaagatggctgtgcggctggctgatggcctgcagaagatggtgcccctgctgtag

SEQ ID NO: 294442 - DNA, 708 bp, Artificial Sequence
  derived and/or modified sequence
atggaggtgatgaacctgatggagcagcccatcaaggtgacagagtggcagcagacctacacctatgacagcggcatccacagcggggccaacacctgtgtgcccagcgtgagcagcaagggcatcatggaggaggatgaggcctgtggccggcagtacaccctgaagaagaccaccacctacacccagggcgtgccccccagccagggcgacctggagtaccagatgagcaccacagcccgggccaagagggtgcgggaggccatgtgccctggggtgtctggagaggacagcagcctgctgctggccacccaggtggagggccaggccaccaacctgcagaggctggccgagcccagccagctgctgaagagcgccatcgtgcacctgatcaactaccaggatgatgctgagctggccacccgggccctgcctgagctgaccaagctgctgaatgatgaggaccctgtggtggtgaccaaggccgccatgattgtgaaccagctgagcaagaaggaggccagccggcgggccctgatgggcagcccccagctggtggccgctgtggtgaggaccatgcagaacaccagtgacctggacacagcccgctgcaccaccagcatcctgcacaacctgagccaccaccgggagggcctgctggccatcttcaagagcggcggcatcccagccctggtgaggatgctgtag

SEQ ID NO: 294443 - DNA, 891 bp, Artificial Sequence
  derived and/or modified sequence
atggaggtgatgaacctgatggagcagcccatcaaggtgacagagtggcagcagacctacacctatgacagcggcatccacagcggggccaacacctgtgtgcccagcgtgagcagcaagggcatcatggaggaggatgaggcctgtggccggcagtacaccctgaagaagaccaccacctacacccagggcgtgccccccagccagggcgacctggagtaccagatgagcaccacagcccgggccaagagggtgcgggaggccatgtgccctggggtgtctggagaggacagcagcctgctgctggccacccaggtggagggccaggccaccaacctgcagaggctggccgagcccagccagctgctgaagagcgccatcgtgcacctgatcaactaccaggatgatgctgagctggccacccgggccctgcctgagctgaccaagctgctgaatgatgaggaccctgtggtggtgaccaaggccgccatgattgtgaaccagctgagcaagaaggaggccagccggcgggccctgatgggcagcccccagctggtggccgctgtggtgaggaccatgcagaacaccagtgacctggacacagcccgctgcaccaccagcatcctgcacaacctgagccaccaccgggagggcctgctggccatcttcaagagcggcggcatcccagccctggtgaggatgctgagcagccctgtggagagcgtgctcttctacgccatcaccaccctgcacaacctgctgctgtaccaggagggcgccaagatggctgtgcggctggctgatggcctgcagaagatggtgcccctgctgaacaagaacaaccccaagttcctggccatcaccacagactgcctgcagctgctggcctag

SEQ ID NO: 294444 - DNA, 261 bp, Artificial Sequence
  derived and/or modified sequence
atggaggtgatgaacctgatggagcagcccatcaaggtgacagagtggcagcagacctacacctatgacagcggcatccacagcggggccaacacctgtgtgcccagcgtgagcagcaagggcatcatggaggaggatgaggcctgtggccggcagtacaccctgaagaagaccaccacctacacccagggcgtgccccccagccagggcgacctggagtaccagatgagcaccacagcccgggccaagagggtgaggtag

SEQ ID NO: 294445 - DNA, 897 bp, Artificial Sequence
  derived and/or modified sequence
atggaggtgatgaacctgatggagcagcccatcaaggtgacagagtggcagcagacctacacctatgacagcggcatccacagcggggccaacacctgtgtgcccagcgtgagcagcaagggcatcatggaggaggatgaggcctgtggccggcagtacaccctgaagaagaccaccacctacacccagggcgtgccccccagccagggcgacctggagtaccagatgagcaccacagcccgggccaagagggtgcgggaggccatgtgccctggggtgtctggagaggacagcagcctgctgctggccacccaggtggagggccaggccaccaacctgcagaggctggccgagcccagccagctgctgaagagcgccatcgtgcacctgatcaactaccaggatgatgctgagctggccacccgggccctgcctgagctgaccaagctgctgaatgatgaggaccctgtggtggtgaccaaggccgccatgattgtgaaccagctgagcaagaaggaggccagccggcgggccctgatgggcagcccccagctggtggccgctgtggtgaggaccatgcagaacaccagtgacctggacacagcccgctgcaccaccagcatcctgcacaacctgagccaccaccgggagggcctgctggccatcttcaagagcggcggcatcccagccctggtgaggatgctgagcagccctgtggagagcgtgctcttctacgccatcaccaccctgcacaacctgctgctgtaccaggagggcgccaagatggctgtgcggctggctgatggcctgcagaagatggtgcccctgctgaacaagaacaaccccaagttcctggccatcaccacagactgcctgcagctgctggcctatggatag

SEQ ID NO: 294446 - DNA, 1776 bp, Artificial Sequence
  derived and/or modified sequence
atggaggtgatgaacctgatggagcagcccatcaaggtgacagagtggcagcagacctacacctatgacagcggcatccacagcggggccaacacctgtgtgcccagcgtgagcagcaagggcatcatggaggaggatgaggcctgtggccggcagtacaccctgaagaagaccaccacctacacccagggcgtgccccccagccagggcgacctggagtaccagatgagcaccacagcccgggccaagagggtgcgggaggccatgtgccctggggtgtctggagaggacagcagcctgctgctggccacccaggtggagggccaggccaccaacctgcagaggctggccgagcccagccagctgctgaagagcgccatcgtgcacctgatcaactaccaggatgatgctgagctggccacccgggccctgcctgagctgaccaagctgctgaatgatgaggaccctgtggtggtgaccaaggccgccatgattgtgaaccagctgagcaagaaggaggccagccggcgggccctgatgggcagcccccagctggtggccgctgtggtgaggaccatgcagaacaccagtgacctggacacagcccgctgcaccaccagcatcctgcacaacctgagccaccaccgggagggcctgctggccatcttcaagagcggcggcatcccagccctggtgaggatgctgagcagccctgtggagagcgtgctcttctacgccatcaccaccctgcacaacctgctgctgtaccaggagggcgccaagatggctgtgcggctggctgatggcctgcagaagatggtgcccctgctgaacaagaacaaccccaagttcctggccatcaccacagactgcctgcagctgctggcctacggcaaccaggagagcaagatcctgacagccaccgtggacaatgccaacatcctgctgcagattgacaatgcccggctggccgcagatgacttccgcaccaagtttgaaacagagcaggccctgcggctgtctgtggaggccgacatcaatggcctgcggcgggtgctggatgagctgaccctggcccgggctgacctggagatgcagatcgagaacctgaaggaggagctggcctacctgaagaagaaccacgaggaggagatgaatgccctgcggggccaggtgggcggggagatcaacgtggagatggatgctgcccctggggtggacctgagccgcatcctgaatgagatgagggaccagtatgagaagatggccgagaagaacaggaaggatgctgaggactggttcttcagcaagacagaggagctgaaccgggaggtggccaccaacagcgagctggtgcagagcggcaagtctgagatcagcgagctgcggaggaccatgcaggccctggagattgagctgcagagccagctgtccatgaaggccagcctggagggcaacctggccgagacagaaaatcgctactgtgtgcagctgagccagatccagggcctgattggctctgtggaggagcagctggcccagctgcgctgtgagatggagcagcagaaccaggagtacaagatcctgctggatgtgaagacccggctggagcaggagatcgccacctaccgccgcctgctggagggggaggatgcccacctgacccagtacaagaaggagcctgtgaccacccggcaggtgaggaccatcgtggaggaggtgcaggacggcaaggtgatcagcagccgggagcaggtgcaccagaccaccaggtag

SEQ ID NO: 294447 - DNA, 2238 bp, Artificial Sequence
  derived and/or modified sequence
atggaggtgatgaacctgatggagcagcccatcaaggtgaccgagtggcagcagacatatacatatgactccggcatccactcaggagcaaatacctgcgtgcccagtgtgtcaagcaaaggaatcatggaggaagatgaggcttgtggtaggcagtatactctgaaaaaaacaacaacttacacacagggggttccaccttcccagggggatctagaatatcagatgtcaacgaccgcgagggcgaaacgtgtgagggaagccatgtgtcccggcgtcagcggggaggacagcagtttgctgctcgcaacgcaagtcgagggccaagctacgaacctccaaaggctggccgaaccttcgcaactgttaaaaagtgccattgtgcacctgattaactaccaagatgacgcagaactggccacgcgtgccctgccagaacttaccaagttacttaatgatgaagaccccgtcgtggttaccaaggcagccatgattgtaaatcagctgtcaaaaaaagaggcttcgcggcgggcactgatgggcagccctcagttggttgctgccgtcgtaagaacaatgcagaacacttctgacctcgatacagctcgatgtacaacttctattctccacaacctgagccaccaccgggaaggcctgcttgcaatctttaagagcggcggaattcctgcactggtacgcatgctatcctccccagtagaatcagtgttattctatgcaattactactctgcacaatctgctgctgtaccaggagggcgcgaaaatggccgtgcgcctggcggatgggctgcagaagatggtgccactgctgaataaaaacaaccctaagttcctcgctatcactaccgattgtctgcagttgttagcttatggtaatcaggagagcaagctcattatcctggcaaacggcgggccccaggccctcgtgcagattatgagaaactacagttacgagaagttgttgtggaccacgtccagagtgcttaaagttctttcggtttgtccctctaacaagccagctatcgtggaggctgggggcatgcaagcccttgggaagcacctgacctccaacagcccaagactggtacagaactgcctgtggaccctgcggaacctcagcgacgtcgccactaaacaggagggactggagtcggtactgaagatccttgtcaatcagctgtccgtcgacgacgttaatgtgctgacctgtgccactgggaccctttcaaacctgacgtgtaacaacagcaaaaataagacgttagtgacccaaaactcaggggtggaggctttaattcacgccatcctgcgggcgggggataaggatgatataacggaaccggcggtttgtgctttgcggcacctcacctcccggcaccctgaagcagagatggcccagaactccgtcagactgaactatggtatccccgcgatcgtgaaactactgaatcaaccaaaccaatggcctctggtgaaagccactattggcttgatccggaatctcgccttgtgccccgccaaccacgctccattgcaggaagccgccgtgattccacgcctagtacagctgttggtgaaagcgcatcaggacgctcaaagacatgtagccgccgggacccagcagccctacacagatggggtacgaatggaagagattgtggagggttgcacaggggcactgcatatcctagctcgagatcctatgaataggatggagatttttcggctgaataccattcccctcttcgtgcagttgctgtactcctcagttgaaaacatccagcgcgtagcagctggagtcttgtgtgagctagcccaggataaagaggctgctgatgctatagacgcagagggggcatcagccccactgatggagctgttacacagccgcaatgagggcacagccacatatgcggcggcagttctgttccggatctcagaggacaagaacccggattatcgtaagagggtgagcgtggaactgacgaactccctgttcaaacacgacccagcagcgtgggaagctgcgcaaagcatgatccctatcaacgaaccttatggagatgacatggatgcgacgtacagacccatgtatagttccgatgtcccactggaccctttggagatgcatatggatatggacggcgactatccaatagacacgtacagtgatggactgcgaccaccttaccccactgcagaccacatgctagcatag

SEQ ID NO: 294448 - DNA, 2238 bp, Artificial Sequence
  derived and/or modified sequence
atggaggtgatgaacctgatggagcagcccatcaaggtgaccgagtggcagcaaacgtacacatacgacagcgggatacatagcggggcaaacacatgtgtgcctagcgtttcgtcgaaaggtatcatggaagaagacgaggcgtgtgggcgccaatacacacttaagaagacaacgacctacacacagggtgtgcctccttctcagggagaccttgagtatcagatgtctacaacagcgagagcaaagcgtgtaagagaggctatgtgcccaggagtctccggagaggattcaagtctgctgctggcgacccaggtggaggggcaggcaactaatctacagaggcttgctgagccttctcagctgctgaagagcgccatcgtccatctcatcaattatcaggacgacgccgagctggcgactagggccctgcctgaactcacaaaactcctgaatgatgaagatccagtcgtggtgaccaaggccgccatgatcgtgaatcagctgagcaaaaaagaagcatctcgtagagccctcatggggagtcctcagctggtggcagccgtggtccggactatgcagaatacaagtgatctggacacagctcgatgtacgacgagcatcctgcacaacctttctcaccatcgagaaggcctcctggctattttcaagagcggcggaatccccgccttagtcaggatgctgtcctccccagtagaaagtgtactgttttacgcgataactactctacataaccttctcctttatcaggagggggctaaaatggccgtcagactggctgatggccttcagaagatggttcccttgctgaacaagaataaccctaagttcctggcaattacaacggattgtctgcaattactggcttacggaaaccaagagtctaaacttatcatcctggctaatggcggcccacaggctctggttcagattatgcgcaactattcctacgagaagctcttgtggaccaccagccgtgttctcaaggttctcagtgtgtgcccttctaataagcctgccatcgttgaggccggaggaatgcaggccctcgggaaacatttgacctccaactccccacgactcgtgcagaactgtctttggacacttcggaatctgagtgatgtggctaccaaacaggaagggttggagagtgtgttaaagattctggtgaaccagctttccgtggacgacgtaaatgtgctgacctgcgcgacaggaactttgagcaacctgacgtgtaataactccaagaacaaaacacttgttacacagaattccggcgtggaggctttgattcacgcaatcctcagagcaggcgataaggacgatattaccgagccagctgtctgtgctctcagacacctcacttcccgacaccccgaggccgaaatggctcagaactctgtccgcctaaattacggcattcctgccattgtcaaactcctgaatcagccgaatcaatggccactagtcaaagccaccatagggcttatccgcaatttagccttgtgccctgccaaccacgcccccttgcaggaggcagctgtgatccctcggttggtccagctgctcgtgaaagcccaccaggatgcccaaagacatgtagccgctggcacccaacagccgtatactgatggtgtgcgaatggaggaaatagtagagggctgtaccggtgccctgcatattctcgcaagagatccaatgaacagaatggagatattccgccttaataccattcccctatttgtgcagctgttatattcttctgttgaaaatatccagagagtggcagcaggcgtcctctgcgaactggctcaagataaagaagctgccgatgcaatagacgcagagggcgcatctgcacctctcatggagctgttacattcaaggaatgaagggactgcaacatacgctgccgcggtcctgttccggatttccgaagacaagaaccccgactatagaaaacgtgtgtctgttgaattgacaaattcgctgttcaaacatgatcctgccgcttgggaagccgcacagtctatgattcccatcaacgaaccctatggagacgacatggacgcgacatatcgccccatgtactcttcagatgtgccactcgatcccctggaaatgcatatggatatggatggggattaccctatcgatacctactcagacgggttgagaccaccttatccaacagccgatcacatgctcgcgtag

SEQ ID NO: 294449 - DNA, 2238 bp, Artificial Sequence
  derived and/or modified sequence
atggaggtgatgaacctgatggagcagcccatcaaggtgaccgagtggcagcaaacatatacttacgatagcggtattcattcgggggccaacacttgtgtgccaagtgtgagttcaaagggtataatggaggaagacgaagcctgcggccgccaatacaccctcaagaagacaaccacatacacccagggcgtccctccaagccagggcgacctcgaataccagatgtctaccactgcacgcgctaagcgtgtacgggaagctatgtgtcctggcgtctccggcgaagatagcagtctcctactcgccacgcaggttgagggacaagccaccaatctgcaaagactcgccgagccgagccagcttcttaaatctgctattgtgcatctgatcaactatcaagacgacgccgagctagcaacccgcgcccttcccgagttaacgaaactgttaaatgacgaggatcccgtggtcgtgacaaaagcagccatgattgtcaatcaactgtctaaaaaagaagcttcccgccgagctctcatgggcagtcctcagctggtggccgcggtggtgagaactatgcaaaataccagcgacctggataccgcccgctgcaccacctccatattgcataatctgagccatcacagggagggactcctcgctatattcaagtccgggggaatccctgctctggtgcgcatgctgtcgtcaccagtcgaatccgtgcttttttatgctattactaccctccacaatttgctcctgtatcaggagggagcaaagatggccgtgcgactggccgatgggttacagaagatggtgccactgctgaataagaataatcctaagttcctggctattactacagattgtctgcagcttctagcctatgggaaccaggagtccaagttgatcatcctagcaaatggtgggccccaggcactggttcagataatgcggaactatagttatgaaaagctgctttggaccacatcccgcgtcctgaaggtgctgagtgtctgtccatccaataaaccggctatagtggaagcaggcgggatgcaggccctgggtaaacacctaaccagcaattccccgagattagtgcagaactgtctttggacactgcggaacctatcggacgtcgctacaaagcaggagggcctggagagcgtgctgaagatactagttaatcaacttagtgtcgatgatgtgaatgtcctaacttgcgccactggaacactgagtaatctcacttgtaacaacagcaaaaacaaaacactcgtcacgcagaacagtggagtggaggccctgattcatgccatattgcgggcgggggataaagacgacatcaccgaaccagctgtgtgcgccctgcggcatctcacatcacggcaccccgaagctgagatggctcagaactctgttcgcctgaactacgggatcccggccatcgtgaagctgctgaaccagcctaaccagtggcctctcgtcaaagcaaccatcggtttgatacgcaatctggccttgtgtccagcaaatcacgcacccctgcaggaagccgccgtgatccctcgcctggtgcagctgctcgtgaaggctcaccaggacgcccagagacacgtagccgcaggaacccagcagccttacacggatggagtgcggatggaagagatcgtcgaaggctgtactggggcactccatatattagccagggacccaatgaaccggatggaaatctttcgcctgaatactattccgctgtttgtccaactgctctattcaagtgtcgagaatatccagcgggtcgctgctggggtgctgtgtgaactcgcccaagacaaagaagctgctgatgccatcgacgccgaaggggctagtgcgcctcttatggaattactccattcccgtaacgagggaaccgccacatacgccgccgccgtgctgttccggatttccgaagataagaatcccgattaccgtaaaagggtttctgtggaactaactaactcgctatttaaacacgaccctgccgcttgggaggcggcacagtccatgattcccataaacgagccctatggggacgatatggacgctacctacagaccgatgtacagtagcgacgtcccgctggatcctctcgagatgcatatggatatggacggggattatcccattgacacctattcagatggactcagaccaccatatccgaccgcggaccatatgctagcctag

SEQ ID NO: 294450 - DNA, 834 bp, Artificial Sequence
  derived and/or modified sequence
atggaggtgatgaacctgatggagcagcccatcaaggtgaccgagtggcagcagacctacacctacgacagcggaatccattctggagccaatacttgtgtgccatctgtgtcaagcaagggcattatggaagaggacgaggcctgcgggagacagtacaccctgaagaaaaccacaacatacacacagggagtgcctccatctcagggcgacctcgaatatcagatgagcaccaccgctagagcaaaacgggtgagggaggccatgtgccctggggtaagcggggaggactcaagccttctgctcgccacccaggtggagggtcaggccactaaccttcagagactcgcggaaccctcccagctgttgaagagcgccatcgtgcacctgatcaactaccaagatgacgccgaacttgcaacaagggctctcccagaactaacaaaactgcttaacgacgaagacccggtagtagtgaccaaggctgcgatgatagtgaatcagctgtcaaagaaagaagcttcccggagggccctgatggggagtccccaacttgtggccgctgtggtgcggacaatgcagaacacttcagatttagacactgcccgatgcacaacgagtatcctccacaatctctcgcatcatagggaggggttgctggcaatctttaagtcaggaggcattcctgcacttgtgcgaatgctatctagcccggtggaatctgtcctcttctatgccatcaccacactgcacaatctgctgctgtaccaagagggggcaaaaatggcagtcaggctggctgacggacttcagaagatggtgcccctgctgtag

SEQ ID NO: 294451 - DNA, 708 bp, Artificial Sequence
  derived and/or modified sequence
atggaggtgatgaacctgatggagcagcccatcaaggtgaccgagtggcagcagacttacacatatgactccggcatccatagcggagctaacacatgtgttccctctgttagctctaagggaataatggaagaggatgaggcatgtggtaggcagtacacactgaagaagactactacttatactcagggtgtacccccttcgcagggggacctggagtaccaaatgtcaacaaccgcccgcgccaagcgggtcagggaggctatgtgcccaggggtctctggcgaagatagctcccttctccttgctactcaagttgagggacaggcaacgaatcttcaaaggttggccgaaccgagtcaattgctcaagtctgctattgtccacctgattaactatcaagacgacgcagaactggccacccgtgccctccccgagctgacgaaactgctcaatgatgaggacccagttgttgtcaccaaggcagccatgattgtgaatcagctcagcaagaaggaggcctcacggcgcgcccttatggggagcccacaattagtagctgccgtcgtgcggaccatgcagaataccagtgatttggacaccgccaggtgtacaacttctatcctccacaatttaagtcaccatagagagggcctactggctatttttaagtccggcggcatcccagctctcgtcaggatgctgtag

SEQ ID NO: 294452 - DNA, 891 bp, Artificial Sequence
  derived and/or modified sequence
atggaggtgatgaacctgatggagcagcccatcaaggtgaccgagtggcaacaaacgtatacatatgattctggaatccattcgggagcaaacacctgtgtgcccagcgtttcttccaaagggatcatggaagaagacgaagcttgtgggaggcagtatacactgaagaagaccactacttacactcagggggtgccgccaagtcaaggggacctagaatatcagatgtctaccaccgccagggccaagcgagtccgcgaggccatgtgcccgggcgtctcgggtgaagattccagccttcttctggccacacaagtggagggtcaagcaactaacctgcaacgcctcgcggaacccagccagctgctgaaaagtgcgatcgttcacttgataaactaccaggatgacgcggagctggcaacccgcgcacttccagagcttaccaagctactgaacgatgaggatcctgtcgtcgtgacaaaagccgctatgattgtgaaccagctgtccaagaaggaggccagccggcgggctctgatgggctcaccacagctggttgcagccgttgtccggaccatgcaaaacacatcagatctggacactgctagatgcacaacctctatcttacacaacctaagccaccatcgcgaggggctgctggccattttcaaatccggcggcataccagctctggttagaatgctgtcaagccccgtggaaagtgtcctgttttatgctatcacaaccctgcacaatctgctcctttatcaggaaggggctaagatggcagtgaggctggccgatgggttacagaaaatggtgcctttgctgaacaaaaataatcctaaatttctggcgatcaccacggactgcctgcagttattggcctag

SEQ ID NO: 294453 - DNA, 261 bp, Artificial Sequence
  derived and/or modified sequence
atggaggtgatgaacctgatggagcagcccatcaaggtgaccgagtggcagcagacttatacctacgattcaggcatacactctggggctaatacatgtgtgccttcagtgagttccaagggcatcatggaggaggacgaggcctgtggacggcagtacacacttaagaagaccacgacatacacacagggggtgccgccaagccaaggagatctcgaataccagatgagcacaactgctcgagccaaacgagtgaggtag

SEQ ID NO: 294454 - DNA, 897 bp, Artificial Sequence
  derived and/or modified sequence
atggaggtgatgaacctgatggagcagcccatcaaggtgaccgagtggcaacagacatacacctatgacagcgggatacactcaggggctaatacttgtgtgccctctgtttcctccaaaggcatcatggaggaagacgaggcctgcgggcggcagtatacactgaaaaagacaaccacttacacacagggagttccgccatctcagggcgaccttgaataccaaatgtcgactacagcaagggccaaaagagtaagggaggctatgtgcccaggggtctctggcgaagattcttccctgctgttagccacccaggtggaggggcaagcaaccaacttgcagcggctggccgagccttcccagcttctaaaatccgctatcgttcatctgatcaattatcaagatgacgccgaactggcaacacgtgcgctccccgaactcaccaagttgctcaacgacgaagatccagtggtcgtgactaaggcagcaatgattgtgaatcaactgtctaaaaaggaggcgtcacgccgggccctaatgggaagccctcagctggtggcggcagtcgtgagaaccatgcagaacacttctgatctagatacagcccgctgcaccacctcaatactgcacaatttatcacaccatcgcgaggggctgcttgcaattttcaaatccggaggaatcccagccctggttcggatgctgtcatcacctgtggaaagtgtgttattttatgccattaccacgttacataatctgctactgtaccaggagggcgccaaaatggcagtgagattggccgatggtctgcagaagatggtgcccctgcttaataaaaataaccctaagtttttagccattactacagactgtctccagttacttgcctacggctag

SEQ ID NO: 294455 - DNA, 1776 bp, Artificial Sequence
  derived and/or modified sequence
atggaggtgatgaacctgatggagcagcccatcaaggtgaccgagtggcagcagacctatacttacgatagtggcattcacagcggcgctaacacatgtgtcccatctgtgagcagcaaaggaatcatggaagaagatgaggcctgcggccgccaatatactttaaagaagaccacaacgtatacgcagggcgttcctccttcccagggtgaccttgaataccagatgagcactaccgcgcgtgcaaagagagtcagagaagctatgtgtcccggggtctccggagaggattcttcccttctgctggcaacgcaagttgaaggtcaagctactaacttacagagactggctgaaccaagccagctcctgaagtctgccatcgtgcatttgatcaactaccaggatgatgcggagttggcaacccgggccttgcctgagttgaccaaattgctgaacgacgaggacccagtggtcgtaacaaaagctgctatgatcgtcaatcagctttctaaaaaagaggccagccggagggctctgatgggcagtccccaactggtggctgctgtcgtcagaactatgcaaaacactagcgacctggatacagcccgatgtactaccagtatcttacacaatctttcacaccaccgcgaaggattgcttgccatcttcaagtctggaggcatccccgcgctggtgaggatgttaagctcacctgtggagagtgtcctgttttacgctatcactaccctgcacaatctgctcttataccaagaaggcgctaagatggccgttaggctcgcagatgggctgcagaagatggttccccttttgaataagaacaacccaaagtttttagccatcacaacggactgcctacagctgctggcttatggtaaccaggagtcaaagatcctcactgcaaccgttgacaacgctaacattctcctgcagattgacaatgcccggctggctgctgacgattttaggaccaagtttgagaccgaacaggcccttcggttaagcgtggaggccgatatcaatggcctcaggcgcgtgctggacgagcttacgctagcgcgtgccgatctagagatgcagattgagaatctgaaggaggagttggcgtaccttaagaagaaccatgaggaagagatgaacgcgcttaggggccaagtggggggagagataaacgtggagatggatgcagcgccgggcgtagatctctcaaggatactcaacgagatgcgcgatcaatatgaaaagatggctgagaagaaccgcaaagatgctgaggattggttcttttcaaaaaccgaagagctcaatcgcgaggtggcgactaattccgaactagtgcagtctggaaaaagtgaaatttccgagctgcggagaaccatgcaggcactggaaattgaactgcagtcacagttgtccatgaaggcctctttagagggaaatctggctgagaccgagaatcgttattgtgttcaactgtcccagattcagggcctgataggtagcgtcgaagagcaactggcccagctgcgctgcgagatggagcagcaaaatcaggagtacaagatactgttggacgtgaagactaggttagagcaggaaatagctacctatcggaggctccttgaaggagaagacgcccacctgacacagtataagaaggaacccgtgacgacacgacaggttaggacaattgtggaagaggtgcaggacggaaaggtgatatcttctcgtgaacaggtccaccagacgactcggtag

SEQ ID NO: 294456 - DNA, 2238 bp, Artificial Sequence
  derived and/or modified sequence
atggaagtgatgaacctgatggagcagcctattaaagttaccgaatggcagcaaacctacacgtatgactcgggcattcatagtggtgccaatacttgtgttcccagcgtttccagcaaaggcatcatggaggaggatgaggcttgtgggagacaatacaccctgaagaagaccactacctacacgcaaggagttcctcccagccagggggatttggagtaccaaatgtccactacagctagggctaaacgcgtgcgagaagcaatgtgtccaggagtcagcggggaggattcctccctactcttagcaacacaagtcgagggccaagcaactaatctgcagcggctcgccgagccctcccagctgctgaaaagcgcaatcgtgcacttaattaactaccaggacgacgcagaacttgccacccgggcactccccgaactaactaaattgctgaatgatgaggatcccgtcgtggtgaccaaggcagccatgatcgttaaccagctcagtaagaaagaggcctcaagaagggcacttatgggaagcccacagctcgtggccgcagtggtgcggactatgcagaacacttccgatctggacacggcacgatgcactaccagcatactgcacaacctcagtcaccacagagagggcctgctggcaatttttaagtccggaggcatcccggctctagtgagaatgctgtccagcccagtcgagagcgttttattctatgccatcactacactccacaaccttctgttgtatcaagaaggtgccaaaatggctgtgcggctggctgacgggctccaaaaaatggtacccctgttgaacaaaaataaccccaaatttctggcgatcacgactgactgcctgcaacttctagcatacggaaatcaggagtccaaactcatcatactcgcaaatggtggcccacaggctctggtgcaaatcatgagaaactattcatatgaaaaactcctgtggacaacttcaagagttttaaaggtcctctctgtctgcccttctaacaaaccggcaatcgtggaagccggaggcatgcaggctcttggcaagcatctgacctcgaacagcccaaggctggttcagaactgtctatggacactcaggaatctgagcgatgtcgcaaccaagcaggagggactcgagagtgtgctgaaaattttagtgaaccaactctctgtagatgacgtcaatgtgctcacttgtgctacaggaacactctcaaacctgacgtgcaacaacagcaaaaacaagaccctggtgacgcaaaacagcggagttgaggcgctcatccacgcgattctgagggcgggagacaaggatgatatcaccgagcccgctgtttgcgcactgcggcacctcacttctcgacacccggaggcggaaatggcccaaaactcggttagactgaattacggcatccccgcaatcgttaagctacttaaccaacctaaccaatggccccttgttaaagccactatcgggctgattcgcaacctcgctttgtgtccagcaaatcacgcccctttacaggaggccgcagtcattccgagactggttcaacttctggtcaaggctcatcaagacgcacaacggcacgtggctgccggtacacagcagccatacactgacggtgtacgcatggaagaaattgtcgaaggttgcactggagctctgcatattctggccagagatcctatgaatagaatggagattttcagattgaacaccataccactgtttgtgcagctgctgtactcttcagtggagaacatccagagggttgccgctggcgttctgtgtgagctggcgcaggacaaggaggccgctgacgcgattgacgccgagggtgccagtgcccctttgatggagttgctgcattcacgaaatgagggaaccgctacctacgctgcggcagtgctgttcagaatctcagaggataagaatcccgactatagaaagagggtctccgtggagttgaccaattcattgtttaagcacgacccagctgcatgggaagccgctcagagcatgattcccatcaacgaaccgtacggggacgacatggacgcaacatataggcccatgtattcaagcgacgtgcctctggacccactagagatgcacatggacatggacggcgattaccccatagacacatactcagatggcctcaggcccccatatcctacagcggatcacatgctcgcatag

SEQ ID NO: 294457 - DNA, 2238 bp, Artificial Sequence
  derived and/or modified sequence
atggaagtgatgaacctgatggagcagccaattaaagtgacggaatggcagcaaacttacacatacgatagcggtattcattcgggcgctaatacatgcgtgccctcagtatcttccaagggcattatggaggaagatgaagcttgtggtcgtcaatataccttaaaaaagacgactacatatacacagggagtgccccctagtcagggagacctggaataccaaatgagtacaactgccagggcaaaaagagtacgcgaagcaatgtgccctggcgtgtctggagaagattcctcccttctgctcgcaactcaagtggagggtcaagccacaaatcttcagaggttggcagaaccttcgcagctgctgaaaagcgccatcgtgcacctgattaactatcaagacgatgccgaactggccactcgtgctctgcccgagctgacaaagctgttgaacgatgaggatccagttgtcgtaactaaggccgctatgatcgtgaaccagttgtctaagaaagaggcctctcggagggccctaatgggcagcccccaattggttgccgcagtggttcgcacaatgcagaatacatccgacctggatactgcaagatgtaccacttctattctacacaacctgagccaccatcgtgaggggctactggccatcttcaagagcgggggaatcccagccctggtcagaatgctctcaagcccagtggaaagcgtcctgttctacgccattacaacactgcacaacctacttttataccaggagggagcgaaaatggcagtcaggctggctgatggacttcagaagatggtcccgctgcttaataagaacaatccaaagttcctggcaatcactacagactgtcttcagctcctggcctatgggaaccaagaatcaaagctgataattttggccaatgggggtccccaggccttggtacagatcatgcgcaattacagctacgagaagttgctttggacaacctcccgggtgttgaaggtgctatctgtctgccctagcaacaaaccggctattgtggaagcagggggtatgcaggcacttggcaagcatttaacatctaattctccaaggttagtgcagaactgcctctggacattaaggaacctctccgatgtggccacaaagcaggaagggctggagtcggtcttaaaaattctggtgaaccagctgagcgtagatgacgtcaatgtcctaacttgcgctaccggaacccttagcaacctgacctgcaacaatagtaaaaacaagaccttggtgacgcagaactccggagtggaagcactcatacacgcgatcctccgcgctggggataaagatgacataacagagcctgcagtttgtgctcttcgacaccttacgtccagacaccctgaagccgaaatggcacagaactctgtccgactgaactatggtatccccgcaattgtgaagcttctcaaccagccaaatcagtggccattagttaaagctactataggcctcatacggaacctggcattgtgccccgcaaaccatgcccctctacaagaggcagcagttattcccaggcttgtccaactgttggttaaagctcatcaggacgcacagcggcacgtggcagcagggacacagcagccatatacagacggggttaggatggaggagatcgtggagggatgcactggcgctctgcacattctagcaagggatccaatgaatcggatggagatattccgactgaatacaattcccctgtttgtccagctcctttactcgtctgtggagaacattcaacgcgtggcagccggagtcttatgtgagttagcacaggacaaggaggcagcagatgcaatcgacgctgaaggcgcatctgcacctctgatggaactcctccactctaggaacgagggcacagccacttacgcagcggctgtgctcttcaggatctctgaggacaagaaccctgattacaggaaaagggtgtctgtcgaactgacaaattctctgttcaagcacgaccccgctgcttgggaagccgcacagtcaatgattccgatcaacgaaccttacggtgacgatatggatgccacctataggccgatgtacagcagcgacgtgccactggaccccctggagatgcacatggacatggacggggactatcccatcgacacttattccgacggcctgcgccctccttaccccacagctgatcatatgctcgcctag

SEQ ID NO: 294458 - DNA, 2238 bp, Artificial Sequence
  derived and/or modified sequence
atggaagtgatgaacctgatggaacagccaatcaaagttacagaatggcaacagacttacacctatgacagtggtatacatagcggtgctaacacttgtgtaccaagtgtgtcatccaagggaatcatggaagaggatgaggcatgcgggagacaatacaccctgaagaaaacaaccacctatacacagggggtcccaccatcacaaggggacctagagtaccagatgtctacaactgcccgtgcaaagcgggtgcgggaagcgatgtgccctggggtgtctggggaagattcctcgttgcttttagccactcaagtagaaggtcaggctaccaacttgcagcggctcgcggaacccagtcaactgctgaagagcgcaattgtgcacctgattaattaccaggatgatgcagaactcgcaacacgagccctgccagaacttactaaactccttaacgatgaagatccagtggtcgtcacgaaggccgcaatgatcgtgaatcagctttccaaaaaagaggcctcacggagggccctgatgggtagtccacagctggtggccgcagttgtcaggacaatgcagaatacgagcgaccttgataccgcccgatgtactacttcaatattacataatttaagccatcaccgagaagggctcctagccatctttaagagcggaggcatccccgcacttgtaagaatgctcagcagccccgtggaaagcgtcctgttttatgctattaccaccttgcacaacctgctattgtaccaggagggagccaaaatggccgtcaggcttgccgatggcctccagaagatggtgcccctattgaacaagaacaatccaaagttcctagccatcactaccgactgccttcagctcctagcatacggaaatcaagaaagcaagttgatcatcttggcaaacggaggccctcaggctctggtccagattatgcggaactattcctatgaaaaactgctatggaccacaagccgtgtgctcaaagtcctgagcgtttgtcccagcaacaagccagccattgtagaggcaggcggaatgcaggctttgggcaaacatctgacatccaactcccccagacttgtgcaaaactgtctgtggactcttaggaaccttagtgatgtggctactaagcaggagggcctagagtctgtcctgaagattctggtgaaccagctatccgtagacgacgtcaacgtcctcacatgcgcaaccggcaccctttctaacctcacttgcaacaactctaagaacaagaccctggtaacacagaattcaggagtcgaagccctgatccatgcaatcctccgtgctggagataaggacgatatcacagagccagcggtctgcgccttgcgccatttgacatcacgccatccagaagccgagatggcccaaaattccgtccggctgaactacggcattcccgctatcgtgaagctacttaatcaacccaaccaatggcctttggtaaaggccaccatcggcttaattagaaacttggccctctgtcccgctaatcacgcgccactgcaggaggccgctgtgatacccaggctcgtccagctactcgtcaaagctcaccaagacgctcagcggcacgtggccgcaggcacccaacagccctacaccgatggggtcagaatggaagagattgtagaaggttgtacaggggcattgcatatcctggctcgggacccaatgaatcgaatggaaatattccggctgaataccatacctttatttgtgcaacttctgtatagttccgtggagaatatacagagggtggccgcaggcgtcctttgtgaactcgcccaggataaggaggccgctgacgcaatcgacgccgagggcgcttctgctcctctgatggagctgctccattcccgcaatgaaggcacggcaacttatgcagcagctgtactgtttcggataagcgaagacaaaaatcctgactatcgaaaaagggtaagcgtcgagctcacaaacagtctgttcaagcacgatccagcagcatgggaggccgctcagtccatgatcccaattaatgagccatacggggatgacatggatgctacgtaccgcccaatgtattcttccgatgtgcctttagatcctctagagatgcacatggatatggatggtgattacccaatcgatacttatagtgacggcctgcggcctccttaccccaccgcagaccatatgctagcttag

SEQ ID NO: 294459 - DNA, 834 bp, Artificial Sequence
  derived and/or modified sequence
atggaggtcatgaatctcatggagcagcctattaaggttacggagtggcaacagacgtatacttatgacagcggtatccactctggagccaacacatgtgtgccttctgtgtctagcaaagggattatggaggaggacgaagcttgtggacggcagtacactctgaaaaaaactactacctacacgcagggcgtgcccccatcacagggagacctcgagtaccaaatgtccaccaccgcacgggctaagcgggttcgggaagcaatgtgcccaggcgtgtcaggggaggactcgtctttgctactggcaacccaagtggaggggcaggctacaaatctgcaaaggctagctgagccttcacagctgctgaaatcagccatagttcatcttatcaattatcaagacgacgccgaattagctacaagggcgctcccggaactgacgaagttgcttaatgatgaggatcctgtggttgtgacaaaagcagcaatgatagtaaaccagctcagcaaaaaggaggcctcccgcagggcacttatgggctctccccagctggtcgcagctgtagtaagaactatgcagaacacttctgatctggacacagctaggtgcaccacctccatcctccacaacctctcccaccatagagagggcctgctcgcgatcttcaagagtggagggatccctgccctggttaggatgttgtccagtccagttgaatctgtcctcttttacgctatcacaaccttgcacaatcttctcctttaccaggaaggggcaaagatggcagtaaggttagctgacggtctgcagaaaatggtgcctctgctctag

SEQ ID NO: 294460 - DNA, 708 bp, Artificial Sequence
  derived and/or modified sequence
atggaggtcatgaatttgatggagcaacccattaaagtgactgagtggcagcagacatatacgtacgacagtggaatccacagcggtgccaatacctgcgtcccatccgtatcatctaaagggataatggaagaggatgaggcttgcggccgacagtacactttaaagaagaccaccacttacactcagggagtgcctccaagccagggagacctggagtatcaaatgagcactacagcacgggctaagagggtgcgggaggccatgtgcccgggagtttccggcgaggattcttctctcctcctggctacacaagttgaaggacaggcaaccaacctccaacggctggctgaaccatctcaactgctgaagtccgccattgtgcatctcataaactaccaggatgacgctgagctagcaacaagggcgctgcccgagctcaccaaactccttaatgacgaggaccctgtggtcgtgacgaaagccgcaatgattgtcaaccaactgtcaaaaaaagaagcatcgaggcgtgcgcttatgggctcaccccaactcgtggcggcagtggtgcgcacaatgcagaatacatccgaccttgacacagccaggtgcactacctcgatcctccataatctctctcatcacagagaaggcctgctcgccattttcaaatctggtggtatccctgccttagtaaggatgctgtag

SEQ ID NO: 294461 - DNA, 891 bp, Artificial Sequence
  derived and/or modified sequence
atggaggtgatgaacttaatggagcagcccatcaaggttacggagtggcaacagacttatacttatgacagtgggatacattcaggagctaatacgtgcgtgccgtctgtctcttctaaaggtatcatggaggaagacgaagcttgcggcagacagtacacactgaaaaaaaccaccacatacacgcaaggagtcccccctagtcagggggacctggagtatcaaatgtccaccacggcccgagcaaagcgggtcagagaagcaatgtgtccaggcgttagcggcgaggactcttctctgcttctagcgacccaggtggaggggcaggccacaaatctccagcggttggctgagccgtctcagctgttgaaatctgccatcgtccacctcattaactaccaggatgatgccgagctggcaacgagggctcttcctgaattgacaaagctgttaaatgacgaggaccctgtcgttgtcaccaaagccgctatgatcgtcaatcagctgagcaagaaggaggcttcgcgcagggccctgatgggatccccgcagctcgttgcagctgtcgtgcggacgatgcagaatacaagcgatctcgacactgccagatgtaccacttcaatcctgcacaatttgagtcatcacagggaaggcctgttggcgattttcaaaagcggagggattccagcactagtaaggatgctttcaagccccgttgagtccgtgttgttctatgccatcacaacgttacacaacctactgctgtatcaggagggtgccaaaatggctgtgagactcgccgatggactccagaaaatggtccccctgctgaacaaaaataatcctaaattcctggccatcaccaccgattgtcttcagctgttggcatag

SEQ ID NO: 294462 - DNA, 261 bp, Artificial Sequence
  derived and/or modified sequence
atggaggtcatgaacttaatggaacagccgattaaggtgactgagtggcagcaaacgtatacatacgatagcgggatccacagcggcgcaaatacctgtgtcccatccgttagctcgaaggggatcatggaggaggatgaggcctgcgggcgacaatacacccttaagaaaacaaccacctatactcagggagtgcctccatcccaaggcgatcttgagtatcagatgagcactaccgctcgcgcaaagcgggtgcgctag

SEQ ID NO: 294463 - DNA, 897 bp, Artificial Sequence
  derived and/or modified sequence
atggaggttatgaacctgatggaacagcctataaaggtgaccgagtggcagcagacctatacgtatgattctggtatacattcgggcgcaaatacctgcgtcccatccgtgtcatccaagggcatcatggaagaggatgaagcctgcggacggcagtataccttgaaaaagaccacaacctatacccagggcgtgcccccttcccagggtgatctcgaatatcaaatgagtacaacagctagagcaaaaagagtgagggaagccatgtgtcctggcgtctccggggaggattcttcacttctgctcgccacccaggtcgagggtcaggccaccaacctccagagactggcagagcctagtcaactactcaagtcagcaattgtccacctgatcaattaccaggacgacgctgagttagccacccgtgctctaccagaactcacaaagttgctcaatgatgaggaccctgtggtagtgaccaaggcagccatgatagtgaaccagctgtccaagaaggaagcatcacgaagagcattgatgggatctccccaactggtggccgcagttgttaggactatgcagaatacatctgatctggatactgctcgctgtacgacgagcatactccataacttaagccatcaccgcgagggtctcctcgcaatctttaaaagcggcggaattccagccctggttagaatgctgtcgagcccagtcgaaagtgtcctgttttatgccatcactactttgcataatttactgctctatcaagaaggggcaaagatggcagtgagactggccgacgggttgcagaaaatggtgccactattgaataaaaataaccccaagttcctcgcaatcactaccgactgcctgcagctgcttgcctatggctag

SEQ ID NO: 294464 - DNA, 1776 bp, Artificial Sequence
  derived and/or modified sequence
atggaggtgatgaacctgatggaacagccaattaaggtgaccgagtggcagcagacctacacatacgacagtgggatacacagcggcgcaaatacctgcgtccccagcgtgagctctaagggcatcatggaagaggatgaggcttgtggtcggcaatatacattaaagaaaaccaccacctacacccagggcgtgccccctagtcagggggatctggagtaccagatgtctacaaccgcgagggctaagcgagtgcgcgaagcgatgtgtcctggcgtgtctggcgaggactcctcactcctcctggctacccaagttgagggccaggcgactaatttacaaaggctggctgagccatcccagctcctgaaaagcgctattgtgcacctgatcaattatcaagatgatgctgaactcgccacccgagctctgcctgagctcacaaagctattgaatgacgaggaccctgtggtggtgaccaaagctgcaatgatcgtgaatcagttatctaagaaagaggctagccgcagggccctgatgggatccccacaacttgtggcagccgtggtgaggacaatgcagaatacctctgatctggacaccgctcggtgtacgactagcattctgcacaatctctcccaccaccgggaaggcttattggcgattttcaagtccggtgggatccccgcactagttcgaatgttgagcagcccggtagagagcgttctgttctatgccataactactcttcacaaccttctcttataccaggaaggcgctaagatggctgtccgtctggccgacgggctgcagaagatggtccctctcctgaacaaaaacaatcctaaattcctggccataactaccgactgtctgcagttgcttgcgtatgggaaccaggaatctaaaatcttgaccgcaaccgtcgataacgccaacattctgttacagattgataacgcacggctggcagccgatgatttcagaacaaaattcgagacggaacaggcactgaggctctcggttgaggccgacataaacggcctgcgcagagtgttggacgagctcacattagcaagagcagatcttgagatgcagattgaaaacctgaaagaggagctcgcttatcttaagaaaaatcatgaggaagaaatgaacgcgctgcgaggacaggtcggcggtgagattaacgtggaaatggatgccgctccgggtgtcgatctgagccggattctcaacgaaatgagggatcagtacgagaagatggccgaaaaaaaccgcaaggatgcagaagactggttcttctcaaaaacagaggaactgaaccgcgaagttgctacaaattccgagcttgttcagtccggaaagtcggagattagtgaattgaggaggaccatgcaggccctcgagatcgagctgcagtctcaactaagcatgaaggcctccttggagggaaacctggctgaaacagaaaatcgttactgcgtgcaactctctcagatccagggcctcattggctccgtagaggagcagctggctcaattacggtgcgagatggagcagcagaatcaggagtataaaatcctgctagacgttaagacccgcctggagcaggagattgccacatatcgccgactgctcgagggggaggacgcccatttgactcagtataagaaggaaccggtcacaacccgacaagtccgaactatcgtcgaagaggttcaggacggtaaagtgattagctctcgggagcaggtacatcagacgaccagatag

SEQ ID NO: 294465 - DNA, 834 bp, Artificial Sequence
  derived and/or modified sequence
atggaggtgatgaacctgatggagcagcccatcaaggtgaccgagtggcagcagacctacacctacgacagcggcatccacagcggcgccaacacctgcgtgcccagcgtgagcagcaagggcatcatggaggaggacgaggcctgcggcagacagtacaccctgaagaagaccaccacctacacccagggcgtgccccccagccagggcgacctggagtaccagatgagcaccaccgccagagccaagagagtgagagaggccatgtgccccggcgtgagcggcgaggacagcagcctgctgctggccacccaggtggagggccaggccaccaacctgcagagactggccgagcccagccagctgctgaagagcgccatcgtgcacctgatcaactaccaggacgacgccgagctggccaccagagccctgcccgagctgaccaagctgctgaacgacgaggaccccgtggtggtgaccaaggccgccatgatcgtgaaccagctgagcaagaaggaggccagcagaagagccctgatgggcagcccccagctggtggccgccgtggtgagaaccatgcagaacaccagcgacctggacaccgccagatgcaccaccagcatcctgcacaacctgagccaccacagagagggcctgctggccatcttcaagagcggcggcatccccgccctggtgagaatgctgagcagccccgtggagagcgtgctgttctacgccatcaccaccctgcacaacctgctgctgtaccaggagggcgccaagatggccgtgagactggccgacggcctgcagaagatggtgcccctgctgtag

SEQ ID NO: 294466 - DNA, 708 bp, Artificial Sequence
  derived and/or modified sequence
atggaggtgatgaacctgatggagcagcccatcaaggtgaccgagtggcagcagacctacacctacgacagcggcatccacagcggcgccaacacctgcgtgcccagcgtgagcagcaagggcatcatggaggaggacgaggcctgcggcagacagtacaccctgaagaagaccaccacctacacccagggcgtgccccccagccagggcgacctggagtaccagatgagcaccaccgccagagccaagagagtgagagaggccatgtgccccggcgtgagcggcgaggacagcagcctgctgctggccacccaggtggagggccaggccaccaacctgcagagactggccgagcccagccagctgctgaagagcgccatcgtgcacctgatcaactaccaggacgacgccgagctggccaccagagccctgcccgagctgaccaagctgctgaacgacgaggaccccgtggtggtgaccaaggccgccatgatcgtgaaccagctgagcaagaaggaggccagcagaagagccctgatgggcagcccccagctggtggccgccgtggtgagaaccatgcagaacaccagcgacctggacaccgccagatgcaccaccagcatcctgcacaacctgagccaccacagagagggcctgctggccatcttcaagagcggcggcatccccgccctggtgagaatgctgtag

SEQ ID NO: 294467 - DNA, 891 bp, Artificial Sequence
  derived and/or modified sequence
atggaggtgatgaacctgatggagcagcccatcaaggtgaccgagtggcagcagacctacacctacgacagcggcatccacagcggcgccaacacctgcgtgcccagcgtgagcagcaagggcatcatggaggaggacgaggcctgcggcagacagtacaccctgaagaagaccaccacctacacccagggcgtgccccccagccagggcgacctggagtaccagatgagcaccaccgccagagccaagagagtgagagaggccatgtgccccggcgtgagcggcgaggacagcagcctgctgctggccacccaggtggagggccaggccaccaacctgcagagactggccgagcccagccagctgctgaagagcgccatcgtgcacctgatcaactaccaggacgacgccgagctggccaccagagccctgcccgagctgaccaagctgctgaacgacgaggaccccgtggtggtgaccaaggccgccatgatcgtgaaccagctgagcaagaaggaggccagcagaagagccctgatgggcagcccccagctggtggccgccgtggtgagaaccatgcagaacaccagcgacctggacaccgccagatgcaccaccagcatcctgcacaacctgagccaccacagagagggcctgctggccatcttcaagagcggcggcatccccgccctggtgagaatgctgagcagccccgtggagagcgtgctgttctacgccatcaccaccctgcacaacctgctgctgtaccaggagggcgccaagatggccgtgagactggccgacggcctgcagaagatggtgcccctgctgaacaagaacaaccccaagttcctggccatcaccaccgactgcctgcagctgctggcctag

SEQ ID NO: 294468 - DNA, 261 bp, Artificial Sequence
  derived and/or modified sequence
atggaggtgatgaacctgatggagcagcccatcaaggtgaccgagtggcagcagacctacacctacgacagcggcatccacagcggcgccaacacctgcgtgcccagcgtgagcagcaagggcatcatggaggaggacgaggcctgcggcagacagtacaccctgaagaagaccaccacctacacccagggcgtgccccccagccagggcgacctggagtaccagatgagcaccaccgccagagccaagagagtgagatag

SEQ ID NO: 294469 - DNA, 897 bp, Artificial Sequence
  derived and/or modified sequence
atggaggtgatgaacctgatggagcagcccatcaaggtgaccgagtggcagcagacctacacctacgacagcggcatccacagcggcgccaacacctgcgtgcccagcgtgagcagcaagggcatcatggaggaggacgaggcctgcggcagacagtacaccctgaagaagaccaccacctacacccagggcgtgccccccagccagggcgacctggagtaccagatgagcaccaccgccagagccaagagagtgagagaggccatgtgccccggcgtgagcggcgaggacagcagcctgctgctggccacccaggtggagggccaggccaccaacctgcagagactggccgagcccagccagctgctgaagagcgccatcgtgcacctgatcaactaccaggacgacgccgagctggccaccagagccctgcccgagctgaccaagctgctgaacgacgaggaccccgtggtggtgaccaaggccgccatgatcgtgaaccagctgagcaagaaggaggccagcagaagagccctgatgggcagcccccagctggtggccgccgtggtgagaaccatgcagaacaccagcgacctggacaccgccagatgcaccaccagcatcctgcacaacctgagccaccacagagagggcctgctggccatcttcaagagcggcggcatccccgccctggtgagaatgctgagcagccccgtggagagcgtgctgttctacgccatcaccaccctgcacaacctgctgctgtaccaggagggcgccaagatggccgtgagactggccgacggcctgcagaagatggtgcccctgctgaacaagaacaaccccaagttcctggccatcaccaccgactgcctgcagctgctggcctacggctag

SEQ ID NO: 294470 - DNA, 1776 bp, Artificial Sequence
  derived and/or modified sequence
atggaggtgatgaacctgatggagcagcccatcaaggtgaccgagtggcagcagacctacacctacgacagcggcatccacagcggcgccaacacctgcgtgcccagcgtgagcagcaagggcatcatggaggaggacgaggcctgcggcagacagtacaccctgaagaagaccaccacctacacccagggcgtgccccccagccagggcgacctggagtaccagatgagcaccaccgccagagccaagagagtgagagaggccatgtgccccggcgtgagcggcgaggacagcagcctgctgctggccacccaggtggagggccaggccaccaacctgcagagactggccgagcccagccagctgctgaagagcgccatcgtgcacctgatcaactaccaggacgacgccgagctggccaccagagccctgcccgagctgaccaagctgctgaacgacgaggaccccgtggtggtgaccaaggccgccatgatcgtgaaccagctgagcaagaaggaggccagcagaagagccctgatgggcagcccccagctggtggccgccgtggtgagaaccatgcagaacaccagcgacctggacaccgccagatgcaccaccagcatcctgcacaacctgagccaccacagagagggcctgctggccatcttcaagagcggcggcatccccgccctggtgagaatgctgagcagccccgtggagagcgtgctgttctacgccatcaccaccctgcacaacctgctgctgtaccaggagggcgccaagatggccgtgagactggccgacggcctgcagaagatggtgcccctgctgaacaagaacaaccccaagttcctggccatcaccaccgactgcctgcagctgctggcctacggcaaccaggagagcaagatcctgaccgccaccgtggacaacgccaacatcctgctgcagatcgacaacgccagactggccgccgacgacttcagaaccaagttcgagaccgagcaggccctgagactgagcgtggaggccgacatcaacggcctgagaagagtgctggacgagctgaccctggccagagccgacctggagatgcagatcgagaacctgaaggaggagctggcctacctgaagaagaaccacgaggaggagatgaacgccctgagaggccaggtgggcggcgagatcaacgtggagatggacgccgcccccggcgtggacctgagcagaatcctgaacgagatgagagaccagtacgagaagatggccgagaagaacagaaaggacgccgaggactggttcttcagcaagaccgaggagctgaacagagaggtggccaccaacagcgagctggtgcagagcggcaagagcgagatcagcgagctgagaagaaccatgcaggccctggagatcgagctgcagagccagctgagcatgaaggccagcctggagggcaacctggccgagaccgagaacagatactgcgtgcagctgagccagatccagggcctgatcggcagcgtggaggagcagctggcccagctgagatgcgagatggagcagcagaaccaggagtacaagatcctgctggacgtgaagaccagactggagcaggagatcgccacctacagaagactgctggagggcgaggacgcccacctgacccagtacaagaaggagcccgtgaccaccagacaggtgagaaccatcgtggaggaggtgcaggacggcaaggtgatcagcagcagagagcaggtgcaccagaccaccagatag

SEQ ID NO: 294471 - protein, 311 aa, Artificial Sequence
  derived and/or modified sequence
MAFSGSQAPYLSPAVPFSGTIQGGLQDGLQITVNGTVLSSSGTRFAVNFQTGFSGNDIAFHFNPRFEDGGYVVCNTRQNGSWGPEERKTHMPFQKGMPFDLCFLVQSSDFKVMVNGILFVQYFHRVPFHRVDTISVNGSVQLSYISFQTQTVIHTVQSAPGQMFSTPAIPPMMYPHPAYPMPFITTILGGLYPSKSILLSGTVLPSAQRFHINLCSGNHIAFHLNPRFDENAVVRNTQIDNSWGSEERSLPRKMPFVRGQSFSVWILCEAHCLKVAVDGQHLFEYYHRLRNLPTINRLEVGGDIQLTHVQT

SEQ ID NO: 294472 - DNA, 936 bp, Artificial Sequence
  derived and/or modified sequence
atggctttttcagggtcacaagcaccttacctttctcctgcggtgcccttttcgggaacaatccagggaggattacaggatgggttgcaaatcaccgtgaacggaacagttttaagcagcagcggcactagattcgccgtgaactttcagaccggcttttccggcaacgacatcgcctttcacttcaatccccggtttgaggatgggggctacgtggtatgcaatacacggcagaatggctcctggggaccggaagaacggaagactcacatgccttttcaaaaaggaatgcctttcgacctgtgcttcctcgtccagtccagcgatttcaaggtcatggtgaacggcattctctttgtacagtacttccatcgcgtgccctttcatcgagtggacacgatatccgtaaacggcagtgtccagctgtcttacatcagcttccagacccagaccgtgattcacaccgtccaaagcgctcctggacagatgttcagtacgcctgccatcccacctatgatgtacccccatccggcttatccaatgccattcatcacaacaatactgggaggtttgtaccctagtaagtccatcctgttgtcaggaactgtcctgccgtccgcgcagcgattccatatcaacctttgcagtggtaatcatattgctttccacctaaatccgcgctttgatgaaaatgcagtggttcgcaatactcagatcgacaatagttggggcagcgaggaaagaagcttgcctcgcaagatgcccttcgtcagaggccaaagtttttcggtatggatcctgtgtgaagcgcattgccttaaagtggccgtcgatggtcagcacctgttcgaatactaccaccgactgcgtaacttgccgaccattaataggctggaggtcggtggggatatccagctgacacacgtgcagacctag

SEQ ID NO: 294473 - DNA, 936 bp, Artificial Sequence
  derived and/or modified sequence
atggccttcagcggcagccaggccccctacctgagccctgctgtgcccttcagcggcaccatccagggcggcctgcaggacggcctgcagatcaccgtgaatggcaccgtgctgagcagcagcggcaccaggtttgctgtgaacttccagacaggcttctctggaaatgacatcgccttccacttcaaccccaggtttgaagatggcggctacgtggtgtgcaacacccggcagaatggctcctggggccctgaggagaggaagacccacatgcccttccagaagggcatgccctttgacctgtgcttcctggtgcagagcagtgacttcaaggtgatggtgaatggcatcctgtttgtgcagtacttccaccgggtgcccttccaccgggtggacaccatctctgtgaatggatctgtgcagctgagctacatctccttccagacccagaccgtcatccacacagtgcagagcgcccctggccagatgttcagcaccccagccatcccccccatgatgtacccccacccagcctaccccatgcccttcatcaccaccatcctgggcggcctgtaccccagcaagagcatcctgctgagcggcaccgtgctgcccagcgcccagcgcttccacatcaacctgtgcagcggcaaccacatcgccttccacctgaaccccaggtttgatgaaaatgctgtggtgaggaacacccagattgacaacagctggggcagcgaggagaggagcctgcccaggaagatgccctttgtgcggggccagagcttctctgtgtggatcctgtgtgaggcccactgcctgaaggtggccgtggatggccagcacctgtttgagtactaccaccggctgaggaacctgcccaccatcaaccggctggaggtgggcggggacatccagctgacccacgtgcagacctag

SEQ ID NO: 294474 - DNA, 2975 bp, Artificial Sequence
  derived and/or modified sequence
tgtttgttaaattatatgtagggacagggtcttccaacctttcccgagctggtctcaagctcctgggctgaagtgatcctcctgcctcagcctctcaaagtgctggtattataggcataagccaccacgccctgcccatttttctaagttggattattttacactccagtctgctgtgaatgagagttccagttgttgcgtatcgcaatcaatttgtgattgcctacaaatgatgtgccgtgatgaaattgtccctggtgtccgagaggatcgcaaagaatttcccttcctttctctcctttctgctccccttgtactgtctactccttaaactggtacttgatccaggaacataatggggatggacagtgcagatggcacacatggcctcagtctattggagcatctcaaaggaattagtctgcaaattctagtgcatctaggtggagcacaggaaggaagagaggtgcagactcacgtatggccctggggcacctgccatcctctcgcacccgtacagcccttacctgccagcacttaccctacccagcttgagttctgggccttctcaccagcacatcgctgggacctggtcgacttcaggtaagtttatttcatggctccctcccccacgacctgcacatgccatatgttccttcccagccccatgtcacttgaaatgttctatcatgtccaagacttctctcctcatcctaaagtgcagaaaataaggatggagaagagaaggagaagagaatcaagagagattcattgagagggaggatcagaagctcctgggcaccccatactgtagaataaaaatattcattatggtgtttttcttgcaaaatattcccctctacataattatgtttttacatgaataatataaatttaaacaggagaaatactttttgaagagtctgagaatcttcataaagttcaggcggccacgaattagctgtgtgacctggggcatgccccttagactctgagcctcagcttctctgtatgtaaaatgggttgaagccgcccttccccacaagcaccctgtgcacaggcaatgcccagccccattattttctggactccgtggccaagcatgcttaggacacacagccacatacttctgggcagtgtcatctggcaacttgctgtcatgtcagtgtggtcaagcattgtagacctctatgaaccaaatatgcttcaggcttgggttgagcacaggagagggaggagggaaaggtcactggggctgggagtgcctacttccctctgtgagtgtcaccccagtccacccagtaccatacctttctctctctggacccacttccttttgctgccggctcctccccattgaataacagccaagttgctttggtttctatttctttgttaagtcgttccctctacaaaggacttcctagtgggtgtgaaaggcagcggtggccacagaggcggcggagagatggccttcagcggttcccaggctccctacctgagtccagctgtccccttttctgggactattcaaggaggtctccaggacggacttcagatcactgtcaatgggaccgttctcagctccagtggaaccaggtttgctgtgaactttcagactggcttcagtggaaatgacattgccttccacttcaaccctcggtttgaagatggagggtacgtggtgtgcaacacgaggcagaacggaagctgggggcccgaggagaggaagacacacatgcctttccagaaggggatgccctttgacctctgcttcctggtgcagagctcagatttcaaggtgatggtgaacgggatcctcttcgtgcagtacttccaccgcgtgcccttccaccgtgtggacaccatctccgtcaatggctctgtgcagctgtcctacatcagcttccagacccagacagtcatccacacagtgcagagcgcccctggacagatgttctctactcccgccatcccacctatgatgtacccccaccccgcctatccgatgcctttcatcaccaccattctgggagggctgtacccatccaagtccatcctcctgtcaggcactgtcctgcccagtgctcagaggttccacatcaacctgtgctctgggaaccacatcgccttccacctgaacccccgttttgatgagaatgctgtggtccgcaacacccagatcgacaactcctgggggtctgaggagcgaagtctgccccgaaaaatgcccttcgtccgtggccagagcttctcagtgtggatcttgtgtgaagctcactgcctcaaggtggccgtggatggtcagcacctgtttgaatactaccatcgcctgaggaacctgcccaccatcaacagactggaagtggggggcgacatccagctgacccatgtgcagacataggcggcttcctggccctggggccgggggctggggtgtggggcagtctgggtcctctcatcatccccacttcccaggcccagcctttccaaccctgcctgggatctgggctttaatgcagaggccatgtccttgtctggtcctgcttctggctacagccaccctggaacggagaaggcagctgacggggattgccttcctcagccgcagcagcacctggggctccagctgctggaatcctaccatcccaggaggcaggcacagccagggagaggggaggagtgggcagtgaagatgaagccccatgctcagtcccctcccatcccccacgcagctccaccccagtcccaagccaccagctgtctgctcctggtgggaggtggcctcctcagcccctcctctctgacctttaacctcactctcaccttgcaccgtgcaccaacccttcacccctcctggaaagcaggcctgatggcttcccactggcctccaccacctgaccagagtgttctcttcagaggactggctcctttcccagtgtccttaaaataaagaaatgaaaatgcttgttggc

SEQ ID NO: 294475 - DNA, 936 bp, Artificial Sequence
  derived and/or modified sequence
atggccttcagcggcagccaggccccctacctgagccccgccgtgcctttctccggaaccatccagggtgggctgcaggatgggcttcagatcacagtgaacggcaccgttttgtctagttctggaaccagattcgcagttaatttccagacgggttttagtgggaatgatatagccttccactttaaccctcggttcgaggatggcggctacgtggtctgtaacacccggcagaatggatcctggggccctgaagaacgtaaaacccatatgccctttcagaagggcatgccctttgacctctgtttcctcgtgcagtcttcagacttcaaagtaatggtgaatggcatcttgttcgtgcagtactttcatagggtgcccttccaccgcgtggatactattagtgttaacggaagcgtgcagctgagctatatctcattccaaacccaaacggtaatccataccgtgcaaagcgcgcccggacagatgtttagcacacccgcgatcccgcctatgatgtacccacacccagcttaccctatgccctttattactaccattttaggtggattgtaccccagtaaatcgatcctgctgtcaggcacagtcctccctagtgcacagaggttccacatcaacctatgttcaggtaatcacatcgcattccacctgaaccctcgctttgacgagaatgctgtggtcagaaatactcagatcgataatagctggggaagcgaggagcgcagcttgccacggaaaatgcccttcgtgcgaggccagagcttctccgtatggatcctgtgtgaggcccactgtctcaaggtagcagtggatggacaacacctctttgagtactatcatcgtctgcgaaatctgcctactataaacaggttagaagtgggaggcgacatccaattaacacatgtccaaacatag

SEQ ID NO: 294476 - DNA, 936 bp, Artificial Sequence
  derived and/or modified sequence
atggcgttctccggttcccaggccccatacctctccccagcagtgcccttctcaggaaccattcagggcggtctccaagacgggttacagatcaccgtcaatgggacagtactctcctcaagcggaactaggttcgccgtgaacttccagaccggtttctccggaaacgatattgcctttcactttaaccctagattcgaggatggcggttacgtcgtctgcaacactcgtcagaacggcagctggggacctgaggaacgcaaaacccacatgccttttcaaaaaggaatgcctttcgatctgtgttttctggtgcaatcttctgacttcaaagtcatggtgaatgggatcctgtttgtgcaatactttcaccgagtgccttttcaccgcgtcgacactatttccgttaatggatctgtacagctttcttacatctcctttcagacacagactgtaatacacacagtgcagtccgcccctggacagatgttctctacccccgctatcccacctatgatgtacccccaccctgcttaccccatgcccttcatcaccacaatcctcggagggctgtacccttctaaaagcattctgctatcaggcaccgttctgccgtccgcccaacggtttcacattaacctgtgcagtggcaaccacatcgcatttcaccttaatccacgctttgatgagaatgcggtcgtcaggaatacgcaaattgacaatagttggggcagcgaggaacgatcactgcccaggaagatgccgtttgttcgcggacaatccttcagcgtgtggatcctgtgcgaggcccattgtcttaaggttgcagtcgacgggcaacacttgttcgaatactaccaccgcctcaggaatctgcctacgattaataggctggaggtgggtggcgacatccagctgacccatgtgcaaacctag

SEQ ID NO: 294477 - DNA, 936 bp, Artificial Sequence
  derived and/or modified sequence
atggccttcagcggcagccaggccccctacctgagccccgccgtgcccttcagcggcaccatccagggcggcctgcaggacggcctgcagatcaccgtgaacggcaccgtgctgagcagcagcggcaccagattcgccgtgaacttccagaccggcttcagcggcaacgacatcgccttccacttcaaccccagattcgaggacggcggctacgtggtgtgcaacaccagacagaacggcagctggggccccgaggagagaaagacccacatgcccttccagaagggcatgcccttcgacctgtgcttcctggtgcagagcagcgacttcaaggtgatggtgaacggcatcctgttcgtgcagtacttccacagagtgcccttccacagagtggacaccatcagcgtgaacggcagcgtgcagctgagctacatcagcttccagacccagaccgtgatccacaccgtgcagagcgcccccggccagatgttcagcacccccgccatcccccccatgatgtacccccaccccgcctaccccatgcccttcatcaccaccatcctgggcggcctgtaccccagcaagagcatcctgctgagcggcaccgtgctgcccagcgcccagagattccacatcaacctgtgcagcggcaaccacatcgccttccacctgaaccccagattcgacgagaacgccgtggtgagaaacacccagatcgacaacagctggggcagcgaggagagaagcctgcccagaaagatgcccttcgtgagaggccagagcttcagcgtgtggatcctgtgcgaggcccactgcctgaaggtggccgtggacggccagcacctgttcgagtactaccacagactgagaaacctgcccaccatcaacagactggaggtgggcggcgacatccagctgacccacgtgcagacctag

SEQ ID NO: 294478 - protein, 221 aa, Artificial Sequence
  derived and/or modified sequence
MGPFSAPVEPDGGYVVCNTRQNGSWGPEERKTHMPFQKGMPFDLCFLVQSSDFKVMVNGILFVQYFHRVPFHRVDTISVNGSVQLSYISFQNPRTVPVQPAFSTVPFSQPVCFPPRPRGRRQKPPGVWPANPAPITQTVIHTVQSAPGQMFSTPAIPPMMYPHPAYPMPFITTILGGLYPSKSILLSGTVLPSAQRCGSCVKLTASRWPWMVSTCLNTTIA

SEQ ID NO: 294479 - DNA, 666 bp, Artificial Sequence
  derived and/or modified sequence
atggggccattttctgccccggtagagcctgatggcggatatgtggtctgtaatacccgccagaacgggtcatggggccccgaggaaagaaaaactcacatgccattccagaagggcatgccctttgatctgtgtttcttggtgcagagttctgacttcaaagttatggtgaatggaatcctgtttgtccagtactttcatcgggttcccttccacagggtcgatactatttcagtcaatgggtctgtacaattgagttatatttcattccaaaaccctagaactgtgccggttcagcccgcatttagcacagttccattttcccagccagtgtgttttccaccccgtcccagaggccgcagacagaagccacccggggtgtggcccgctaatccagctcccatcactcagaccgttattcataccgtacagtcggcccccgggcagatgtttagcacaccggcgattccccctatgatgtatcctcatcccgcttaccctatgccatttattaccacaattcttggcggactgtacccctctaaaagcatcctgttgtcaggtacggtgctgccctccgcccagcgctgtggcagctgtgtgaaactaactgctagccggtggccgtggatggtgagcacatgtctgaatacaactattgcctag

SEQ ID NO: 294480 - DNA, 666 bp, Artificial Sequence
  derived and/or modified sequence
atgggccccttcagcgcccctgtggagccagatggcggctacgtggtgtgcaacacccggcagaatggctcctggggccctgaggagaggaagacccacatgcccttccagaagggcatgccctttgacctgtgcttcctggtgcagagcagtgacttcaaggtgatggtgaatggcatcctgtttgtgcagtacttccaccgggtgcccttccaccgggtggacaccatctctgtgaatggatctgtgcagctgagctacatctccttccagaaccccaggacagtgcctgtgcagcctgccttcagcacagtgcccttcagccagcctgtgtgcttccccccccggccccggggccggcggcagaagcccccaggagtgtggccagccaacccagcccccatcacccagaccgtcatccacacagtgcagagcgcccctggccagatgttcagcaccccagccatcccccccatgatgtacccccacccagcctaccccatgcccttcatcaccaccatcctgggcggcctgtaccccagcaagagcatcctgctgtctggaacagtgctgcccagcgcccagagatgtggcagctgtgtgaagctgacagccagccgctggccctggatggtgtccacctgcctgaacaccaccatcgcctag

SEQ ID NO: 294481 - DNA, 1466 bp, Artificial Sequence
  derived and/or modified sequence
ctacaaaggacttcctagtgggtgtgaaaggcagcggtggccacagaggcggcggagagatggccttcagcggttcccaggctccctacctgagtccagctgtccccttttctgggactattcaaggaggtctccaggacggacttcagatcactgtcaatgggaccgttctcagctccagtggaaccagatggagggtacgtggtgtgcaacacgaggcagaacggaagctgggggcccgaggagaggaagacacacatgcctttccagaaggggatgccctttgacctctgcttcctggtgcagagctcagatttcaaggtgatggtgaacgggatcctcttcgtgcagtacttccaccgcgtgcccttccaccgtgtggacaccatctccgtcaatggctctgtgcagctgtcctacatcagcttccagaacccccgcacagtccctgttcagcctgccttctccacggtgccgttctcccagcctgtctgtttcccacccaggcccagggggcgcagacaaaaacctcccggcgtgtggcctgccaacccggctcccattacccagacagtcatccacacagtgcagagcgcccctggacagatgttctctactcccgccatcccacctatgatgtacccccaccccgcctatccgatgcctttcatcaccaccattctgggagggctgtacccatccaagtccatcctcctgtcaggcactgtcctgcccagtgctcagaggtgtggatcttgtgtgaagctcactgcctcaaggtggccgtggatggtcagcacctgtttgaatactaccatcgcctgaggaacctgcccaccatcaacagactggaagtggggggcgacatccagctgacccatgtgcagacataggcggcttcctggccctggggccgggggctggggtgtggggcagtctgggtcctctcatcatccccacttcccaggcccagcctttccaaccctgcctgggatctgggctttaatgcagaggccatgtccttgtctggtcctgcttctggctacagccaccctggaacggagaaggcagctgacggggattgccttcctcagccgcagcagcacctggggctccagctgctggaatcctaccatcccaggaggcaggcacagccagggagaggggaggagtgggcagtgaagatgaagccccatgctcagtcccctcccatcccccacgcagctccaccccagtcccaagccaccagctgtctgctcctggtgggaggtggcctcctcagcccctcctctctgacctttaacctcactctcaccttgcaccgtgcaccaacccttcacccctcctggaaagcaggcctgatggcttcccactggcctccaccacctgaccagagtgttctcttcagaggactggctcctttcccagtgtccttaaaataaagaaatgaaaatgcttgttggcac

SEQ ID NO: 294482 - DNA, 666 bp, Artificial Sequence
  derived and/or modified sequence
atgggccccttcagcgcccccgtggagcccgacggcggctacgtggtgtgtaatacaagacagaacggctcttggggccctgaagagcgcaagacacacatgccgttccagaaaggtatgcctttcgatctctgttttcttgtccaatccagtgacttcaaagtgatggtgaatggcatcctgttcgttcagtatttccatagggttccttttcacagagtggataccataagtgtaaatggttctgtacagctaagttacattagcttccagaaccctaggactgtgcccgtgcagcctgccttctccacagtccctttttcccaacctgtttgtttcccgccaaggcctagaggccgccgccagaagccacctggcgtgtggccggcaaaccctgcgcctattactcagaccgtgatccacaccgtccaatccgctcctggccagatgttttctactcccgccatcccccctatgatgtatcctcatccggcatatcctatgcccttcattacaacaattctaggtgggctttacccttctaagagcatcctgctctccggcacagttcttccaagcgcacagcgttgcgggtcctgcgtcaaacttaccgcatctaggtggccctggatggtgtcgacatgcttaaatacgaccatagcatag

SEQ ID NO: 294483 - DNA, 666 bp, Artificial Sequence
  derived and/or modified sequence
atgggcccattctccgctcctgttgagcccgatggaggatatgtcgtttgcaacactaggcagaacggctcgtggggacctgaggagcgcaagacacacatgccgttccagaaaggtatgcccttcgatctttgtttccttgtgcagtccagtgatttcaaggtaatggtgaacggaatcttattcgtgcagtatttccatcgcgtgccatttcatcgggttgataccatctcagtgaacggctcagtacaattatcctacattagctttcagaaccccaggactgtgccagtccagcccgcattttcaacagttcctttttcacagccagtgtgcttcccgccaagacctaggggccgtcgccagaagcctcctggcgtctggcctgcaaatcccgctcctataactcagaccgttatccacacagtgcagtccgccccaggccagatgttctctacccctgctattccccctatgatgtacccccatcctgcttatcccatgccttttatcactacaatcttggggggactttaccccagcaagagtatattgttgagcggcacagtgctcccttctgcccaacgatgtggctcatgcgtcaaattaaccgcctctcgctggccctggatggtgagtacttgtctgaacaccaccatcgcatag

SEQ ID NO: 294484 - DNA, 666 bp, Artificial Sequence
  derived and/or modified sequence
atgggccccttcagcgcccccgtggagcccgacggcggctacgtggtgtgcaacaccagacagaacggcagctggggccccgaggagagaaagacccacatgcccttccagaagggcatgcccttcgacctgtgcttcctggtgcagagcagcgacttcaaggtgatggtgaacggcatcctgttcgtgcagtacttccacagagtgcccttccacagagtggacaccatcagcgtgaacggcagcgtgcagctgagctacatcagcttccagaaccccagaaccgtgcccgtgcagcccgccttcagcaccgtgcccttcagccagcccgtgtgcttcccccccagacccagaggcagaagacagaagccccccggcgtgtggcccgccaaccccgcccccatcacccagaccgtgatccacaccgtgcagagcgcccccggccagatgttcagcacccccgccatcccccccatgatgtacccccaccccgcctaccccatgcccttcatcaccaccatcctgggcggcctgtaccccagcaagagcatcctgctgagcggcaccgtgctgcccagcgcccagagatgcggcagctgcgtgaagctgaccgccagcagatggccctggatggtgagcacctgcctgaacaccaccatcgcctag

SEQ ID NO: 294485 - protein, 246 aa, Artificial Sequence
  derived and/or modified sequence
MAFSGSQAPYLSPAVPFSGTIQGGLQDGLQITVNGTVLSSSGTRFAVNFQTGFSGNDIAFHFNPRFEDGGYVVCNTRQNGSWGPEERKTHMPFQKGMPFDLCFLVQSSDFKVMVNGILFVQYFHRVPFHRVDTISVNGSVQLSYISFQPPGVWPANPAPITQTVIHTVQSAPGQMFSTPAIPPMMYPHPAYPMPFITTILGGLYPSKSILLSGTVLPSAQRCGSCVKLTASRWPWMVSTCLNTTIA

SEQ ID NO: 294486 - DNA, 741 bp, Artificial Sequence
  derived and/or modified sequence
atggccttctccggcagccaggccccttacctcagtcccgccgttcccttttccggtacgattcagggcggtctgcaggacgggctgcagatcactgtcaatggaaccgtcctcagttcatccggaaccagatttgctgtgaatttccaaacaggattctcgggcaacgacatagcattccacttcaatcctcgttttgaagatggtggatacgtagtgtgtaacacccgccagaacggatcatggggacccgaggagaggaagacccacatgcccttccaaaagggcatgccattcgatctgtgcttccttgtgcagagtagcgattttaaagtgatggtcaacggcatcctgttcgtccaatattttcatagagtcccctttcacagggtggacacaatttctgttaacgggtccgtgcagctgtcgtacattagcttccagccccccggcgtctggcctgcaaatcctgcccccattacccagaccgtgattcacacagtgcagtctgctcctggacagatgttcagcactcctgcaatcccgcccatgatgtacccacacccggcctaccccatgccatttatcaccacaattcttggtggattgtatccctcaaagagtattctcctgtctgggaccgtcctgccgagtgcccaacgatgcggcagctgcgttaaactgacagcaagccgatggccctggatggtctcaacatgccttaataccacgatcgcctag

SEQ ID NO: 294487 - DNA, 741 bp, Artificial Sequence
  derived and/or modified sequence
atggccttcagcggcagccaggccccctacctgagccctgctgtgcccttcagcggcaccatccagggcggcctgcaggacggcctgcagatcaccgtgaatggcaccgtgctgagcagcagcggcaccaggtttgctgtgaacttccagacaggcttctctggaaatgacatcgccttccacttcaaccccaggtttgaagatggcggctacgtggtgtgcaacacccggcagaatggctcctggggccctgaggagaggaagacccacatgcccttccagaagggcatgccctttgacctgtgcttcctggtgcagagcagtgacttcaaggtgatggtgaatggcatcctgtttgtgcagtacttccaccgggtgcccttccaccgggtggacaccatctctgtgaatggatctgtgcagctgagctacatctccttccagcccccaggagtgtggccagccaacccagcccccatcacccagaccgtcatccacacagtgcagagcgcccctggccagatgttcagcaccccagccatcccccccatgatgtacccccacccagcctaccccatgcccttcatcaccaccatcctgggcggcctgtaccccagcaagagcatcctgctgagcggcaccgtgctgcccagcgcccagagatgtggcagctgtgtgaagctgacagccagccgctggccctggatggtgtccacctgcctgaacaccaccatcgcctag

SEQ ID NO: 294488 - DNA, 1378 bp, Artificial Sequence
  derived and/or modified sequence
tccccattgaataacagccaagttgctttggtttctatttctttgttaagtcgttccctctacaaaggacttcctagtgggtgtgaaaggcagcggtggccacagaggcggcggagagatggccttcagcggttcccaggctccctacctgagtccagctgtccccttttctgggactattcaaggaggtctccaggacggacttcagatcactgtcaatgggaccgttctcagctccagtggaaccaggtttgctgtgaactttcagactggcttcagtggaaatgacattgccttccacttcaaccctcggtttgaagatggagggtacgtggtgtgcaacacgaggcagaacggaagctgggggcccgaggagaggaagacacacatgcctttccagaaggggatgccctttgacctctgcttcctggtgcagagctcagatttcaaggtgatggtgaacgggatcctcttcgtgcagtacttccaccgcgtgcccttccaccgtgtggacaccatctccgtcaatggctctgtgcagctgtcctacatcagcttccagcctcccggcgtgtggcctgccaacccggctcccattacccagacagtcatccacacagtgcagagcgcccctggacagatgttctctactcccgccatcccacctatgatgtacccccaccccgcctatccgatgcctttcatcaccaccattctgggagggctgtacccatccaagtccatcctcctgtcaggcactgtcctgcccagtgctcagaggtgtggatcttgtgtgaagctcactgcctcaaggtggccgtggatggtcagcacctgtttgaatactaccatcgcctgaggaacctgcccaccatcaacagactggaagtggggggcgacatccagctgacccatgtgcagacataggcggcttcctggccctggggccgggggctggggtgtggggcagtctgggtcctctcatcatccccacttcccaggcccagcctttccaaccctgcctgggatctgggctttaatgcagaggccatgtccttgtctggtcctgcttctggctacagccaccctggaacggagaaggcagctgacggggattgccttcctcagccgcagcagcacctggggctccagctgctggaatcctaccatcccaggaggcaggcacagccagggagaggggaggagtgggcagtgaagatgaagccccatgctcagtcccctcccatcccccacgcagctccaccccagtcccaagccaccagctgtctgctcctggtgggaggtggcctcctcagcccctcctctctgacctttaacctcactctcaccttgcaccgtgcaccaacccttcacccct

SEQ ID NO: 294489 - DNA, 741 bp, Artificial Sequence
  derived and/or modified sequence
atggccttcagcggcagccaggccccctacctgagccccgccgtgccattctctggcaccatccagggaggtttgcaggacggccttcagattactgttaacggaactgtgttatccagctctggcacaaggtttgccgtaaacttccagactggctttagtgggaatgacatcgcattccattttaatcctcgctttgaggacgggggctatgtggtatgcaacactcggcagaacggatcttggggtcccgaggaaagaaaaactcatatgccgttccagaaaggcatgccctttgacctttgttttttggttcagagctcagattttaaagtcatggtcaacgggattctatttgtgcaatacttccacagagtgcccttccacagggtcgatacaatctcagtgaatgggagcgttcaactctcttacatctcttttcagcctcccggggtgtggccagccaatcctgcccccatcactcagacggtcatccacacggtacagagcgcgcctgggcagatgtttagcacccctgctattccaccaatgatgtatccacaccctgcctatcccatgcccttcattacaacaattttgggtggcctttacccctcaaaaagtattctcctcagcggcacggtgctgcccagtgcacagaggtgtggaagctgcgtcaagctgactgcctcgcgttggccttggatggtctccacatgtctgaatactacaatcgcctag

SEQ ID NO: 294490 - DNA, 741 bp, Artificial Sequence
  derived and/or modified sequence
atggcctttagtggatctcaggcgccatacctgtcccccgcagtccccttcagcggaaccattcagggcggtctacaggacggccttcagatcacagtgaatggcacagtcctctcctcttccggcacgcggttcgcagtaaattttcagactggattcagcggcaacgatatcgcctttcacttcaaccccagattcgaggatgggggatacgtggtgtgtaacacaagacagaatggaagctggggtcccgaggagcgaaagacgcatatgcccttccagaaggggatgcccttcgatctctgctttttggtacagagctcagacttcaaggtcatggttaacgggatcctgttcgtgcaatacttccacagagtgcctttccatagagtggatacaatttcggttaacggatctgtgcaactctcctacatttccttccagcctcccggtgtctggcctgcaaatcccgctccaatcacgcagactgtaatacataccgtgcaatctgctcctgggcaaatgtttagcacccctgctatcccgccaatgatgtaccctcaccccgcttacccaatgccattcattaccaccatcctggggggtctttacccatcaaagagcattctgctcagtgggaccgtgctcccatcagcccaacggtgtgggagctgcgtaaaactgaccgctagcagatggccatggatggtttcaacatgcctgaatacgacaatagcctag

SEQ ID NO: 294491 - DNA, 741 bp, Artificial Sequence
  derived and/or modified sequence
atggccttcagcggcagccaggccccctacctgagccccgccgtgcccttcagcggcaccatccagggcggcctgcaggacggcctgcagatcaccgtgaacggcaccgtgctgagcagcagcggcaccagattcgccgtgaacttccagaccggcttcagcggcaacgacatcgccttccacttcaaccccagattcgaggacggcggctacgtggtgtgcaacaccagacagaacggcagctggggccccgaggagagaaagacccacatgcccttccagaagggcatgcccttcgacctgtgcttcctggtgcagagcagcgacttcaaggtgatggtgaacggcatcctgttcgtgcagtacttccacagagtgcccttccacagagtggacaccatcagcgtgaacggcagcgtgcagctgagctacatcagcttccagccccccggcgtgtggcccgccaaccccgcccccatcacccagaccgtgatccacaccgtgcagagcgcccccggccagatgttcagcacccccgccatcccccccatgatgtacccccaccccgcctaccccatgcccttcatcaccaccatcctgggcggcctgtaccccagcaagagcatcctgctgagcggcaccgtgctgcccagcgcccagagatgcggcagctgcgtgaagctgaccgccagcagatggccctggatggtgagcacctgcctgaacaccaccatcgcctag

SEQ ID NO: 294492 - protein, 119 aa, Artificial Sequence
  derived and/or modified sequence
MAFSGSQAPYLSPAVPFSGTIQGGLQDGLQITVNGTVLSSSGTRFAVNFQTGFSGNDIAFHFNPRFEDGGYVVCNTRQNGSWGPEERKTHMPFQKGMPFDLCFLVQSSDFKVHLLLLLL

SEQ ID NO: 294493 - protein, 949 aa, Artificial Sequence
  derived and/or modified sequence
MSLAFKIFFPQTLRALSRKELCLFRKHHWRDVRQFSQWSETDLLHGHPLFLRRKPVLSFQGSHLRSRATYLVFLPGLHVGLCSGPCEMAEQRFCVDYAKRGTAGCKKCKEKIVKGVCRIGKVVPNPFSESGGDMKEWYHIKCMFEKLERARATTKKIEDLTELEGWEELEDNEKEQITQHIADLSSKAAGTPKKKAVVQAKLTTTGQVTSPVKGASFVTSTNPRKFSGFSAKPNNSGEAPSSPTPKRSLSSSKCDPRHKDCLLREFRKLCAMVADNPSYNTKTQIIQDFLRKGSAGDGFHGDVYLTVKLLLPGVIKTVYNLNDKQIVKLFSRIFNCNPDDMARDLEQGDVSETIRVFFEQSKSFPPAAKSLLTIQEVDEFLLRLSKLTKEDEQQQALQDIASRCTANDLKCIIRLIKHDLKMNSGAKHVLDALDPNAYEAFKASRNLQDVVERVLHNAQEVEKEPGQRRALSVQASLMTPVQPMLAEACKSVEYAMKKCPNGMFSEIKYDGERVQVHKNGDHFSYFSRSLKPVLPHKVAHFKDYIPQAFPGGHSMILDSEVLLIDNKTGKPLPFGTLGVHKKAAFQDANVCLFVFDCIYFNDVSLMDRPLCERRKFLHDNMVEIPNRIMFSEMKRVTKALDLADMITRVIQEGLEGLVLKDVKGTYEPGKRHWLKVKKDYLNEGAMADTADLVVLGAFYGQGSKGGMMSIFLMGCYDPGSQKWCTVTKCAGGHDDATLARLQNELDMVKISKDPSKIPSWLKVNKIYYPDFIVPDPKKAAVWEITGAEFSKSEAHTADGISIRFPRCTRIRDDKDWKSATNLPQLKELYQLSKEKADFTVVAGDEGSSTTGGSSEENKGPSGSAVSRKAPSKPSASTKKAEGKLSNSNSKDGNMQTAKPSAMKVGEKLATKSSPVKVGEKRKAADETLCQTKRRPASEQRGRTVPAGRR

SEQ ID NO: 294494 - DNA, 2850 bp, Artificial Sequence
  derived and/or modified sequence
atgagcctggccttcaagatcttcttcccccagaccctgagagccctgagcagaaaggagctgtgcctgttcagaaagcaccactggagagacgtgagacagttcagccagtggagcgagaccgacctgctgcacggccaccccctgttcctgagaagaaagcccgtgctgagcttccagggcagccacctgagaagcagagccacctacctggtgttcctgcccggcctgcacgtgggcctgtgcagcggcccctgcgagatggccgagcagagattctgcgtggactacgccaagagaggcaccgccggctgcaagaagtgcaaggagaagatcgtgaagggcgtgtgcagaatcggcaaggtggtgcccaaccccttcagcgagagcggcggcgacatgaaggagtggtaccacatcaagtgcatgttcgagaagctggagagagccagagccaccaccaagaagatcgaggacctgaccgagctggagggctgggaggagctggaggacaacgagaaggagcagatcacccagcacatcgccgacctgagcagcaaggccgccggcacccccaagaagaaggccgtggtgcaggccaagctgaccaccaccggccaggtgaccagccccgtgaagggcgccagcttcgtgaccagcaccaaccccagaaagttcagcggcttcagcgccaagcccaacaacagcggcgaggcccccagcagccccacccccaagagaagcctgagcagcagcaagtgcgaccccagacacaaggactgcctgctgagagagttcagaaagctgtgcgccatggtggccgacaaccccagctacaacaccaagacccagatcatccaggacttcctgagaaagggcagcgccggcgacggcttccacggcgacgtgtacctgaccgtgaagctgctgctgcccggcgtgatcaagaccgtgtacaacctgaacgacaagcagatcgtgaagctgttcagcagaatcttcaactgcaaccccgacgacatggccagagacctggagcagggcgacgtgagcgagaccatcagagtgttcttcgagcagagcaagagcttcccccccgccgccaagagcctgctgaccatccaggaggtggacgagttcctgctgagactgagcaagctgaccaaggaggacgagcagcagcaggccctgcaggacatcgccagcagatgcaccgccaacgacctgaagtgcatcatcagactgatcaagcacgacctgaagatgaacagcggcgccaagcacgtgctggacgccctggaccccaacgcctacgaggccttcaaggccagcagaaacctgcaggacgtggtggagagagtgctgcacaacgcccaggaggtggagaaggagcccggccagagaagagccctgagcgtgcaggccagcctgatgacccccgtgcagcccatgctggccgaggcctgcaagagcgtggagtacgccatgaagaagtgccccaacggcatgttcagcgagatcaagtacgacggcgagagagtgcaggtgcacaagaacggcgaccacttcagctacttcagcagaagcctgaagcccgtgctgccccacaaggtggcccacttcaaggactacatcccccaggccttccccggcggccacagcatgatcctggacagcgaggtgctgctgatcgacaacaagaccggcaagcccctgcccttcggcaccctgggcgtgcacaagaaggccgccttccaggacgccaacgtgtgcctgttcgtgttcgactgcatctacttcaacgacgtgagcctgatggacagacccctgtgcgagagaagaaagttcctgcacgacaacatggtggagatccccaacagaatcatgttcagcgagatgaagagagtgaccaaggccctggacctggccgacatgatcaccagagtgatccaggagggcctggagggcctggtgctgaaggacgtgaagggcacctacgagcccggcaagagacactggctgaaggtgaagaaggactacctgaacgagggcgccatggccgacaccgccgacctggtggtgctgggcgccttctacggccagggcagcaagggcggcatgatgagcatcttcctgatgggctgctacgaccccggcagccagaagtggtgcaccgtgaccaagtgcgccggcggccacgacgacgccaccctggccagactgcagaacgagctggacatggtgaagatcagcaaggaccccagcaagatccccagctggctgaaggtgaacaagatctactaccccgacttcatcgtgcccgaccccaagaaggccgccgtgtgggagatcaccggcgccgagttcagcaagagcgaggcccacaccgccgacggcatcagcatcagattccccagatgcaccagaatcagagacgacaaggactggaagagcgccaccaacctgccccagctgaaggagctgtaccagctgagcaaggagaaggccgacttcaccgtggtggccggcgacgagggcagcagcaccaccggcggcagcagcgaggagaacaagggccccagcggcagcgccgtgagcagaaaggcccccagcaagcccagcgccagcaccaagaaggccgagggcaagctgagcaacagcaacagcaaggacggcaacatgcagaccgccaagcccagcgccatgaaggtgggcgagaagctggccaccaagagcagccccgtgaaggtgggcgagaagagaaaggccgccgacgagaccctgtgccagaccaagagaagacccgccagcgagcagagaggcagaaccgtgcccgccggcagaagatag

SEQ ID NO: 294495 - DNA, 2850 bp, Artificial Sequence
  derived and/or modified sequence
atgagcttggcctttaagattttttttccgcaaacactccgagccttaagcagaaaggagctttgcctgtttagaaagcatcattggcgtgatgttcgacagttttcacagtggtctgagaccgatctactgcacgggcacccgctatttctaagaaggaaacccgtactctcattccagggatcccatttgagatcacgagccacttatctggtcttcctgccgggactgcatgtaggcctctgttcggggccatgtgagatggccgagcaacgattttgcgtagattatgccaaacgagggactgcaggatgcaagaaatgcaaggagaagattgtgaaaggtgtttgcaggataggtaaggtggtgcccaaccccttttccgagagtggtggcgacatgaaggagtggtaccacataaagtgtatgtttgaaaagctggaacgggctagagctacaactaagaaaatcgaggacctgaccgaactcgagggatgggaggagctggaggataatgaaaaggaacaaatcacgcaacacatcgctgatctctcctccaaggcggctgggacaccaaaaaagaaggcggtagttcaggcgaagctgacaacaactggtcaggtgacttcacccgtgaaaggagcctcgttcgttacatctacaaatccccgaaagttctcagggttttcggcgaaacctaacaacagtggcgaggccccttcatcacccactccgaagaggagcctatcgagctcaaaatgtgatccccgccacaaagactgcctgcttcgtgagtttaggaaattatgtgcaatggtggcagacaacccaagctacaacaccaagacccaaattattcaggattttctccgtaagggaagcgccggagatgggttccatggagacgtttatctgaccgtgaagcttctgctcccaggagttatcaagaccgtctacaatttgaacgataaacagatcgtgaagcttttctccaggatctttaattgcaatccagatgacatggcaagagatcttgaacagggcgatgtgagcgagaccatccgcgttttctttgaacagtcaaagtcgttcccacctgctgcaaagtcactgctgactatacaggaagttgacgagtttctcttacggctgtcaaagctgacaaaggaagacgaacagcagcaggcccttcaagatatcgcctctagatgcacagcaaatgatctgaagtgtataatcagactcatcaagcacgatctcaaaatgaactcaggggctaaacacgtgctggatgccctggaccccaacgcctacgaagcctttaaagcatcacgaaatctgcaggacgtggtggaacgcgtgctgcataacgcacaggaagtggaaaaggaacctggacagagacgggccctctccgtccaagccagcctaatgacaccagttcagcctatgctagctgaagcttgcaagagcgtggaatacgccatgaaaaagtgccccaatgggatgttttccgagatcaagtatgacggggaacgagtgcaggttcacaagaatggcgatcattttagctattttagtagatccctgaagcccgtgctccctcataaagtcgcccattttaaggactatattccgcaggcctttcccgggggtcatagtatgattctcgactctgaggtgcttttgattgacaataaaaccggtaaaccgctcccttttggaactctgggggtgcacaagaaggccgctttccaggatgccaacgtgtgtttatttgtgtttgactgtatctattttaacgatgtctctctgatggacaggcctctgtgtgaacgacggaaatttctgcatgataacatggttgagattcctaataggatcatgttctcagagatgaagagagtaactaaggcactggacctcgccgatatgattactcgggtgatccaggaagggctggaaggcctggttttgaaggacgtgaaaggaacctatgagccaggaaagcgccactggcttaaagtgaaaaaagactatttgaacgagggcgctatggctgatacggctgacctggtagtcctcggggcattttatggccagggttctaaaggtggaatgatgagtatcttcctgatgggttgctacgaccctggcagccaaaagtggtgtacagtgaccaagtgtgcaggcggacacgacgacgccaccctggcacgcctacaaaacgagctcgatatggtgaagattagtaaagacccgtccaagatacccagttggctgaaggttaacaagatatactaccccgactttatcgtccctgaccccaagaaggccgcagtgtgggagattacaggggccgaattctcgaaaagcgaggcacacacagccgatggaatttctattcggtttccaagatgtacccgaatacgggacgataaggactggaagagtgcaaccaacttgcctcagctgaaagagctatatcagttatccaaggagaaggcagatttcactgtggtggctggcgacgagggcagttccaccactggcgggtcgtcagaagaaaacaagggtccctcaggaagcgccgtgtctaggaaagctccaagcaagccctccgcttctaccaagaaggctgaggggaagctgtcgaatagtaattccaaagacggcaacatgcagactgccaaacccagtgcaatgaaggtgggagaaaaactggcgaccaaatcatctcctgttaaggtaggcgagaaacgtaaggccgctgatgagaccctgtgccagacaaagcgccggcccgcttcggagcagcgggggcgcaccgttcctgccgggagacggtag

SEQ ID NO: 294496 - DNA, 2850 bp, Artificial Sequence
  derived and/or modified sequence
atgagcctggccttcaagatcttcttcccccagaccctgcgggccctgagcaggaaggagctgtgcctcttcaggaagcaccactggagagatgtgcggcagttcagccagtggagcgagacagacctgctgcacggccaccccctcttcctgcggaggaagcctgtgctgtccttccagggcagccacctgcggagccgggccacctacctggtgttcctgcccggcctgcacgtgggcctgtgcagcggcccctgtgagatggccgagcagcgcttctgtgtggactatgccaagaggggcacagctggctgcaagaagtgcaaggagaagatcgtgaagggcgtgtgcagaattggcaaggtggtgcccaaccccttcagcgagagcggcggggacatgaaggagtggtaccacatcaagtgcatgtttgagaagctggagcgggcccgggccaccaccaagaagattgaggacctgacagagctggagggctgggaggagctggaggacaatgagaaggagcagatcacccagcacatcgctgacctgagcagcaaggctgctggcacccccaagaagaaggctgtggtgcaggccaagctgaccaccaccggccaggtgaccagccctgtgaagggggccagctttgtgaccagcaccaaccccaggaagttcagcggcttcagcgccaagcccaacaacagcggggaggcccccagcagccccacccccaagaggagcctgagcagcagcaaatgtgaccccaggcacaaggactgcctgctgcgggagttcaggaagctgtgtgccatggtggccgacaaccccagctacaacaccaagacccagatcatccaggacttcctgaggaagggcagcgctggagatggcttccatggagatgtgtacctgactgtgaagctgctgctgcccggggtcatcaagacagtgtacaacctgaatgacaagcagatcgtgaagctgttcagccgcatcttcaactgcaacccagatgacatggcccgggacctggagcagggagatgtgtctgagaccatccgggtcttctttgagcagagcaagagcttccccccagctgccaagagcctgctgaccatccaggaggtggatgagttcctgctgcggctgagcaagctgaccaaggaggatgagcagcagcaggccctgcaggacatcgccagccgctgcacagccaatgacctgaagtgcatcatccgcctcatcaagcatgacctgaagatgaacagcggggccaagcacgtgctggatgccctggaccccaatgcctatgaggccttcaaggccagcaggaacctgcaggatgtggtggagcgggtgctgcacaatgcccaggaggtggagaaggagcccggccagaggcgggccctgtctgtgcaggccagcctgatgacccctgtgcagcccatgctggccgaggcctgcaagtctgtggagtatgccatgaagaagtgccccaacggcatgttttctgagatcaagtatgatggagagcgggtgcaggtgcacaagaatggagaccacttctcctacttcagccgcagcctgaagcctgtgctgccccacaaggtggcccacttcaaggactacatcccccaggccttccctgggggccacagcatgatcctggacagcgaggtgctgctgattgacaacaagacaggcaagcccctgcccttcggcaccctgggcgtgcacaagaaggccgccttccaggatgccaacgtgtgcctgtttgtgtttgactgcatctacttcaatgatgtgtccctgatggaccggcccctgtgtgaaagaaggaagttcctgcatgacaacatggtggagatccccaaccgcatcatgttttctgagatgaagagggtgaccaaggccctggacctggccgacatgatcaccagggtcatccaggagggcctggagggcctggtgctgaaggatgtgaagggcacctatgagcccgggaagaggcactggctgaaggtgaagaaggactacctgaatgaaggagccatggctgacacagctgacctggtggtgctgggcgccttctacggccagggcagcaagggcggcatgatgagcatcttcctgatgggctgctatgaccccggcagccagaagtggtgcaccgtgaccaagtgtgccggcggccatgatgatgccaccctggcccggctgcagaatgagctggacatggtgaagatcagcaaggaccccagcaagatccccagctggctgaaggtgaacaagatctactacccagacttcatcgtgcctgaccccaagaaggctgctgtgtgggagatcactggagctgagttcagcaagtctgaggcccacacagcagatggcatcagcatccgcttcccccgctgcacccgcatcagagatgacaaggactggaagagcgccaccaacctgccccagctgaaggagctgtaccagctgagcaaggagaaggctgacttcaccgtggtggccggagatgagggcagcagcaccaccggcggcagcagcgaggagaacaagggccccagcggcagcgctgtgtccaggaaggcccccagcaagcccagcgccagcaccaagaaggccgagggcaagctgagcaacagcaacagcaaggatggcaacatgcagacagccaagcccagcgccatgaaggtgggggagaagctggccaccaagagcagccctgtgaaggtgggggagaagaggaaggccgcagatgagaccctgtgccagaccaagagaagacctgccagcgagcagaggggccgcacagtgcctgctggaagaagatag

SEQ ID NO: 294497 - DNA, 3020 bp, Artificial Sequence
  derived and/or modified sequence
caaccgtcgtgggctgcccgcggcctgtaatgagcaagttccgaggcctacggtgagcgccggagccggagaggcagctatatgtctttggctttcaagatcttctttccacaaaccctccgtgcactcagccgaaaagaactgtgcctattccgaaaacatcactggcgtgatgtaagacaattcagccagtggtcagaaacagatctgcttcatggacatcccctcttcctgagaagaaagcctgttctatcattccagggaagccatctaagatcacgtgccacctaccttgttttcttgccagggttgcatgtgggactctgcagtggcccctgtgagatggctgagcaacggttctgtgtggactatgccaagcgtggcacagctggctgcaaaaaatgcaaggaaaagattgtgaagggcgtatgccgaattggcaaagtggtgcccaatcccttctcagagtctgggggtgatatgaaagagtggtaccacattaaatgcatgtttgagaaactagagcgggcccgggccaccacaaaaaaaatcgaggacctcacagagctggaaggctgggaagagctggaagataatgagaaggaacagataacccagcacattgcagatctgtcttctaaggcagcaggtacaccaaagaagaaagctgttgtccaggctaagttgacaaccactggccaggtgacttctccagtgaaaggcgcctcatttgtcaccagtaccaatccccggaaattttctggcttttcagccaagcccaacaactctggggaagccccctcgagccccacccctaagagaagtctgtcttcaagcaaatgtgaccccaggcataaggactgtctgctacgggagtttcgaaagttatgcgccatggtggccgataatcctagctacaacacgaagacccagatcatccaggacttccttcggaaaggctcagcaggagatggtttccacggtgatgtgtacctaacagtgaagctgctgctgccaggagtcattaagactgtttacaacttgaacgataagcagattgtgaagcttttcagtcgcatttttaactgcaacccagatgatatggcacgggacctagagcagggtgacgtgtcagagacaatcagagtcttctttgagcagagcaagtctttccccccagctgccaagagcctccttaccatccaggaagtggatgagttccttctgcggctgtccaagctcaccaaggaggatgagcagcaacaggccctacaggacattgcctccaggtgtacagccaatgaccttaaatgcatcatcaggttgatcaaacatgatctgaagatgaactcaggtgcaaaacatgtgttagacgcccttgaccccaatgcctatgaagccttcaaagcctcgcgcaacctgcaggatgtggtggagcgggtccttcacaacgcgcaggaggtggagaaggagccgggccagagacgagctctgagcgtccaggcctcgctgatgacacctgtgcagcccatgttggcggaggcctgcaagtccgttgagtatgcaatgaagaaatgtcccaatggcatgttctctgagatcaagtacgatggagagcgagtccaggtgcataagaatggagaccacttcagctacttcagccgcagtctcaagcccgtccttcctcacaaggtggcccactttaaggactacattccccaggcttttcctgggggccacagcatgatcttggattctgaagtgcttctgattgacaacaagacaggcaaaccactgccctttgggactctgggagtacacaagaaagcagccttccaggatgctaatgtctgcctgtttgtttttgattgtatctactttaatgatgtcagcttgatggacagacctctgtgtgagcggcggaagtttcttcatgacaacatggttgaaattccaaaccggatcatgttctcagaaatgaagcgagtcacaaaagctttggacttggctgacatgataacccgggtgatccaggagggattggaggggctggtgctgaaggatgtgaagggtacatatgagcctgggaagcggcactggctgaaagtgaagaaagactatttgaacgagggggccatggccgacacagctgacctggtggtccttggagccttctatgggcaagggagcaaaggcggcatgatgtcaatcttcctcatgggctgctacgaccctggcagccagaagtggtgcacagtcaccaagtgtgcaggaggccatgatgatgccacgcttgcccgcctgcagaatgaactagacatggtgaagatcagcaaggaccccagcaaaatacccagctggttgaaggtcaacaagatctactatcctgacttcatcgtcccagacccaaagaaagctgccgtgtgggagatcacaggggctgaattctccaaatcggaggctcatacagctgacgggatctccatccgattccctcgctgcacccgaatccgagatgataaggactggaaatctgccactaaccttccccaactcaaggaactgtaccagttgtccaaggagaaggcagacttcactgtagtggctggagatgaggggagctccactacagggggtagcagtgaagagaataagggtccctcagggtctgctgtgtcccgcaaggcccccagcaagccctcagccagtaccaagaaagcagaagggaagctgagtaactccaacagcaaagatggcaacatgcagactgcaaagccttccgctatgaaggtgggggagaagctggccacaaagtcttctccagtgaaagtaggggagaagcggaaagctgctgatgagacgctgtgccaaacaaagaggcggccagccagtgagcagagaggaagaactgtgccagcaggcaggagatagaacagcccggcctagccaggagagactgcagggactcactcagctgctggccccaagtcaaaatttacattaaagggaaaagaccagtc

SEQ ID NO: 294498 - DNA, 2850 bp, Artificial Sequence
  derived and/or modified sequence
atgagcctggccttcaagatcttcttcccccagaccctgcgggccctgtctagaaaggaactgtgcctcttcagaaagcatcattggcgtgacgttcggcagttctctcaatggtccgagacagatctgctgcacgggcacccgttgttcctccgcaggaaacctgtgctgagcttccaaggctcacacttaaggagccgcgccacctacctggtctttttaccagggctgcacgtgggcctgtgttccggcccgtgtgagatggcggagcaaaggttctgtgtggactacgctaaaaggggtaccgcaggctgcaagaagtgtaaagagaagatagttaagggtgtctgcagaattgggaaagtggtcccaaatccattctccgagtctggcggcgacatgaaggagtggtaccacatcaaatgcatgtttgaaaaactggagcgcgccagggcaaccacaaagaaaatcgaggatcttacggaactcgaagggtgggaagaactggaagataacgaaaaagaacaaatcacgcagcacatcgccgacttgtcatccaaggccgcaggtactccaaaaaaaaaagctgtggtccaggccaagctgacaactactggccaggtgacgtctcctgtaaagggagcgtcctttgtgacatcaacgaacccacgcaagttttcaggcttctcagcaaaacctaacaactctggagaagccccttctagcccaacaccaaagaggtctttatcctcaagtaaatgcgatccaaggcacaaggattgcttactcagagagttcagaaagctttgtgccatggttgctgataacccgtcatacaataccaagacccagattattcaggatttcctgcgcaagggctctgcaggagacggctttcacggagacgtttatttgactgtgaaactgctccttccaggcgtgatcaaaacggtctataacctgaacgataagcagatagtgaagttgttttcccgtatcttcaattgcaaccctgacgacatggcccgcgacctcgaacagggggacgtgagtgagacgattcgggttttcttcgagcagagtaagagcttcccccccgcagctaagtcactgctgaccatccaggaggttgatgagttcctactaagattgtctaaactgactaaagaagatgagcagcaacaagcactgcaagacatcgcctctcgatgcactgctaatgaccttaagtgcatcatccggctgattaagcatgaccttaagatgaacagtggggctaagcacgttctggatgccttagaccctaatgcctatgaagcatttaaagccagtagaaacttgcaggatgtcgttgaaagagtgctgcataatgcccaagaggttgaaaaggaacctggccaacggagggccctttccgtacaggcatccctaatgacaccagtccagcctatgctggccgaggcttgcaaatccgttgagtacgcaatgaagaagtgccctaatgggatgtttagcgagatcaagtatgacggtgagagagttcaagtgcataaaaacggcgaccacttctcttacttttccagaagtctgaaaccagtactgcctcacaaagttgctcactttaaggattatattccccaggcttttcccgggggacactccatgattctcgattctgaagtcctcctgatagataataagaccggtaagccactgccctttggaaccctgggcgtacataagaaggccgcgttccaagacgccaacgtttgtttatttgtgttcgactgcatatattttaacgacgtgtccctaatggatcggccgctatgcgaacggaggaaattcctccacgacaatatggtagagatccccaacaggatcatgttttcagagatgaagcgagtcaccaaggctctggacctagccgacatgattaccagagtaatccaggagggcttagagggcctggttctgaaagatgtgaaagggacatacgaacctgggaaaagacactggttaaaggttaaaaaagattacctgaacgagggtgcaatggccgacaccgctgacctggtggtgctgggtgcattttacgggcaggggagcaagggggggatgatgagtatcttcttgatgggctgttacgatcccggttcccagaaatggtgtaccgtaacaaagtgtgcgggcggccacgatgacgccactttggcccgactgcagaatgagctggatatggtgaaaatctccaaagacccgagcaaaattcccagttggcttaaggtgaataagatctactaccccgactttatcgtccccgatccaaaaaaagctgctgtgtgggaaatcacgggagccgaattctcaaaatcagaagcccataccgctgacggtatttcgattagattccccaggtgtacgcggatcagagatgacaaagactggaaaagtgccacgaaccttcctcagttgaaggagctgtaccaactgagcaaagaaaaggccgacttcaccgtggtcgcaggggatgaaggatcgtcaactactggtgggtcaagtgaggagaataaaggcccctcagggtctgccgtcagcagaaaggctccaagcaaaccatccgcctctactaaaaaagccgagggaaagttatctaactctaattcaaaagacggaaatatgcagaccgcaaaaccctccgctatgaaggtgggagagaaactcgccacgaagtcctcgcccgtcaaagtgggggaaaaacgaaaggctgccgatgaaacgctttgccaaacaaaacggagacctgcctctgaacagcgagggaggactgtaccggctggcagacggtag

SEQ ID NO: 294499 - DNA, 2850 bp, Artificial Sequence
  derived and/or modified sequence
atgtcacttgcatttaagattttcttccctcagaccctgcgagcgctgtcccggaaggagctgtgtctgttccgtaaacatcactggcgggacgtaaggcagttctcacagtggtccgagacagacctgctccatgggcacccacttttcctgcgcaggaaacctgtcctatcattccaggggagccaccttcggagtcgagccacttatcttgtgttcctgccgggtcttcatgtgggattatgtagtggcccttgcgagatggcggagcagcggttctgcgtagattatgctaaacgaggcaccgccggttgcaagaaatgcaaagagaagatagtgaaaggggtctgtcgcatcggaaaagtggtcccaaacccttttagcgagtctgggggtgacatgaaggagtggtaccatataaagtgtatgtttgaaaagttagagagggctcgggctaccacaaagaagatcgaggatctgactgagctggagggctgggaggagctggaggacaacgaaaaagaacagataacacaacacatagctgacctgagcagcaaagctgccggaacccccaaaaagaaagccgtggttcaggccaagctgactacgacgggacaggtgacatcccctgtgaaaggcgctagcttcgtcacctccaccaatcctcgcaagttctcagggttctcggctaaaccaaacaacagtggtgaggctcctagcagcccgaccccaaagagaagcctcagttcctcaaaatgcgatcccaggcacaaggattgtttgctgcgggaatttcggaaactgtgcgccatggtagccgacaaccccagctacaacaccaaaacccagattatacaggattttcttcggaagggctcggccggtgatggcttccatggtgacgtgtacctgaccgtcaaactgctgctgcctggcgtgatcaaaactgtctacaatctcaacgacaaacagatcgtgaaattgttcagccgcatcttcaactgcaaccctgatgacatggccagagacctagaacagggcgacgtgagcgaaaccattcgcgtcttctttgagcaatcaaaatccttccccccagcagctaaatcgcttttaaccatacaagaagtagacgaattcctgctgagactgtctaagctgactaaggaggacgaacagcagcaggctttacaggacatcgcatcccggtgtaccgcaaatgacttaaagtgcataattcggcttattaagcacgacctgaagatgaattctggtgccaaacatgtactggacgccctcgatccgaatgcctacgaagctttcaaggcctcaagaaatctccaagatgtcgtagaaagagttttgcacaacgcacaggaagttgagaaggaacccggacaacgcagagcactgagcgtacaggcctccctcatgacgcccgtgcagccaatgttggctgaggcctgcaagagcgtcgagtacgctatgaaaaaatgccccaatggtatgtttagcgaaatcaaatacgatggagagcgcgtgcaggttcataagaacggtgatcatttttcatacttctctcgcagcttaaagcctgtcctaccccacaaggttgcccactttaaggactacatcccacaggctttccctggcggacattcaatgattttggacagcgaggtcctgttgatcgataataagaccggtaagccgctgccatttggcacgctgggcgtgcacaaaaaggcggcttttcaggacgccaatgtgtgcctgttcgtcttcgattgtatttattttaatgacgtaagccttatggatcggcctctgtgcgagcggcgtaagtttctgcatgacaatatggtggaaatacctaaccgtattatgttctcagaaatgaagcgtgtcactaaagccctggatcttgctgacatgattacgcgggttattcaggagggactggagggtctggtcctcaaggatgtgaaaggtacatatgagccgggtaagcgccactggttaaaagtgaagaaggattatttaaacgaaggcgcaatggctgacactgccgacctcgtcgttttaggggcattctacggccagggaagcaagggaggcatgatgagcatatttctgatgggctgctatgaccctggtagccaaaagtggtgtaccgttaccaaatgtgctgggggtcacgatgacgctactttggccaggctgcagaacgaattggacatggtcaagatctctaaagacccctctaaaattccctcctggcttaaagtgaacaaaatctactatccggacttcattgtgccagatcccaaaaaagctgcggtctgggagatcaccggggcagagttctccaagtctgaggcgcacaccgctgatggcattagcatccgctttcccagatgcacgcgtatcagagatgataaggactggaagtcagccactaacctaccacagctgaaagaactatatcagttgtccaaggaaaaggctgacttcaccgtcgtggccggagacgagggttccagcacaactggaggcagctctgaagagaacaaaggaccctcgggatccgccgtgagccggaaagccccttcaaagccatccgcttccacgaagaaggccgagggtaagctctctaactccaacagcaaggacggcaacatgcagacagcaaaaccatccgctatgaaggtgggggaaaaacttgccacaaagtcaagccctgtgaaggtgggagagaaacggaaagcagctgatgagactctctgccagactaagagacgaccagcctcagaacagcgaggcaggactgtgcccgcaggacggaggtag

SEQ ID NO: 294500 - DNA, 654 bp, Artificial Sequence
  derived and/or modified sequence
atgtatagctccgccttgtcacagcctggactggaaaggggagccgaggggaaacccggagttgaggcagggcaggagcctgctgaggctggagaacgtctgcctggaggtgagaaccagccacaggagcactccatctcagacatcctgaccacatcgcagacattggaaacagtccccttaatccccgaggtagtggaattgcctccatcactgcctagatcgtcgccatgtgtgcaccatcacggctctcctggggtggatctgcctgtgaccatccctgaagtgtcatcagtgcctgaccagattagaggcgagcctagggggtccagcgggcttgtgaattctcgccagaagagttacgaccattctagacaccatcacggaagttcgattgctgggggcctagttaagggcgctctctcagtggccgcttctgcctacaaagccttattcgccgggccgccagttaccgctcagccaataattagcgaggatcagaccgcagcactgatggcacatttgttcgagatgggtttttgtgatagacagctaaacttgagattactgaaaaagcacaactacaacatcctccaggtggtgacggaacttctacagttgaataataacgactggtactctcagaggtattag

SEQ ID NO: 294501 - DNA, 654 bp, Artificial Sequence
  derived and/or modified sequence
atgtacagcagcgccctgagccagcccggcctggagagaggagctgagggcaagccaggagtggaggccggccaggagcctgctgaggccggggagcggctgcctggaggagagaaccagccccaggagcacagcatcagtgacatcctgaccaccagccagaccctggagaccgtgcccctcatccctgaggtggtggagctgccccccagcctgcccaggagcagcccctgtgtgcaccaccacggcagccctggggtggacctgcctgtgaccatccctgaggtgtcctctgtgcctgaccagatccggggggagccccggggcagcagcggcctggtgaacagccggcagaagagctatgaccacagccgccaccaccacggcagcagcattgctgggggcctggtgaagggggccctgtctgtggccgccagcgcctacaaggccctgtttgctggcccccctgtgacagcccagcccatcatcagcgaggaccagacagctgccctgatggcccacctgtttgagatgggcttctgtgaccggcagctgaacctgcggctgctgaagaagcacaactacaacatcctgcaggtggtgacagagctgctgcagctgaacaacaatgactggtacagccagcgctactag

SEQ ID NO: 294502 - DNA, 654 bp, Artificial Sequence
  derived and/or modified sequence
atgtacagcagcgccctgagccagcccggcctggagcggggcgccgaaggaaaaccgggtgtcgaggcaggtcaggaacccgcagaggctggtgaacgtctgccgggaggtgaaaatcagcctcaggagcattcaatcagcgacatcctcacgacaagtcagaccctagagaccgtgcccctgattcctgaagtggtggagttgccgccgtcgttgcctcgctcttctccttgcgttcaccatcacgggagccctggcgtcgacctacccgtgactataccggaggtgtctagcgtgcctgatcagattcgcggagagccaaggggatcttccggactggtcaatagccgtcaaaaatcttacgatcattcccgacaccaccacggcagttccatcgcaggaggcttggtgaagggtgccttgagtgtcgcagcttccgcatacaaggctttgttcgccggaccccctgtcaccgcccagccaataatcagcgaggaccagacagccgcattaatggcccacctcttcgagatgggcttctgtgaccggcaattaaatctgcgtctactgaaaaagcataactataatatcttgcaagtggttaccgagttgctgcagttaaataacaatgactggtattcacaaaggtactag

SEQ ID NO: 294503 - DNA, 1318 bp, Artificial Sequence
  derived and/or modified sequence
acagggatagcggcagagccggtagcggacggtccttgcattggcctccggcaggcgccccccgggggcgggaagctgcctcacagcatggaaccacaggttactctaaatgtgacttttaaaaatgaaattcaaagctttctggtttctgatccagaaaatacaacttgggctgatatcgaagctatggtaaaagtttcatttgatctgaatactattcaaataaaatacctggatgaggaaaatgaagaggtatccatcaacagtcaaggagaatatgaagaagcgcttaagatggcagttaaacagggaaaccaactgcagatgcaagtccacgaagggcaccatgtcgttgatgaagccccacccccagttgtaggagcaaaacgactagctgccagggcagggaagaagccacttgcacattactcttcactggtgagagtcttgggattctatgtacagctctgcgctctcacagccaggcctggagcgaggtgctgaaggcaagcctggggttgaggctgggcaggaaccagctgaggctggggaaagactccctggaggggagaaccagccacaggagcacagcataagtgacatcctcacgacctcacagactctggaaacagtgcccctaatcccagaggtagtggagcttccaccgtcactgcccaggagctctccttgtgtacatcatcatggttccccaggagtggatttaccagttaccataccagaagtttcttcagtccctgatcagatcagaggagagcccagaggctcatcaggacttgtaaacagcagacagaagagctatgaccactcaaggcaccatcatgggagcagcattgctggaggactggtgaagggggctttgtctgttgctgcctctgcatacaaggccctgtttgctgggccaccagtcactgcacagccaataatttctgaagatcagacagcagccctgatggcccatctctttgaaatgggattctgtgacaggcagctgaacctacggctgctgaagaaacacaattacaatatcctgcaggttgtgacagaacttcttcagttaaacaacaacgactggtacagccaacgctattgaggagtgaccttgtattaaataactgcctgctgctcagagatgatctttattctgtcattggggtatgggatagaagcccttgcttatttttaatctgatgaatctgtatagagcccatcgttgagttaccaagacaatacctgctacagtattttggggagcaaactaaagaccagaacttaaattttcactttagacattggatga

SEQ ID NO: 294504 - DNA, 654 bp, Artificial Sequence
  derived and/or modified sequence
atgtatagttcagcactatcccagcctgggctggagcgcggtgcggaaggaaagcctggtgtcgaagctggacaggaaccagccgaggctggcgaacgtctccctggcggagagaatcagcctcaggagcattcaatttctgacattctcactacctcacagaccctagaaaccgttcccctcatcccagaggtcgtggagttgccgccatccctgcctcgcagcagtccttgtgttcaccaccatggctctcctggggtggacctcccagtaaccatcccggaggtgtcttctgtgccggaccagataagaggagaaccacgtggctctagtggccttgtcaactcaaggcagaagagctatgaccactctagacatcaccatggatcaagcatcgccggaggcctggtcaagggtgcgctgtctgtggccgctagtgcgtacaaagcattgttcgccggaccgcctgtcacagcacagccaataatcagcgaggaccagacagcagccctgatggctcacctgttcgaaatgggattttgtgataggcagcttaacttgagattgctcaaaaagcacaactacaatattcttcaagttgttaccgaactgctgcagctgaacaataacgactggtatagtcagagatactag

SEQ ID NO: 294505 - DNA, 654 bp, Artificial Sequence
  derived and/or modified sequence
atgtacagcagcgccctgagccagcccggcctggagagaggcgccgagggcaagcccggcgtggaggccggccaggagcccgccgaggccggcgagagactgcccggcggcgagaaccagccccaggagcacagcatcagcgacatcctgaccaccagccagaccctggagaccgtgcccctgatccccgaggtggtggagctgccccccagcctgcccagaagcagcccctgcgtgcaccaccacggcagccccggcgtggacctgcccgtgaccatccccgaggtgagcagcgtgcccgaccagatcagaggcgagcccagaggcagcagcggcctggtgaacagcagacagaagagctacgaccacagcagacaccaccacggcagcagcatcgccggcggcctggtgaagggcgccctgagcgtggccgccagcgcctacaaggccctgttcgccggcccccccgtgaccgcccagcccatcatcagcgaggaccagaccgccgccctgatggcccacctgttcgagatgggcttctgcgacagacagctgaacctgagactgctgaagaagcacaactacaacatcctgcaggtggtgaccgagctgctgcagctgaacaacaacgactggtacagccagagatactag

SEQ ID NO: 294506 - DNA, 876 bp, Artificial Sequence
  derived and/or modified sequence
atggacgtggtggaggtggccggcagctggtgggcccaggagagagaggacatcatcatgaagtacgagaagggccacagagccggcctgcccgaggacaagggccccaagcccttcagaagctacaacaacaacgtggaccacctgggcatcgtgcacgagaccgagctgccccccctgaccgccagagaggccaagcagatcagaagagagatcagcagaaagagcaagtgggtggacatgctgggcgactgggagaagtacaagagcagcagaaagctgatcgacagagcctacaagggcatgcccatgaacatcagaggccccatgtggagcgtgctgctgaacaccgaggagatgaagctgaagaaccccggcagataccagatcatgaaggagaagggcaagagaagcagcgagcacatccagagaatcgacagagacgtgagcggcaccctgagaaagcacatcttcttcagagacagatacggcaccaagcagagagagctgctgcacatcctgctggcctacgaggagtacaaccccgaggtgggctactgcagagacctgagccacatcgccgccctgttcctgctgtacctgcccgaggaggacgccttctgggccctggtgcagctgctggccagcgagagacacagcctgcagggcttccacagccccaacggcggcaccgtgcagggcctgcaggaccagcaggagcacgtggtggccaccagccagcccaagaccatgggccaccagagcgccagcagaagaagacccggcgtggccagaggccacgtgttcgccaccggcagcctgatccccggccccggcatgagaaccctgtgcagcagcatcctgggccccctgtag

SEQ ID NO: 294507 - DNA, 876 bp, Artificial Sequence
  derived and/or modified sequence
atggatgtggtggaggttgcaggcagctggtgggcacaggaacgggaagacatcattatgaagtatgaaaagggccaccgggctggcctaccagaagataagggaccaaaaccttttcggagctacaacaacaatgtggatcatttaggcatcgtgcacgaaaccgagcttccccctctgacggcaagggaggctaaacagatccggagggagatcagtcggaaatccaagtgggtggatatgctgggggactgggaaaagtataaaagcagtcggaagctaattgaccgggcatacaaagggatgccaatgaacattaggggtcctatgtggtccgtgcttttgaacacagaggaaatgaagctcaaaaaccccggtcggtatcagataatgaaggagaaggggaagcgctcaagtgagcatatccagcgcattgatagagacgtaagcgggactttgaggaaacacattttttttcgggataggtacgggacaaagcagcgggaactactgcacatcctgttggcgtatgaggaatataatcccgaggtcggatactgccgggatcttagtcacatagccgcgctgtttctgctttatctgccagaagaggacgccttctgggccttggtacaactgttggccagcgaaagacatagtctacagggtttccactcaccaaatgggggtaccgtgcagggcctccaggaccagcaggagcatgtggtggcgacttcacagcccaagacaatgggccaccagtctgcatcacgaaggaggcccggagtggcacgcggacacgtgttcgccactgggagtctgattcctggccccggcatgcggaccttgtgttcctccatcctgggcccgctgtag

SEQ ID NO: 294508 - DNA, 876 bp, Artificial Sequence
  derived and/or modified sequence
atggatgtggtggaggtggccggctcctggtgggcccaggagcgggaggacatcatcatgaagtatgagaagggccaccgggccggcctgcctgaggacaagggccccaagcccttccgcagctacaacaacaacgtggaccacctgggcatcgtgcatgaaacagagctgccccccctgacagcccgggaggccaagcagatcagaagagagatcagcaggaagagcaagtgggtggacatgctgggggactgggagaagtacaagagcagcaggaagctgattgaccgggcctacaagggcatgcccatgaacatccggggccccatgtggagcgtgctgctgaacacagaggagatgaagctgaagaaccctggccgctaccagatcatgaaggagaagggcaagaggagcagcgagcacatccagagaattgacagagatgtgtctggcaccctgaggaagcacatcttcttccgggacagatatggcaccaagcagcgggagctgctgcacatcctgctggcctatgaggagtacaaccctgaggtgggctactgccgggacctgagccacatcgccgccctcttcctgctgtacctgcctgaggaggatgccttctgggccctggtgcagctgctggccagcgagcggcacagcctgcagggcttccacagccccaacggcggcaccgtgcagggcctgcaggaccagcaggagcacgtggtggccaccagccagcccaagaccatgggccaccagagcgccagcagaagaagacctggggtggcccggggccacgtgtttgccaccggcagcctcatccctggccctggcatgaggaccctgtgcagcagcatcctgggccccctgtag

SEQ ID NO: 294509 - DNA, 876 bp, Artificial Sequence
  derived and/or modified sequence
atggacgtggtggaggtggccggcagctggtgggcccaggagcgggaggatataataatgaagtacgagaaggggcatcgggctggtcttcccgaagataaaggccccaagccctttagatcgtataataacaacgttgatcatctaggcattgtacatgagaccgagcttcctccattgaccgctcgggaagctaagcagatcaggcgggaaatcagcaggaaaagcaaatgggttgatatgctgggggattgggaaaaatataagtcgagccgtaaactgatcgacagagcttataaggggatgcccatgaatattaggggacctatgtggtccgtcttgttgaatactgaagaaatgaaattgaaaaaccctggccgctaccagataatgaaagaaaagggtaagagatcaagtgagcacatccagaggatcgatagggacgttagcggcacattgcggaagcatatattttttagagatagatacggcacaaaacagcgcgaacttctgcacattttactcgcgtatgaggaatacaacccggaggtaggttattgccgcgacctgtcccacatcgcagctctcttcctgttatacctacctgaggaggatgctttttgggcgctcgtgcaactgcttgcaagcgagcggcattctcttcagggcttccacagccccaacgggggcactgtacaaggtttgcaggaccaacaggaacacgtggtagccacgtcacagccgaagaccatggggcatcagagcgccagtaggaggcgccccggggtcgctcgcggccacgtgttcgccacaggctccctgatccccggacccggaatgagaaccttgtgctcctccatcttggggcccctatag

SEQ ID NO: 294510 - DNA, 876 bp, Artificial Sequence
  derived and/or modified sequence
atggacgtggtggaagtggccggaagctggtgggcgcaggaaagagaggatataattatgaagtatgaaaaggggcaccgggcaggcctgcccgaggataagggcccaaaacccttccgatcatataacaacaacgtagatcatcttggcattgtccatgaaaccgagctaccaccgctaacagcgagagaagctaagcagatccggagagagatctctcgcaagtcaaagtgggtcgacatgttaggtgactgggagaagtacaaatcaagcaggaaactgattgaccgcgcttacaaggggatgcctatgaatattaggggacccatgtggtcagtgctgcttaacaccgaggagatgaagctgaaaaacccaggcaggtaccagattatgaaggagaaaggcaagcggtctagtgaacatatccaaagaatcgaccgcgacgtgagcggaactctccgcaagcacatattcttccgtgatcgatatggcacgaaacagagagagctcctgcatattctcctcgcctatgaggagtataacccagaggtaggatattgcagggatctttcccatatcgccgcactgtttctcttgtatctgccagaagaggatgcattctgggctctcgtgcagttactcgcttccgaaaggcactccctgcaggggtttcattcccctaacggagggactgttcagggactgcaggatcagcaggaacacgtggttgccacaagtcagcccaagacgatgggccatcagtctgcaagcagaagacggcctggtgttgcaagagggcacgtgtttgccaccgggtctctgatccccggacccggaatgcgaacattgtgtagcagcattttgggccctctctag

SEQ ID NO: 294511 - protein, 325 aa, Artificial Sequence
  derived and/or modified sequence
MKEMVGGCCVCSDERGWAENPLVYCDGHACSVVVHQACYGIVQVPTGPWFCRKCESQERAARVRCELCPHKDGALKRTDNGGWAHVVCALYIPEVQFANVLTMEPIVLQYVPHDRFNKTCYICEEQGRESKAASGACMTCNRHGCRQAFHVTCAQMAGLLCEEEVLEVDNVKYCGYCKYHFSKMKTSRHSSGGGGGGAGGGGGSMGGGGSGFISGRRSRSASPSTQQEKHPTHHERGQKKSRKDKERLKQKHKKRPESPPSILTPPVVPTADKPRRGHQSPTNHGIGSLGCCLPDTPICLCPEGLSPGLLSAESGGRHSGLLSKF

SEQ ID NO: 294512 - DNA, 978 bp, Artificial Sequence
  derived and/or modified sequence
atgaaagagatggtcggcggatgctgtgtgtgttccgacgagaggggctgggccgaaaatccactcgtgtactgcgatggccatgcttgttccgtggttgtgcaccaagcttgctatggaatcgtacaggtgccgactggcccgtggttttgtcgcaagtgcgagtctcaggagcgggccgcacgcgtacgatgtgaactgtgcccgcataaggacggagcactgaagcggacggataatggaggatgggctcacgtagtgtgtgccctgtacatccccgaggttcagtttgctaatgtgctgaccatggaaccaattgtgctgcaatatgtgccccacgacaggttcaacaaaacctgttacatttgcgaagagcagggccgagaaagtaaggcggcatctggcgcctgcatgacctgcaatcgacacgggtgtcgacaggcattccatgtcacttgcgcacagatggccgggctgctgtgcgaggaggaggttctcgaagtagacaatgttaagtactgtggatactgtaagtaccatttttccaaaatgaaaacgtcccgccactcttcaggaggtggggggggaggcgccgggggcggtggggggagcatgggagggggtggctctggcttcattagcggaagacgctctagatccgcaagcccctccactcagcaggagaaacacccaacacaccacgaacgcggccagaaaaagtcacgcaaggataaagagagacttaaacaaaagcacaaaaaacggcccgagtctccaccctccattctcactccacccgtagttccaactgcagacaaaccacgacgtggccaccaaagccctactaaccacggaattggttccctggggtgctgcttgcctgatacacccatttgcctttgtcccgaggggttatccccaggactcctgtctgcagaaagcggaggccggcattctggactcctttcaaaattctag

SEQ ID NO: 294513 - DNA, 978 bp, Artificial Sequence
  derived and/or modified sequence
atgaaggagatggtgggcggctgctgcgtgtgcagtgatgagcggggctgggccgagaaccccctggtgtactgtgatggccacgcctgcagcgtggtggtgcaccaggcctgctatggaattgtgcaggtgcccaccggcccctggttctgcaggaaatgtgagagccaggagcgggccgcccgggtgcgctgtgagctgtgcccccacaaggatggagccctgaagaggacagacaatggaggctgggcccacgtggtgtgtgccctgtacatccctgaggtgcagtttgccaacgtgctgaccatggagcccatcgtgctgcagtatgtgccccatgaccgcttcaacaagacctgctacatctgtgaggagcagggccgggagagcaaggccgccagcggggcctgcatgacctgcaacagacatggctgccggcaggccttccacgtgacctgtgcccagatggccggcctgctgtgtgaggaggaggtgctggaggtggacaacgtgaagtactgcggctactgcaagtaccacttcagcaagatgaagaccagccgccacagcagcggcggcggcggcggcggggccggcggcggcggcggctccatgggcggcggcggcagcggcttcatcagcggccgccgcagccgcagcgccagccccagcacccagcaggagaagcaccccacccaccacgagcggggccagaagaagagcaggaaggacaaggagcggctgaagcagaagcacaagaagaggcctgagagccccccatccatcctgaccccacctgtggtgcccacagctgacaagccccggcggggccaccagagccccaccaaccacggcatcggcagcctgggctgctgcctgcctgacacccccatctgcctgtgcccagagggcctgagccctggcctgctgtctgctgagagcggcggccgccacagcggcctgctgagcaagttctag

SEQ ID NO: 294514 - DNA, 2724 bp, Artificial Sequence
  derived and/or modified sequence
gcgcgcggccccccgctccctccctcccccctgacccccgacccccgccggccggccccccgccccagccccggagggagctcatgggagtatgaaggagatggtaggaggctgctgcgtatgttcggacgagaggggctgggccgagaacccgctggtctactgcgatgggcacgcgtgcagcgtggtcgtccaccaagcttgctatggcatcgttcaggtgccaacgggaccctggttctgccggaaatgtgaatctcaggagcgagcagccagggtgaggtgtgagctgtgcccacacaaagacggggcattgaagaggactgataatggaggctgggcacacgtggtgtgtgccctctacatccccgaggtgcaatttgccaacgtgctcaccatggagcccatcgtgctgcagtacgtgcctcatgatcgcttcaacaagacctgttacatctgcgaggagcagggccgggagagcaaggcggcctcgggagcctgcatgacctgtaaccgccatggatgtcgacaagctttccacgtcacctgtgcccaaatggcaggcttgctgtgtgaggaagaagtgctggaggtggacaacgtcaagtactgcggctactgcaaataccacttcagcaagatgaagacatcccggcacagcagcgggggaggcggaggaggcgctggaggaggaggtggcagcatggggggaggtggcagtggtttcatctctgggaggagaagccggtcagcctcaccatccacgcagcaggagaagcaccccacccaccacgagaggggccagaagaagagtcgaaaggacaaagaacgccttaagcagaagcacaagaagcggcctgagtcgccccccagcatcctcaccccgcccgtggtccccactgctgacaagcctagaaggggccaccaatcaccgaccaaccatgggattgggagtttggggtgctgtctgccagatactcccatctgcctctgtccagagggcctcagccctgggctcttgtctgcagagagtgggggacggcactcaggcctgctctccaagttctagggcccctgtccccagagatcggtagaggacatcccctacgccccatcaggaggacacccaaagcttgtcacccaacccaaatcccactctgtgcaggttggaggggctgaaagttctgaccaaggtggcatggggggcaggcccctggacagtatcccgaaactcccactcatcccaccattcccagcagggcatggtatgtcaggcctgtctccagaaatgggcaacatctggctgagcgataggcaggccctaccctaggccagggaattgctaatccaagctggaacagccctccctgctccctacaacctgccctccccatgggaggagaacctggtagggtggggggagatggagaaactgctccctcctgtcaccattattgcccattcacctccaccccatctcagacggttggcagagttctgggcaccttagcaggaggttcaggtatcaggtttccagggtgatgttgctgtggcaactgccccagtaaacctctcccctgcttcccagggctcacctggagaccttgtcattcatgccctctgacctttccaggggcctgcaggcaggtggcaagaaatggccaggggtctgggagtttttccagtaactggatgtcccttggacatgccagagaactctgcccatcctcctccactcgccccagcacttcggctacccttccccccagcccctctcttcccttgctctcagaaccacatctggctcccttcagaactccagctgttgaaaagaacaaagaggaagacagagaccaggactccgcccgggaggggcagtgcagggtggctctcgtttctggtccagcctgcattcagcatttatctgttcagcacgattaactgaatacctggtcgctactaggaggaaaagggccttccctggcagcagcctgaagcacgaacgaactcacggcatgccaggctgtgttctagaaccaggagatggaggggcatatggagattagtccatttaatactcaaaataatccaattaggttggaaatttataaaccccatttaatatatgaagatgatggggcacagggaggttaagtaatttgcctaaaagcacacagctagtaaagtggtagacctgagattccaatgcagtctggcttgaaggcttgtgctcttcacctgcccacagcactgtctctgcagctgctgccactggacgtctcatcatttattgaccctataccatgtatctggcatcatgctgcttccaactcaccacatatgcatagtgctccctgtaaagacactgacacttatcgacgttgagactttgcacagtataacatggcagtgaggccaggcgtggtggctcacgcctgtagtcccagcactttgggagtccgaggcaggtggatcacctgaggtcaggggttcgagatcagcctggccaacatggtgaaaccctgcctctattaaaaatacacaaaattagccgggtgtggtggctggtgcctgtaatcccagctacttgggaggctgaggcaggagaatcacttgaacctgggaggtgattgaaggttgcagtgagccgagatcgcaccattgcactccagcctgtgcaacaagagtgaaactccatctcaaaaataaattaagaaaaaacaa

SEQ ID NO: 294515 - DNA, 978 bp, Artificial Sequence
  derived and/or modified sequence
atgaaggagatggtgggcggctgctgcgtgtgcagcgacgagcggggatgggctgaaaaccccttggtgtactgtgacggccacgcctgcagcgtggtggtacaccaggcttgctacggtatcgtgcaggtgccaaccggaccctggttctgtcgcaagtgcgaatcccaggagcgtgctgctcgtgtccgctgcgaattgtgtccacacaaagatggcgcactgaaacggaccgacaatggagggtgggctcatgtggtgtgcgctctctatattcccgaggtgcagtttgccaacgtcctgaccatggaacctattgtgctgcaatatgtgccccatgatcgattcaacaaaacatgttatatttgtgaggagcagggtagggaaagcaaggccgcatcaggggcatgtatgacttgtaaccgacacggatgccggcaggcttttcacgtgacctgtgcccagatggctggcctgctatgtgaagaggaagtgttagaggtcgacaacgttaagtattgtgggtactgcaaatatcacttctcaaaaatgaagaccagccggcattctagtggcggcgggggaggaggcgcgggcggtggcggtgggtcaatgggcggcggcggtagcggttttatatctggccggaggagccggtcggcctctcccagtacccagcaggagaaacatccaacacatcacgagagagggcaaaagaaaagtcgtaaagacaaggagagattgaagcagaagcacaaaaagaggcccgaatctcctccttcaatattaaccccccccgtggtccccacagccgataaaccccgcagaggccaccagagcccaaccaatcatggaattggtagcctgggctgttgtctgccagatactcctatctgtctctgcccagaaggtcttagccccgggttattgtcagctgaatccggcgggagacatagtggactactgtccaagttctag

SEQ ID NO: 294516 - DNA, 978 bp, Artificial Sequence
  derived and/or modified sequence
atgaaggagatggtcggaggctgttgcgtgtgtagcgacgagagggggtgggcggagaacccccttgtttactgtgacggacatgcgtgctctgtcgttgttcaccaggcctgttacgggatcgtacaggttcccacgggaccctggttttgtaggaagtgcgagtcacaggaaagggcagcccgagtacgctgtgaactctgtcctcacaaagatggggcattgaagcggaccgataatgggggatgggctcatgtggtctgtgcactttacatccctgaagtccagttcgctaatgttctgaccatggaacccatcgtgcttcagtatgtaccacacgaccggtttaacaagacctgctacatttgtgaggagcagggcagagagtccaaagccgcttctggcgcttgtatgacttgcaaccgccacggttgtcggcaggcttttcacgttacatgcgcccagatggccggtttgttgtgtgaagaggaagtgctcgaggtggacaacgtgaaatattgtggctactgtaaatatcatttctcaaagatgaaaaccagtcggcactcttcaggcggaggaggaggcggagccggaggcggaggaggctccatgggaggaggcggttctggcttcatctcgggtcgaagatcgcgaagcgcaagcccctccacgcagcaggagaaacacccaacacaccacgagagaggacaaaagaagagcagaaaggataaggagcgtctaaaacaaaaacataagaagcgacctgaatctcctccaagtatcctcacccctccagtggtgcccaccgctgataaacccaggcgtggacaccagagcccaactaaccatggcattggcagtcttggctgttgcctgccagatacaccgatttgcctgtgtcctgaaggcctgtccccaggcctgcttagcgctgaatcagggggaaggcattctgggctcttgtccaagttctag

SEQ ID NO: 294517 - DNA, 978 bp, Artificial Sequence
  derived and/or modified sequence
atgaaggagatggtgggcggctgctgcgtgtgcagcgacgagagaggctgggccgagaaccccctggtgtactgcgacggccacgcctgcagcgtggtggtgcaccaggcctgctacggcatcgtgcaggtgcccaccggcccctggttctgcagaaagtgcgagagccaggagagagccgccagagtgagatgcgagctgtgcccccacaaggacggcgccctgaagagaaccgacaacggcggctgggcccacgtggtgtgcgccctgtacatccccgaggtgcagttcgccaacgtgctgaccatggagcccatcgtgctgcagtacgtgccccacgacagattcaacaagacctgctacatctgcgaggagcagggcagagagagcaaggccgccagcggcgcctgcatgacctgcaacagacacggctgcagacaggccttccacgtgacctgcgcccagatggccggcctgctgtgcgaggaggaggtgctggaggtggacaacgtgaagtactgcggctactgcaagtaccacttcagcaagatgaagaccagcagacacagcagcggcggcggcggcggcggcgccggcggcggcggcggcagcatgggcggcggcggcagcggcttcatcagcggcagaagaagcagaagcgccagccccagcacccagcaggagaagcaccccacccaccacgagagaggccagaagaagagcagaaaggacaaggagagactgaagcagaagcacaagaagagacccgagagcccccccagcatcctgaccccccccgtggtgcccaccgccgacaagcccagaagaggccaccagagccccaccaaccacggcatcggcagcctgggctgctgcctgcccgacacccccatctgcctgtgccccgagggcctgagccccggcctgctgagcgccgagagcggcggcagacacagcggcctgctgagcaagttctag

SEQ ID NO: 294518 - DNA, 615 bp, Artificial Sequence
  derived and/or modified sequence
atgcacgagagatacagcaacgtgcaggtggccggccccgtggacagaaccagcagcaaggacagccccctgcacaaggccctgttctgggtggccgtggccgtgctgcagctggacgaggtgaacctgtacagcgccggcaccgccctgctggagcagaacctgcacaccctggacagcctgagaatcttcaacgacaagagccccgaggaggtgttcatggccatcagaaaccccctggagtggcactgcaagcagatggaccacttcgtgggcctgaacttcaacagcaacttcaacttcgccctggtgggccacctgctgaagggctacagacaccccagccccgccatcgtggccagaaccgtgagaatcctgcacaccctgctgaccctggtgaacaagcacagaaactgcgacaagttcgaggtgaacacccagagcgtggcctacctggccgccctgctgaccgtgagcgaggaggtgagaagcagatgcagcctgaagcacagaaagagcctgctgctgaccgacatcagcatggagaacgtgcccatggacacctaccccatccaccacggcgaccccagctacagaaacaaggagaagttctag

SEQ ID NO: 294519 - DNA, 615 bp, Artificial Sequence
  derived and/or modified sequence
atgcacgagaggtacagtaatgtccaggtcgccgggcccgtcgatcgcacatcctcaaaggactcccccctgcataaggcgctattttgggtagccgtcgctgtactacagcttgacgaagtcaacttgtacagcgccggcactgcattgctggagcagaacctccacacccttgattcattaaggattttcaatgataagagccctgaggaagtcttcatggccatcagaaacccactggagtggcactgtaaacagatggaccatttcgtcgggctgaattttaacagtaatttcaactttgctctagtgggccatctgctgaaagggtaccgccacccctccccagctattgttgcacgcacggttagaattctacatactctcctcactctggtcaacaaacacaggaattgcgacaagtttgaggtgaatacccagagtgttgcatacctggccgccctgctgactgtgtctgaagaggtacgatccagatgctcactcaagcatcgcaaaagtcttctcttgactgatatttccatggagaacgtgcccatggatacctatcctatacatcatggagatccgagttacagaaataaggaaaagttctag

SEQ ID NO: 294520 - DNA, 615 bp, Artificial Sequence
  derived and/or modified sequence
atgcatgagcgctacagcaatgtgcaggtggccggccctgtggacaggaccagcagcaaggacagccccctgcacaaggccctcttctgggtggccgtggccgtgctgcagctggatgaggtgaacctgtacagcgctggaacagccctgctggagcagaacctgcacaccctggacagcctgcgcatcttcaatgacaagagccctgaggaggtgttcatggccatccggaaccccctggagtggcactgcaagcagatggaccactttgtgggcctgaacttcaacagcaacttcaactttgccctggtgggccacctgctgaagggctaccgccaccccagccctgccatcgtggccaggacagtgcgcatcctgcacaccctgctgaccctggtgaacaagcacaggaactgtgacaagtttgaggtgaacacccagagcgtggcctacctggccgccctgctgactgtgtctgaggaggtgcgcagccgctgcagcctgaagcacaggaagagcctgctgctgacagacatctccatggagaatgtgcccatggacacctaccccatccaccacggggaccccagctacagaaacaaggagaagttctag

SEQ ID NO: 294521 - DNA, 615 bp, Artificial Sequence
  derived and/or modified sequence
atgcacgagcggtacagcaacgtgcaggtggccggccccgtggacaggacgtcttccaaagatagcccactgcacaaagcgctattctgggttgccgtcgccgttctccaactcgatgaagtgaacctttactccgctgggactgcgctgctggagcagaatttacacacattggactccttgcgaattttcaatgataaatcacctgaggaggtgtttatggcaattcgcaatcctctggagtggcactgcaaacagatggatcattttgtcgggctcaactttaatagcaatttcaattttgccctagtgggccacctcctgaagggataccggcacccaagtcctgccatcgttgccagaacagttcggatactccacacactcctgacgctggtaaataagcacaggaattgcgataagtttgaggtgaatacacagtcagtagcttacctggccgctctcctcaccgtgtccgaggaggtgcggtcccgatgttcacttaaacacaggaagagtctactgctcacggatattagtatggaaaacgtgcccatggatacgtaccccattcatcacggcgacccctcataccgtaacaaagagaagttctag

SEQ ID NO: 294522 - DNA, 615 bp, Artificial Sequence
  derived and/or modified sequence
atgcacgaacgatactcaaacgtccaggtagctggcccagtggatagaaccagctccaaggattctccactgcacaaggccctcttttgggtggccgtagccgtgctgcaactggacgaagtgaacctgtactccgccggaacagcactccttgagcagaatttgcatactctggacagtctcaggatttttaatgacaaatccccggaggaggtgtttatggctatacggaacccgctggagtggcactgtaagcaaatggaccatttcgtgggactcaatttcaattccaatttcaactttgctttagtcgggcatctccttaaaggataccgtcaccctagtccagcaattgtggccagaacggtgagaattcttcacaccctgctcactctcgttaacaaacacagaaattgtgataaattcgaggtgaacacgcagtctgtggcatatttagccgcactgctgacagtgagcgaggaggtgcgatcacggtgctccctgaagcatcgtaagtccctgctgctgacggacatcagcatggagaatgttccaatggacacataccctatccatcacggtgacccgtcttataggaataaagaaaaattttag

SEQ ID NO: 294523 - protein, 638 aa, Artificial Sequence
  derived and/or modified sequence
MHERYSNVQVAGPVDRTSSKFCGSFNCRFAFQYNPSLQPRALVVFGCISKRVSHGQIKQIIRILSKALESCLKGPDTYNSQVLIEATVIALTKLQPLLNKDSPLHKALFWVAVAVLQLDEVNLYSAGTALLEQNLHTLDSLRIFNDKSPEEVFMAIRNPLEWHCKQMDHFVGLNFNSNFNFALVGHLLKGYRHPSPAIVARTVRILHTLLTLVNKHRNCDKFEVNTQSVAYLAALLTVSEEVRSRCSLKHRKSLLLTDISMENVPMDTYPIHHGDPSYRTLKETQPWSSPKGSEGYLAATYPTVGQTSPRARKSMSLDMGQPSQANTKKLLGTRKSFDHLISDTKAPKRQEMESGITTPPKMRRVAETDYEMETQRISSSQQHPHLRKVSVSESNVLLDEEVLTDPKIQALLLTVLATLVKYTTDEFDQRILYEYLAEASVVFPKVFPVVHNLLDSKINTLLSLCQDPNLLNPIHGIVQSVVYHEESPPQYQTSYLQSFGFNGLWRFAGPFSKQTQIPDYAELIVKFLDALIDTYLPGIDEETSEESLLTPTSPYPPALQSQLSITANLNLSNSMTSLATSQHSPGIDKENVELSPTTGHCNSGRTRHGSASQVQKQRSAGSFKLALLNLLTAHQNSL

SEQ ID NO: 294524 - DNA, 1917 bp, Artificial Sequence
  derived and/or modified sequence
atgcacgagagatacagcaacgtgcaggtggccggccccgtggacagaaccagcagcaagttctgcggcagcttcaactgcagattcgccttccagtacaaccccagcctgcagcccagagccctggtggtgttcggctgcatcagcaagagagtgagccacggccagatcaagcagatcatcagaatcctgagcaaggccctggagagctgcctgaagggccccgacacctacaacagccaggtgctgatcgaggccaccgtgatcgccctgaccaagctgcagcccctgctgaacaaggacagccccctgcacaaggccctgttctgggtggccgtggccgtgctgcagctggacgaggtgaacctgtacagcgccggcaccgccctgctggagcagaacctgcacaccctggacagcctgagaatcttcaacgacaagagccccgaggaggtgttcatggccatcagaaaccccctggagtggcactgcaagcagatggaccacttcgtgggcctgaacttcaacagcaacttcaacttcgccctggtgggccacctgctgaagggctacagacaccccagccccgccatcgtggccagaaccgtgagaatcctgcacaccctgctgaccctggtgaacaagcacagaaactgcgacaagttcgaggtgaacacccagagcgtggcctacctggccgccctgctgaccgtgagcgaggaggtgagaagcagatgcagcctgaagcacagaaagagcctgctgctgaccgacatcagcatggagaacgtgcccatggacacctaccccatccaccacggcgaccccagctacagaaccctgaaggagacccagccctggagcagccccaagggcagcgagggctacctggccgccacctaccccaccgtgggccagaccagccccagagccagaaagagcatgagcctggacatgggccagcccagccaggccaacaccaagaagctgctgggcaccagaaagagcttcgaccacctgatcagcgacaccaaggcccccaagagacaggagatggagagcggcatcaccaccccccccaagatgagaagagtggccgagaccgactacgagatggagacccagagaatcagcagcagccagcagcacccccacctgagaaaggtgagcgtgagcgagagcaacgtgctgctggacgaggaggtgctgaccgaccccaagatccaggccctgctgctgaccgtgctggccaccctggtgaagtacaccaccgacgagttcgaccagagaatcctgtacgagtacctggccgaggccagcgtggtgttccccaaggtgttccccgtggtgcacaacctgctggacagcaagatcaacaccctgctgagcctgtgccaggaccccaacctgctgaaccccatccacggcatcgtgcagagcgtggtgtaccacgaggagagccccccccagtaccagaccagctacctgcagagcttcggcttcaacggcctgtggagattcgccggccccttcagcaagcagacccagatccccgactacgccgagctgatcgtgaagttcctggacgccctgatcgacacctacctgcccggcatcgacgaggagaccagcgaggagagcctgctgacccccaccagcccctacccccccgccctgcagagccagctgagcatcaccgccaacctgaacctgagcaacagcatgaccagcctggccaccagccagcacagccccggcatcgacaaggagaacgtggagctgagccccaccaccggccactgcaacagcggcagaaccagacacggcagcgccagccaggtgcagaagcagagaagcgccggcagcttcaagctggccctgctgaacctgctgaccgcccaccagaacagcctgtag

SEQ ID NO: 294525 - DNA, 1917 bp, Artificial Sequence
  derived and/or modified sequence
atgcacgaacgttactctaatgtgcaagtggccggccccgttgacaggactagctccaaattttgtggaagcttcaattgccgcttcgcattccagtacaatccttccctgcaacctcgcgcccttgtggtgttcggctgcatcagcaaaagggtatcgcacgggcaaataaaacagataattcggatactcagcaaagccttagagtcatgcttgaaaggccctgatacctacaactcacaagttttgatcgaggcaacggtcattgccctgaccaagctgcaaccacttcttaacaaggattcgcccctgcataaggccctgttttgggtggccgtggcagtactgcagttggacgaagttaatctgtactcagctgggacggctctcctggaacagaacctgcacacattggactcgttacgcattttcaacgataaatctccggaggaggtttttatggcgattcgcaacccactggagtggcattgtaaacaaatggatcactttgttggcctcaattttaactctaactttaattttgccttagtcggtcatctcctgaagggctataggcacccttccccagctattgtggccaggaccgtgcgcatactgcatacattgctcactctggttaacaagcatcggaattgcgataaattcgaggtgaacacacaatccgtggcctatctggccgccctgctaaccgtctccgaggaggtcagaagtagatgctcactgaaacataggaagagcttattgcttacagacatcagtatggaaaatgtacctatggacacataccctatacatcatggggaccccagctacaggaccttgaaggagacccaaccttggtctagccccaaaggcagtgaaggatacctggccgccacatatcccacagtgggtcagacttccccgagggctcgcaaatccatgtctctcgacatgggtcaaccctctcaggcaaacacaaagaagctactggggactcggaagagttttgatcacttgatttctgatacaaaggctcccaagaggcaggagatggagtccggaataaccacaccccccaagatgcgcagagtggccgagacggattacgagatggagacacagcggatctcttcttctcagcaacacccacacctaaggaaggtgtccgtgtccgaaagtaacgtcctgctggatgaggaagtactgactgatccaaagattcaagcacttttacttacagtcctggccaccctcgttaagtataccacagatgagtttgatcaacgtatcctttacgagtaccttgcagaggcctcagtcgtatttccgaaggtatttcctgtcgtgcataatctgctcgattccaagatcaatactctgctgtcgttgtgtcaggacccaaatctgcttaacccgatccacggcatagtgcagtcggtggtgtaccatgaagagtcaccgccccagtaccagaccagctacctgcagtctttcgggttcaatgggctgtggcgctttgcaggcccatttagcaagcaaacccagatacccgactacgcagagctcatagtgaagttcctggacgccctcattgatacctacctgcccggaatcgatgaggaaacttccgaggagagtcttctgactcctacaagtccatacccccctgccctacaatctcagctgtccatcacagccaacctaaacctgtccaactcaatgacatctcttgccacttcccagcactcacccggcatagataaggagaatgtggaactgagccccacgaccggccactgcaactctgggagaacacgccatggcagcgcctctcaggttcagaagcagcggagcgccggctccttcaaattggcgcttctgaatctgctgacggcgcaccagaactctctgtag

SEQ ID NO: 294526 - DNA, 1917 bp, Artificial Sequence
  derived and/or modified sequence
atgcatgagcgctacagcaatgtgcaggtggccggccctgtggacaggaccagcagcaagttctgtggcagcttcaactgccgctttgccttccagtacaaccccagcctgcagccccgggccctggtggtgtttggctgcatcagcaagagggtgagccacggccagatcaagcagatcatccgcatcctgagcaaggccctggagagctgcctgaagggccctgacacctacaacagccaggtgctgattgaggccaccgtgattgccctgaccaagctgcagcccctgctgaacaaggacagccccctgcacaaggccctcttctgggtggccgtggccgtgctgcagctggatgaggtgaacctgtacagcgctggaacagccctgctggagcagaacctgcacaccctggacagcctgcgcatcttcaatgacaagagccctgaggaggtgttcatggccatccggaaccccctggagtggcactgcaagcagatggaccactttgtgggcctgaacttcaacagcaacttcaactttgccctggtgggccacctgctgaagggctaccgccaccccagccctgccatcgtggccaggacagtgcgcatcctgcacaccctgctgaccctggtgaacaagcacaggaactgtgacaagtttgaggtgaacacccagagcgtggcctacctggccgccctgctgactgtgtctgaggaggtgcgcagccgctgcagcctgaagcacaggaagagcctgctgctgacagacatctccatggagaatgtgcccatggacacctaccccatccaccacggggaccccagctaccgcaccctgaaggagacccagccctggagcagccccaagggcagcgagggctacctggccgccacctaccccaccgtgggccagaccagcccccgggccaggaagtccatgagcctggacatgggccagcccagccaggccaacaccaagaagctgctgggcaccaggaagagctttgaccacctgatcagtgacaccaaggcccccaagaggcaggagatggagagcggcatcaccaccccacccaagatgagaagagtggccgagacagattatgagatggagacccagaggatcagcagcagccagcagcacccccacctgaggaaggtgtctgtgtctgagagcaatgtgctgctggatgaggaggtgctgacagaccccaagatccaggccctgctgctgactgtgctggccaccctggtgaagtacaccacagatgaatttgaccagaggatcctgtatgagtacctggccgaggcctctgtggtgttccccaaggtgtttcctgtggtgcacaacctgctggacagcaagatcaacaccctgctgagcctgtgccaggaccccaacctgctgaaccccatccatggaattgtgcagagcgtggtgtaccacgaggagagccccccccagtaccagaccagctacctgcagagctttggcttcaacggcctgtggaggtttgctggccccttcagcaagcagacccagatcccagactatgcagagctgattgtgaagttcctggatgccctgattgacacctacctgcccggcattgatgaggagaccagcgaggagagcctgctgacccccaccagcccctaccccccagccctgcagagccagctgagcatcacagccaacctgaacctgagcaacagcatgaccagcctggccaccagccagcacagccctggcatcgacaaggaaaatgtggagctgagccccaccaccggccactgcaacagcggccgcaccaggcatggcagcgccagccaggtgcagaagcagaggtctgctggcagcttcaagctggccctgctgaacctgctgacagcccaccagaacagcctgtag

SEQ ID NO: 294527 - DNA, 1917 bp, Artificial Sequence
  derived and/or modified sequence
atgcacgagcggtacagcaacgtgcaggtggccggccccgtggaccgcacgtcctcgaagttctgtggaagcttcaactgcaggtttgcctttcagtacaacccgagtctgcagcctcgcgccctcgtggtgtttggatgcatttctaagcgtgttagtcatggacaaattaaacaaatcatccggatcctgagcaaggcattagagtcgtgtctgaaaggccctgacacgtacaacagccaggtcctcatcgaggccacagtgattgcccttacaaaactgcaaccactgttaaataaggatagtcctctccacaaagcactgttttgggttgccgttgccgtcctgcagctggacgaggtcaatctgtacagtgctggaaccgctcttctggaacaaaatctgcatactctggattccctcaggatctttaatgataagtctcccgaggaggtctttatggctatacgaaatccactcgaatggcattgtaaacagatggaccacttcgtggggttgaacttcaactctaattttaacttcgcgctggtcggccacctcctcaaaggataccgccaccctagccccgccatagtggccagaaccgtgcgtatactccatacattattgaccctggtcaacaagcaccgcaactgcgacaaattcgaggtgaacacgcagtcagtggcatacctagctgccctgttgacagtgtcagaagaagtgaggtcgcggtgcagcttgaaacacaggaaatctctcctgctgaccgacatctccatggaaaatgtaccaatggatacatatcctattcatcatggggatccatcctacagaactttgaaagagacacagccctggtcgtccccaaaaggctccgagggttatctggcagccacatacccgaccgtgggacagacttcccctagggcccgtaagtccatgagtctggacatgggccaaccttctcaggccaatactaagaagctgctgggcactagaaaatccttcgaccacttgatatccgacacgaaagcgcctaagaggcaggagatggaaagtggcatcaccacccctccaaaaatgcgcagagtggccgagacggattatgagatggagacccagaggatctccagtagccaacagcaccctcatctgaggaaagtctcagtgtctgaatcaaatgtgctgcttgacgaagaagtgttgactgacccaaagattcaggcgctcctgctcacagtgttagccactcttgtcaagtacacaacagatgaatttgatcagcgcatactttacgaatacctggccgaagcgtccgttgtgtttccgaaggtgttccctgttgtgcataacctgctggacagtaagatcaatacgctcctaagcctgtgccaagatccgaatctgctgaacccaattcacggaatcgtgcagagcgtagtgtatcatgaggagagtccccctcaatatcagacttcctacctccaatcatttggcttcaatggactttggaggttcgctggcccctttagcaaacagacccagatccccgactacgccgaactgatcgtcaagttcctcgacgctttgatcgacacatacctgccagggatagatgaggaaacctccgaagaatccttgctgactcccacttctccttaccccccagctctgcaatcacagctcagtattaccgccaatcttaatcttagcaactctatgactagtctggcaacaagccagcattcgccagggattgataaggagaacgtggagctgtctccaacaaccggccactgtaattcgggaagaacgcgtcacggctcagcctcccaagtgcagaaacagcggtcggcggggagctttaaactggccctgttaaatctcctcactgctcaccaaaattcattgtag

SEQ ID NO: 294528 - DNA, 2028 bp, Artificial Sequence
  derived and/or modified sequence
aggcatgcatgagagatattccaacgtgcaagtggctggaccagtggacagaactagctcaaagttctgtggatcttttaattgcagatttgcattccaatataatccatccctgcaaccaagagctcttgttgtctttgggtgtattagcaaacgagtgtctcatgggcagataaagcagataatccgtattcttagcaaggcacttgagagttgcttaaaaggacctgacacttacaacagtcaagttctgatagaagctacagtaatagcactaaccaaattacagccacttcttaataaggactcgcctctgcacaaagccctcttttgggtagctgtggctgtgctgcagcttgatgaggtcaacttgtattcagcaggtaccgcacttcttgaacaaaacctgcatactttagatagtctccgtatattcaatgacaagagtccagaggaagtatttatggcaatccggaatcctctggagtggcactgcaagcaaatggatcattttgttggactcaatttcaactctaactttaactttgcattggttggacaccttttaaaagggtacaggcatccttcacctgctattgttgcaagaacagtcagaattttacatacactactaactctggttaacaaacacagaaattgtgacaaatttgaagtgaatacacagagcgtggcctacttagcagctttacttacagtgtctgaagaagttcgaagtcgctgcagcctaaaacatagaaagtcacttcttcttactgatatttcaatggaaaatgttcctatggatacatatcccattcatcatggtgacccttcctataggacactaaaggagactcagccatggtcctctcccaaaggttctgaaggataccttgcagccacctatccaactgtcggccagaccagtccccgagccaggaaatccatgagcctggacatggggcaaccttctcaggccaacactaagaagttgcttggaacaaggaaaagttttgatcacttgatatcagacacaaaggctcctaaaaggcaagaaatggaatcagggatcacaacaccccccaaaatgaggagagtagcagaaactgattatgaaatggaaactcagaggatttcctcatcacaacagcacccacatttacgtaaagtttcagtgtctgaatcaaatgttctcttggatgaagaagtacttactgatccgaagatccaggcgctgcttcttactgttctagctacactggtaaaatataccacagatgagtttgatcaacgaattctttatgaatacttagcagaggccagtgttgtgtttcccaaagtctttcctgttgtgcataatttgttggactctaagatcaacaccctgttatcattgtgccaagatccaaatttgttaaatccaatccatggaattgtgcagagtgtggtgtaccatgaagaatccccaccacaataccaaacatcttacctgcaaagttttggttttaatggcttgtggcggtttgcaggaccgttttcaaagcaaacacaaattccagactatgctgagcttattgttaagtttcttgatgccttgattgacacgtacctgcctggaattgatgaagaaaccagtgaagaatccctcctgactcccacatctccttaccctcctgcactgcagagccagcttagtatcactgccaaccttaacctttctaattccatgacctcacttgcaacttcccagcattccccaggaatcgacaaggagaacgttgaactctcccctaccactggccactgtaacagtggacgaactcgccacggatccgcaagccaagtgcagaagcaaagaagcgctggcagtttcaaactagcacttcttaacctgctcactgcccatcagaacagcctctgacaaagctgcatccaaattctttaaagggcaattcattgccccaagtaatctgccaaacctgtcttcatttggaaatcagtcttcatattcagcactgctcagcacgc

SEQ ID NO: 294529 - DNA, 1917 bp, Artificial Sequence
  derived and/or modified sequence
atgcacgagcgatacagcaatgtgcaagtcgccggaccagtggaccgcacgtccagcaagttctgcgggtcattcaactgtcggtttgccttccagtataaccctagtctgcagccacgagctctggtggtcttcgggtgtatcagcaagcgggtctcccatggacaaatcaagcaaataatccgtatactcagcaaagccctcgaaagctgcctgaaagggcctgacacttataattcccaggtgctgatagaagcaacagtcatcgccctgacaaaactccaaccactcctgaacaaggacagtcctctccacaaagcattattttgggtggcagtcgccgtattgcagctggacgaagttaatttatactcggcgggtaccgccctgcttgaacagaacctacacaccctcgatagcctgcgtatttttaacgataagtcccctgaggaggtttttatggcaatccgcaatcctctggagtggcattgcaagcaaatggatcattttgtgggactgaattttaatagcaacttcaacttcgcactcgtaggacacctcctcaagggctatcgacatccttcccctgccattgttgcacgaacggtgcggattctccatactcttcttactctggtgaacaagcacagaaactgcgacaagttcgaggtgaacacgcagtctgtggcttatttagccgctcttttgacggtgagcgaggaggtccggagtaggtgcagcctgaaacataggaagtccctactgctgactgacataagcatggagaacgtgcccatggatacttaccccattcaccatggcgaccccagttatcgaaccctgaaagagactcagccttggtcatcccccaagggctccgagggctatctggcagccacataccctacagtcggccagactagtcctcgcgcacggaagagtatgtctctggacatgggccaaccttcacaggcgaatactaagaagcttctgggcactaggaagtctttcgaccacctgatatctgacaccaaggcaccaaagcgccaggagatggagtctgggattacgacacctccgaagatgagacgcgttgcagagaccgattacgagatggagacacaaaggatttcatccagccagcagcatccccacttgagaaaagtgagtgtttcggagtctaatgtgctgcttgatgaagaagtacttactgatccaaagattcaggccctgctgctgactgttcttgcgacactggtgaagtacaccacggatgagttcgaccagcgcatcctctacgagtatctagccgaagcttccgtcgtgtttccaaaagtgtttcctgtcgtacataaccttcttgatagtaagatcaacacactgctgtcactatgccaagatccgaatctgttaaacccaatccatgggattgtgcagtccgtggtgtaccatgaggaaagcccaccacaataccagacttcatacctgcaatcctttggtttcaacgggctttggcgatttgccggtccatttagcaaacagactcagattccagattatgccgagctgatcgtgaagttcttggatgctttaatcgacacatacctcccaggtatcgacgaagaaactagcgaagagtctctgctcactcctacaagcccataccctcctgccctccaaagtcagctctcaattaccgccaaccttaatcttagcaactcgatgacaagcctagctacctcacaacacagtcctgggattgataaggagaacgtggaattatcaccgacaaccggacattgtaatagcggcaggacccgccacggcagcgcttcacaggtgcaaaagcagcggagtgccggaagcttcaaactagcccttctgaatctgctgactgcgcatcagaactcattgtag

SEQ ID NO: 294530 - protein, 137 aa, Artificial Sequence
  derived and/or modified sequence
MKQRDKGRGWHPAEGGPALTAQPPETRPALDRSRRESRSQGCRGVSVSLTMNLEPPKAEFRSATRVAGGPVTPRKGPPKFKQRQTRQFKSKPPKKGVQGFGDDIPGMEGLGTDITVICPWEAFNHLELHELAQYGII

SEQ ID NO: 294531 - protein, 87 aa, Artificial Sequence
  derived and/or modified sequence
MNLEPPKAEFRSATRVAGGPVTPRKGPPKFKQRQTRQFKSKPPKKGVQGFGDDIPGMEGLGTDITVICPWEAFNHLELHELAQYGII

SEQ ID NO: 294532 - DNA, 414 bp, Artificial Sequence
  derived and/or modified sequence
atgaaacagcgtgacaagggtcgcggctggcaccccgcagagggaggccctgctctaacggcccaaccgcctgaaaccagaccggcgctggaccgctctagacgggaatcaagaagtcaagggtgtagaggcgtgtccgtgagccttacaatgaacttagagccccccaaggcagagttccgcagcgccacgcgggtagcgggaggcccagtaacgcccagaaagggtcctcctaagtttaaacaacgacagacacgccagtttaagtctaagcccccaaagaagggtgtccaggggttcggagacgacatcccgggaatggaggggcttggtactgacattaccgtcatttgcccctgggaagcttttaatcacttggaactgcacgagttggctcagtatgggatcatttag

SEQ ID NO: 294533 - DNA, 414 bp, Artificial Sequence
  derived and/or modified sequence
atgaagcagagggacaagggccggggctggcaccctgctgagggcggccctgccctgacagcccagcccccagagaccaggcctgccctggacaggagccggcgggagagccgcagccagggctgccggggcgtgtctgtgtccctgaccatgaacctggagccccccaaggccgagttccgcagcgccaccagggtggccggcggccctgtgacccccaggaaaggaccacccaagttcaagcagaggcagacccggcagttcaagagcaagccacccaagaagggcgtgcagggctttggagatgacatccctggcatggagggcctgggcacagacatcaccgtcatctgcccctgggaggccttcaaccacctggagctgcacgagctggcccagtatggcatcatctag

SEQ ID NO: 294534 - DNA, 414 bp, Artificial Sequence
  derived and/or modified sequence
atgaagcagcgggacaagggccggggctggcaccccgccgagggcggccctgccctgactgcacagccccctgagacacgccccgccctggacaggagccggcgggaatccaggagtcagggctgtagaggcgtgtctgtcagcctcactatgaatctggagccccccaaagcagaatttcgatccgccacccgtgtagcgggcggaccagtgactcctaggaaggggcctccaaaattcaaacaaaggcaaactcgccagtttaagtctaagccaccgaaaaaaggggtgcaggggtttggcgacgacattcctggcatggagggtctcggcacagatatcactgttatttgtccatgggaggcttttaaccacctggaattgcacgaattggcacaatacggaatcatctag

SEQ ID NO: 294535 - DNA, 1505 bp, Artificial Sequence
  derived and/or modified sequence
ggcttgcccttgaaggaactcaacattgtccttgcttctgtgcttgggaagacccacaggcccctaagggcgggggggggtccttgtttggtttcaggagcagcaggtgcaaaggccctggggtgggaggggtgagatgtgaggccacagcagcgggtgagggccaggctgcagagggttttggggaccatgaaggtgggcccttcagagatcaggcagggtcaggaaaggcagtagggaggcccaagacagcagacactgtggttgcttccatctggaagatgggcagctgcaggagcctggctgttcagggtcacacttctctccctgtcccggccccatctgctgggtgtccttccttggagcccttgacagcacctgagcccctcctctccatcccctgaaccttggtggttgtgccccccctcggggcccaacaatctcattagggtggcactgagacgcctaatcagctcatgaagcagcgagataaaggccggggctggcaccctgcggagggaggcccagcactcacagcacagccccctgagacccgccctgcacttgaccgcagcaggagggagtccaggagccaaggttgccgcggtgtctccgtcagcctcaccatgaacctggaaccgcccaaggctgagttccggtcagccaccagggtggccgggggacctgtcacccccaggaaagggccccctaaatttaagcagcgacagaccaggcagttcaagagcaagcccccaaagaaaggcgttcaagggtttggggacgacatccctggaatggaaggcctgggaacagacatcacagtcatctgcccttgggaggccttcaaccacctggagctgcacgagctggcccaatatggcatcatctagcacgaggccctgctgaagtccagaccctccccctcctgcccactgtgctctaaaccctgctcaggattcctgttgaggagatgcctccctagcccagatggcacctggacaccaggatgggactgcaacctcaggtctccccctacatattaataccagtcaccaggagcccaccacctccctctaggatgccccctcaggggctggccaggccctgctcaacatctggagatacaggcccacccctcagtcctgcccacagagaggcttggtcggtctccactcccagggagaacgggaagtggaccccagcccgggagcctgctggaccccagatcgtcccctcctcccagctggaaagctagggcaggtctccccagagtgcttctgcaccccagccccctgtcctgcctgtaaggggatacagagaagctccccgtctctgcatcccttcccaggggggtgcccttagtttggacatgctgggtagcaggactccagggcgtgcacggtgagcagatgaggccccaagctcatcacaccagggggccatccttctcaatacagcctgcccttgcagtccctatttcaaaataaaattagtgtgtccttgcc

SEQ ID NO: 294536 - DNA, 1023 bp, Artificial Sequence
  derived and/or modified sequence
cagcgagataaaggccggggctggcaccctgcggagggaggcccagcactcacagcacagccccctgagacccgccctgcacttgaccgcagcaggagggagtccaggagccaaggttgccgcggtgtctccgtcagcctcaccatgaacctggaaccgcccaaggctgagttccggtcagccaccagggtggccgggggacctgtcacccccaggaaagggccccctaaatttaagcagcgacagaccaggcagttcaagagcaagcccccaaagaaaggcgttcaagggtttggggacgacatccctggaatggaaggcctgggaacagacatcacagtcatctgcccttgggaggccttcaaccacctggagctgcacgagctggcccaatatggcatcatctagcacgaggccctgctgaagtccagaccctccccctcctgcccactgtgctctaaaccctgctcaggattcctgttgaggagatgcctccctagcccagatggcacctggacaccaggatgggactgcaacctcaggtctccccctacatattaataccagtcaccaggagcccaccacctccctctaggatgccccctcaggggctggccaggccctgctcaacatctggagatacaggcccacccctcagtcctgcccacagagaggcttggtcggtctccactcccagggagaacgggaagtggaccccagcccgggagcctgctggaccccagatcgtcccctcctcccagctggaaagctagggcaggtctccccagagtgcttctgcaccccagccccctgtcctgcctgtaaggggatacagagaagctccccgtctctgcatcccttcccaggggggtgcccttagtttggacatgctgggtagcaggactccagggcgtgcacggtgagcagatgaggccccaagctcatcacaccagggggccatccttctcaatacagcctgcccttgcagtccctatttcaaaataaaattagtgtgtccttgcc

SEQ ID NO: 294537 - DNA, 414 bp, Artificial Sequence
  derived and/or modified sequence
atgaagcaacgggacaaaggtcgaggctggcaccccgctgagggtggacctgctctgaccgctcaacctcccgaaactaggcctgccctggaccggtcccgacgcgagagccgatcccagggctgccggggagtcagcgttagcttaacaatgaatctcgagcctccaaaagctgagtttcgctctgcaacccgagtcgcaggcggacccgtcacaccgagaaagggtcccccaaagttcaagcagcgacaaacacggcaattcaagagcaagcccccaaaaaaaggagtgcagggctttggggatgatataccaggaatggagggtctgggaacggatatcacagtcatttgtccttgggaagcgtttaatcacttagagttacacgagctggcacaatacggaatcatatag

SEQ ID NO: 294538 - DNA, 414 bp, Artificial Sequence
  derived and/or modified sequence
atgaagcagagagacaagggcagaggctggcaccccgccgagggcggccccgccctgaccgcccagccccccgagaccagacccgccctggacagaagcagaagagagagcagaagccagggctgcagaggcgtgagcgtgagcctgaccatgaacctggagccccccaaggccgagttcagaagcgccaccagagtggccggcggccccgtgacccccagaaagggcccccccaagttcaagcagagacagaccagacagttcaagagcaagccccccaagaagggcgtgcagggcttcggcgacgacatccccggcatggagggcctgggcaccgacatcaccgtgatctgcccctgggaggccttcaaccacctggagctgcacgagctggcccagtacggcatcatctag

SEQ ID NO: 294539 - protein, 356 aa, Artificial Sequence
  derived and/or modified sequence
MKVGYERDFLRYLQSLLAEVERRIRRGHARLALSQNQQSSGAAGPTGKNEEKIQVLTDKIDVLLQQIEELGSEGKVEEAQGMMKLVEQLKEERELLRSTTSTIESFAAQEKQMEVCEVCGAFLIVGDAQSRVDDHLMGKQHMGYAKIKATVEELKEKLRKRTEEPDRDERLKKEKQEREEREKEREREREERERKRRREEEEREKERARDRERRKRSRSRSRHSSRTSDRRCSRSRDHKRSRSRERRRSRSRDRRRSRSHDRSERKHRSRSRDRRRSKSRDRKSYKHRSKSRDREQDRKSKEKEKRGSDDKKSSVKSGSREKQSEDTNTESKESDTKNEVNGTSEDIKSEGLFVTV

SEQ ID NO: 294540 - DNA, 1380 bp, Artificial Sequence
  derived and/or modified sequence
atgatcaagagattcctggaggacaccaccgacgacggcgagctgagcaagttcgtgaaggacttcagcggcaacgccagctgccacccccccgaggccaagacctgggccagcagaccccaggtgcccgagcccagaccccaggcccccgacctgtacgacgacgacctggagttcagaccccccagcagaccccagagcagcgacaaccagcagtacttctgcgcccccgcccccctgagccccagcgccagacccagaagcccctggggcaagctggacccctacgacagcagcgaggacgacaaggagtacgtgggcttcgccaccctgcccaaccaggtgcacagaaagagcgtgaagaagggcttcgacttcaccctgatggtggccggcgagagcggcctgggcaagagcaccctggtgaacagcctgttcctgaccgacctgtacagagacagaaagctgctgggcgccgaggagagaatcatgcagaccgtggagatcaccaagcacgccgtggacatcgaggagaagggcgtgagactgagactgaccatcgtggacacccccggcttcggcgacgccgtgaacaacaccgagtgctggaagcccgtggccgagtacatcgaccagcagttcgagcagtacttcagagacgagagcggcctgaacagaaagaacatccaggacaacagagtgcactgctgcctgtacttcatcagccccttcggccacggcctgagacccctggacgtggagttcatgaaggccctgcaccagagagtgaacatcgtgcccatcctggccaaggccgacaccctgaccccccccgaggtggaccacaagaagagaaagatcagagaggagatcgagcacttcggcatcaagatctaccagttccccgactgcgacagcgacgaggacgaggacttcaagctgcaggaccaggccctgaaggagagcatccccttcgccgtgatcggcagcaacaccgtggtggaggccagaggcagaagagtgagaggcagactgtacccctggggcatcgtggaggtggagaaccccggccactgcgacttcgtgaagctgagaaccatgctggtgagaacccacatgcaggacctgaaggacgtgaccagagagacccactacgagaactacagagcccagtgcatccagagcatgaccagactggtggtgaaggagagaaacagaaacaagctgaccagagagagcggcaccgacttccccatccccgccgtgccccccggcaccgaccccgagaccgagaagctgatcagagagaaggacgaggagctgagaagaatgcaggagatgctgcacaagatccagaagcagatgaaggagaactactag

SEQ ID NO: 294541 - DNA, 1380 bp, Artificial Sequence
  derived and/or modified sequence
atgattaaaaggtttctcgaggacacaactgacgatggcgagctgtcaaagttcgtaaaagatttctccggcaatgcctcgtgtcaccccccagaagcaaagacctgggcaagtaggccccaagtgcctgaaccaaggccccaagcccccgacctctacgacgacgatttggaatttcgccctccctctcgcccccagtctagtgataaccaacagtacttctgtgccccagctccactgtctccttccgcaagaccgcgctccccgtggggcaagctggacccgtatgacagctccgaagacgataaagaatatgtaggtttcgccaccttgccaaatcaggtacatcggaagtcagtaaagaagggtttcgattttaccctgatggtcgccggcgagagtggcctcggcaagtccaccctagtgaattctctattcctaactgacctatacagggacagaaagctcctcggtgctgaagaacgcatcatgcagacagtggagattaccaagcacgccgtggatattgaggaaaaaggggtaaggctcagattaaccattgtggacacccccggtttcggagacgctgtcaataacactgagtgttggaagcccgtcgcagaatacatcgaccagcagtttgagcagtattttcgtgacgaaagtggacttaatagaaagaatattcaggacaatcgtgtccactgttgtctttacttcatttctccgtttggccatgggttacgcccactggatgtcgaattcatgaaagctctccatcaacgggtgaacatcgtgcctatcctcgcaaaggcggacacgctgacccctcccgaagtcgaccacaagaaacggaagatccgggaggaaatcgaacacttcggcattaagatctaccagtttccagactgtgactccgacgaggatgaagactttaagttgcaagaccaggccttgaaggagtcgatcccatttgcagtgatcggctcgaatactgtcgttgaggcccggggacgccgggtccgtggccgattgtacccctggggtattgtagaggttgaaaatccaggacattgcgatttcgtcaaactgaggaccatgcttgtacggacacacatgcaagatctgaaagatgtgaccagagagacacactatgaaaattacagggcacaatgcatccagtctatgactcgactggttgtgaaggaacgaaatagaaacaagctcacgcgtgaatccgggactgattttccaatccctgccgtcccgcctggcactgaccccgagactgagaagctgattcgcgagaaggatgaagaactgcggcggatgcaggagatgctgcataagatacagaagcaaatgaaagaaaattactag

SEQ ID NO: 294542 - DNA, 1380 bp, Artificial Sequence
  derived and/or modified sequence
atgattaaacgctttctggaggatactactgacgacggagagttatcaaagttcgtgaaagatttttcagggaatgcatcatgccaccctcctgaggccaagacgtgggcaagcagacctcaggttcccgaaccgcgtccccaggcacccgatctctacgatgatgacctggagttccgtcctccctcaaggccacagtcatctgacaaccagcagtacttctgcgcccctgctccattgtctccttctgcacggccgcgtagtccctgggggaagctggacccctacgactccagcgaggacgacaaggaatatgtgggcttcgctactctgcctaatcaggtgcaccgaaagtcagtaaagaagggatttgattttactctgatggtagccggtgagtctggattgggcaaaagtactcttgtgaactctctgtttctgacagatttgtaccgggatcgcaagttactcggcgccgaagaacgaatcatgcagaccgttgagatcactaagcatgcagttgatatagaggaaaagggagttaggctgagattgacaattgtggacactccagggttcggggatgccgtgaataacacagagtgctggaaacctgttgccgaatacatcgaccagcagtttgagcagtatttcagagatgagtcaggattaaaccgcaagaatattcaagacaacagggtccattgctgcctttacttcattagccccttcgggcacggccttaggcctctggacgttgagtttatgaaggccctgcaccagcgggtgaatattgtacccatcctcgctaaggcagacactttgacccctccagaggtggaccacaaaaagcgtaagattagggaagaaatcgagcactttggtataaagatctatcaatttccagactgtgattctgatgaggacgaggattttaagctgcaggatcaggctttgaaagaaagcatcccatttgccgtcattgggagcaacaccgtcgtcgaggctagaggccggcgtgtgaggggacgtctgtatccttgggggattgtcgaggttgagaatccgggtcactgcgattttgttaaactccgaacaatgctggttaggactcacatgcaggacctgaaggatgtaacgagggaaacacattacgagaactacagggcccagtgcattcagtcaatgacacgtctggtcgtgaaggaaagaaatagaaacaagctcacccgggaaagtggtacggatttcccaatcccagcggtgccaccaggaaccgatcctgagacagagaagctcatccgagaaaaagacgaagaactgcgccgaatgcaggaaatgttgcacaaaatccaaaagcagatgaaggagaattactag

SEQ ID NO: 294543 - DNA, 1380 bp, Artificial Sequence
  derived and/or modified sequence
atgatcaagcgcttcctggaggacaccacagatgatggagagctgagcaagtttgtgaaggacttctctggaaatgccagctgccaccccccagaggccaagacctgggccagccggccccaggtgcctgagccccggccccaggccccagacctgtatgatgatgacctggagttccggccccccagccggccccagagcagtgacaaccagcagtacttctgtgccccagcccccctgagccccagcgcccggcccaggagcccctggggcaagctggacccctatgacagcagtgaagatgacaaggagtatgtgggctttgccaccctgcccaaccaggtgcacaggaagtctgtgaagaagggctttgacttcaccctgatggtggccggggagagcggcctgggcaagagcaccctggtgaacagcctcttcctgacagacctgtacagagacaggaagctgctgggcgctgaggagcgcatcatgcagacagtggagatcaccaagcatgctgtggacatcgaggagaagggcgtgcggctgcggctgaccatcgtggacaccccaggctttggagatgctgtgaacaacacagagtgctggaagcctgtggccgagtacatcgaccagcagtttgagcagtacttcagagatgagagcggcctgaacaggaagaacatccaggacaacagagtgcactgctgcctgtacttcatcagccccttcggccacggcctgcggcccctggatgtggagttcatgaaggccctgcaccagagggtgaacatcgtgcccatcctggccaaggctgacaccctgaccccacctgaggtggaccacaagaagaggaagatccgggaggagattgagcacttcggcatcaagatctaccagttcccagactgtgacagtgatgaagatgaggacttcaagctgcaggaccaggccctgaaggagagcatcccctttgctgtgattggcagcaacacagtggtggaggcccggggcagaagagtgcggggccgcctgtacccctggggcatcgtggaggtggagaaccctggccactgtgactttgtgaagctgcggaccatgctggtgaggacccacatgcaggacctgaaggatgtgacccgggagacccactatgagaactaccgggcccagtgcatccagagcatgacccggctggtggtgaaggagaggaacagaaacaagctgacccgggagagcggcacagacttccccatcccagctgtgcccccaggcacagatcctgagacagagaagctgatccgggagaaggatgaggagctgcggaggatgcaggagatgctgcacaagatccagaagcagatgaaggagaactactag

SEQ ID NO: 294544 - DNA, 1380 bp, Artificial Sequence
  derived and/or modified sequence
atgatcaagcggttcctggaggacaccaccgacgacggcgagctgtccaaatttgttaaggattttagcggcaatgcgtcctgtcaccccccagaagccaagacttgggcctcccgaccacaagtacctgaaccccgtccccaggcgccagacctgtatgatgacgatttggaattccggcccccatctcggccacaaagctctgacaatcagcagtatttttgcgccccagccccactctcacccagcgcgagacccagatctccgtgggggaagctagacccatatgacagctcggaggacgataaggaatacgtagggtttgcgacattgccaaatcaggtacaccgcaaatccgtaaagaagggttttgacttcacattgatggtcgccggcgagagcggtctggggaaatcgaccctggtcaattccctttttctgacggacctatacagagacagaaagttgctcggggccgaggaacggattatgcagacagttgagatcacaaagcacgccgtggacatcgaggaaaaaggcgtgcgtctgcggctgaccatcgtggatacccctggctttggtgacgccgtgaacaacaccgagtgctggaaaccagtcgctgaatacatagaccagcagttcgagcaatattttagagacgaaagcggactgaatcgaaaaaacattcaggacaaccgggtacactgctgcctgtatttcattagcccgtttggacacggcttgaggccactggacgttgagtttatgaaagcgctacaccaacgcgtaaacatcgtcccaatcttggcaaaggccgatacgttgacacctcctgaggttgatcataagaagagaaaaatcagagaggagatcgaacatttcgggatcaagatctaccaatttcctgattgcgattccgatgaagatgaagacttcaagctccaggatcaagcattaaaggaaagcattccatttgcagtcatcggctccaacacggtggtcgaggccagaggaagacgcgtgcgcggccgtctgtatccctggggcattgttgaagttgaaaacccaggacactgcgattttgtgaaactgcgtacaatgctcgtaaggacacacatgcaggatttgaaagacgtgaccagggaaacacattacgagaactaccgagcccagtgcatccaatccatgacccgattagttgtgaaagagcgcaatagaaacaagttaacccgtgagtccggcaccgacttccccatacccgcggttcccccgggcacggacccagagaccgaaaagctcatccgggagaaagacgaagaactgagacggatgcaggagatgctgcacaaaattcagaaacagatgaaggagaattattag

SEQ ID NO: 294545 - DNA, 1380 bp, Artificial Sequence
  derived and/or modified sequence
atgatcaagcggttcctggaggacaccaccgacgacggcgagctgagcaagttcgtaaaggatttctccgggaacgcatcatgtcaccccccggaagcaaaaacttgggcctcccgcccacaggtacccgaacctaggcctcaggctccagatctgtacgacgacgacctggagttcagacctcccagccgcccccagtctagcgacaaccagcagtatttttgcgcgcccgccccactctctcccagcgctcgacccagaagtccttggggcaaattggacccttatgactcttcagaagatgacaaggaatacgtaggtttcgctactttacctaatcaagtgcatagaaaaagtgtcaagaaaggattcgacttcacgctcatggtggctggcgagagtgggctggggaagagcactctggtgaatagtctgttcctcactgatttgtatcgcgacagaaaactcctgggagcagaggagaggattatgcagactgtcgaaataaccaagcatgccgtggacatcgaagagaagggggtcagactgcgactaacaatagttgacacacccggtttcggagacgcggtaaataatacagaatgctggaagcccgtggcagaatacattgaccagcagttcgaacagtatttccgcgatgagtcaggcctgaaccgcaagaacatccaggacaatcgcgtgcactgttgcctgtatttcatctctccatttggtcacggcctccggcccctggacgtagagttcatgaaagccctgcatcaacgcgtgaacattgtcccaatattggcgaaggctgatactctgacaccacctgaggtggaccacaagaaaagaaaaatcagggaagaaatcgaacactttggcattaaaatttaccagttcccggattgtgactccgatgaagacgaagatttcaaactccaagaccaagcacttaaagaaagtattccctttgccgtgatcggcagcaataccgtcgtagaagcacggggacgacgagttaggggtagactttacccttggggcatcgtggaggtggagaacccaggtcactgcgatttcgtcaaactgagaactatgcttgttcgcacgcacatgcaggatctcaaagacgtcacaagggagacacactacgaaaactatcgagcccagtgtattcagtccatgactcggcttgtggtgaaagagaggaacagaaataagctgacacgcgagtctggcaccgactttcctatcccagccgtgcctcccggcactgacccggagaccgagaaactgatcagggagaaggacgaggaactgaggagaatgcaagaaatgcttcataaaatccagaaacagatgaaggaaaattactag

SEQ ID NO: 294546 - DNA, 1380 bp, Artificial Sequence
  derived and/or modified sequence
atgatcaaaaggtttcttgaggataccaccgacgatggcgaactgtcaaaatttgtcaaggactttagcggaaatgctagctgtcatcctcctgaggctaagacgtgggccagccggcctcaggtgccggagccacggccacaagcccctgatctgtacgatgacgacttggagttcagaccaccatcgagacctcaatcctccgataatcaacagtacttctgtgccccagccccactctccccttctgcacgaccacgttcaccctgggggaagttggatccatacgactcgagtgaggatgacaaggagtacgttggctttgcaacactccccaaccaagtccacagaaagtccgtcaagaaggggttcgatttcaccctcatggtggcgggagagtcaggcttgggcaagtctacactcgtaaacagcctatttctgaccgatctgtacagggatagaaagctgttgggtgccgaagaacgcatcatgcagaccgtcgagatcaccaaacatgccgttgatatcgaagaaaaaggagtacgcctaagacttaccatcgtggataccccaggctttggagacgccgtcaataataccgagtgctggaaaccagtagctgagtacatcgatcagcagtttgaacaatacttccgtgacgagagtggacttaacagaaagaatatccaggataatcgagtgcactgttgcctttatttcatttctccatttggccatggattgagaccgctggatgtggaatttatgaaagcgctccatcaaagggtgaacatcgtgccgattttagctaaggcagacacgctgactcctcccgaggtggatcacaagaaacgtaagattcgggaggagatcgaacatttcggaatcaaaatctaccagtttcctgactgtgattctgacgaggacgaggattttaaactccaagaccaggcactgaaggagtccatcccattcgctgttatcgggtccaatacggttgtggaggcgaggggcaggcgcgttcggggacggctctacccttggggaatcgtcgaggtggagaacccaggacattgcgactttgtgaaattacggactatgctggtgagaacccacatgcaagatctgaaggatgtgacccgggagacacactacgaaaactatcgcgctcagtgtattcagtctatgacccgcctggtggtgaaagagcgcaatcggaataaactcacacgggagtcagggactgacttcccaattccagccgtgccccctggcacagatccagagactgaaaagttaattcgggagaaggatgaggaactgcggcgaatgcaggaaatgctgcacaagatccagaaacagatgaaggaaaactactag

SEQ ID NO: 294547 - DNA, 1380 bp, Artificial Sequence
  derived and/or modified sequence
atgatcaagagattccttgaggatactacagatgacggggagctgtctaagtttgtgaaagatttcagcggaaacgcctcttgtcatccaccagaagcaaagacgtgggcctcacggcctcaggtgcctgagccaaggcctcaggccccagacctgtatgacgacgaccttgagttcaggcctccttctagacctcaatccagtgataaccagcagtacttttgcgctccagcccctcttagtccaagcgccagaccacgaagcccctgggggaagttagatccctatgatagttccgaggacgacaaggagtacgtgggcttcgccactctcccaaaccaagtgcatcgaaagtcagtcaagaagggtttcgactttacactcatggtggcgggtgagtccggactgggaaagagcacactcgtgaatagcttattcctgaccgacctgtatcgggatcgcaagctgctcggagccgaagagagaataatgcagactgtggagatcaccaagcacgcagtagacattgaagaaaagggagtcagactacgcttgacaatcgtcgatactcccggatttggcgacgcagtgaataacaccgagtgctggaagcccgtggccgaatatatcgaccagcagtttgagcagtatttccgggacgagagtggactgaaccggaagaatatccaggacaatagagtacactgttgcctctacttcatctcccccttcggacacggcctcaggccactggatgtagagtttatgaaagccttacaccagcgggtcaacatcgtgccaatcctggccaaggcagatacactcaccccacctgaagtggatcataaaaaaagaaagatccgcgaagaaattgagcacttcgggattaagatttaccagttccccgattgcgactccgatgaggacgaggattttaaactgcaggatcaggctctgaaagagtccataccttttgctgtgataggtagcaacaccgtagtggaggcccgagggagacgcgtgagaggcaggctgtacccttggggcattgtcgaggttgagaacccgggacactgcgactttgtgaagttaaggactatgctggtgcggacccatatgcaggacctgaaagatgtgacccgggaaacccattacgaaaactatagagcccaatgcattcaaagtatgacaagactggttgtgaaagagcggaataggaacaaattgacacgggaaagcggcactgattttcctatcccagccgtgcccccagggacagatcctgagaccgagaaactcatccgggaaaaggacgaagaattacgccgtatgcaggaaatgctccataagatccagaagcagatgaaagaaaattattag

SEQ ID NO: 294548 - DNA, 1638 bp, Artificial Sequence
  derived and/or modified sequence
cggcggtgctgcgaggtcggcgcgcagctccgccgcgggtcgctcgggcgctgtccaggcggagccggccccgcccgggctgcagccatgatcaagcgtttcctggaggacaccacggatgatggagaactgagcaagttcgtgaaggatttctcaggaaatgcgagctgccacccaccagaggctaagacctgggcatccaggccccaagtcccggagccaaggccccaggccccggacctctatgatgatgacctggagttcagacccccctcgcggccccagtcctctgacaaccagcagtacttctgtgccccagcccctctcagcccatctgccaggccccgcagcccatggggcaagcttgatccctatgattcctctgaggatgacaaggagtatgtgggctttgcaaccctccccaaccaagtccaccgaaagtccgtgaagaaaggctttgactttaccctcatggtggcaggagagtctggcctgggcaaatccacacttgtcaatagcctcttcctcactgatctgtaccgggaccggaaacttcttggtgctgaagagaggatcatgcaaactgtggagatcactaagcatgcagtggacatagaagagaagggtgtgaggctgcggctcaccattgtggacacaccaggttttggggatgcagtcaacaacacagagtgctggaagcctgtggcagaatacattgatcagcagtttgagcagtatttccgagacgagagtggcctgaaccgaaagaacatccaagacaacagggtgcactgctgcctgtacttcatctcacccttcggccatgggctccggccattggatgttgaattcatgaaggccctgcatcagcgggtcaacatcgtgcctatcctggctaaggcagacacactgacacctcccgaagtggaccacaagaaacgcaaaatccgggaggagattgagcattttggaatcaagatctatcaattcccagactgtgactctgatgaggatgaggacttcaaattgcaggaccaagccctaaaggaaagcatcccatttgcagtaattggcagcaacactgtagtagaggccagagggcggcgagttcggggtcgactctacccctggggcatcgtggaagtggaaaacccagggcactgcgactttgtgaagctgaggacaatgctggtacgtacccacatgcaggacctgaaggatgtgacacgggagacacattatgagaactaccgggcacagtgcatccagagcatgacccgcctggtggtgaaggaacggaatcgcaacaaactgactcgggaaagtggtaccgacttccccatccctgctgtcccaccagggacagatccagaaactgagaagcttatccgagagaaagatgaggagctgcggcggatgcaggagatgctacacaaaatacaaaaacagatgaaggagaactattaactggctttcagccctggatatttaaatctcctcctcttcttcctgtccatgccggcccctcccagcaccagctctgctcaggccccttcagctactgccacttcgccttacatccctgctgactgcccagagactcagaggaaataaagtttaataaatctgtaggtggct

SEQ ID NO: 294549 - DNA, 1551 bp, Artificial Sequence
  derived and/or modified sequence
atgatcaagcgtttcctggaggacaccacggatgatggagaactgagcaagttcgtgaaggatttctcaggaaatgcgagctgccacccaccagaggctaagacctgggcatccaggccccaagtcccggagccaaggccccaggccccggacctctatgatgatgacctggagttcagacccccctcgcggccccagtcctctgacaaccagcagtacttctgtgccccagcccctctcagcccatctgccaggccccgcagcccatggggcaagcttgatccctatgattcctctgaggatgacaaggagtatgtgggctttgcaaccctccccaaccaagtccaccgaaagtccgtgaagaaaggctttgactttaccctcatggtggcaggagagtctggcctgggcaaatccacacttgtcaatagcctcttcctcactgatctgtaccgggaccggaaacttcttggtgctgaagagaggatcatgcaaactgtggagatcactaagcatgcagtggacatagaagagaagggtgtgaggctgcggctcaccattgtggacacaccaggttttggggatgcagtcaacaacacagagtgctggaagcctgtggcagaatacattgatcagcagtttgagcagtatttccgagacgagagtggcctgaaccgaaagaacatccaagacaacagggtgcactgctgcctgtacttcatctcacccttcggccatgggctccggccattggatgttgaattcatgaaggccctgcatcagcgggtcaacatcgtgcctatcctggctaaggcagacacactgacacctcccgaagtggaccacaagaaacgcaaaatccgggaggagattgagcattttggaatcaagatctatcaattcccagactgtgactctgatgaggatgaggacttcaaattgcaggaccaagccctaaaggaaagcatcccatttgcagtaattggcagcaacactgtagtagaggccagagggcggcgagttcggggtcgactctacccctggggcatcgtggaagtggaaaacccagggcactgcgactttgtgaagctgaggacaatgctggtacgtacccacatgcaggacctgaaggatgtgacacgggagacacattatgagaactaccgggcacagtgcatccagagcatgacccgcctggtggtgaaggaacggaatcgcaacaaactgactcgggaaagtggtaccgacttccccatccctgctgtcccaccagggacagatccagaaactgagaagcttatccgagagaaagatgaggagctgcggcggatgcaggagatgctacacaaaatacaaaaacagatgaaggagaactattaactggctttcagccctggatatttaaatctcctcctcttcttcctgtccatgccggcccctcccagcaccagctctgctcaggccccttcagctactgccacttcgccttacatccctgctgactgcccagagactcagaggaaataaagtttaataaatctgtaggtggct

SEQ ID NO: 294550 - DNA, 1906 bp, Artificial Sequence
  derived and/or modified sequence
cggcggtgctgcgaggtcggcgcgcagctccgccgcgggtcgctcgggcgctgtccaggcggagccggccccgcccgggctgcagccatgatcaagcgtttcctggaggacaccacggatgatggagaactgagcaagttcgtgaaggatttctcaggaaatgcgagctgccacccaccagaggctaagacctgggcatccaggccccaagtcccggagccaaggccccaggccccggacctctatgatgatgacctggagttcagacccccctcgcggccccagtcctctgacaaccagcagtacttctgtgccccagcccctctcagcccatctgccaggccccgcagcccatggggcaagcttgatccctatgattcctctgaggatgacaaggagtatgtgggctttgcaaccctccccaaccaagtccaccgaaagtccgtgaagaaaggctttgactttaccctcatggtggcaggagagtctggcctgggcaaatccacacttgtcaatagcctcttcctcactgatctgtaccgggaccggaaacttcttggtgctgaagagaggatcatgcaaactgtggagatcactaagcatgcagtggacatagaagagaagggtgtgaggctgcggctcaccattgtggacacaccaggttttggggatgcagtcaacaacacagagtgctggaagcctgtggcagaatacattgatcagcagtttgagcagtatttccgagacgagagtggcctgaaccgaaagaacatccaagacaacagggtgcactgctgcctgtacttcatctcacccttcggccatgggtatggtccaagcctgaggctcctggcaccaccgggtgctgtcaagggaacaggccaagagcaccaggggcagggctgccactagcaggtggtcacaggttcctgttccccaggctccggccattggatgttgaattcatgaaggccctgcatcagcgggtcaacatcgtgcctatcctggctaaggcagacacactgacacctcccgaagtggaccacaagaaacgcaaaatccgggaggagattgagcattttggaatcaagatctatcaattcccagactgtgactctgatgaggatgaggacttcaaattgcaggaccaagccctaaaggaaagcatcccatttgcagtaattggcagcaacactgtagtagaggccagagggcggcgagttcggggtcgactctacccctggggcatcgtggaagtggaaaacccagggcactgcgactttgtgaagctgaggacaatgctggtacgtacccacatgcaggacctgaaggatgtgacacgggagacacattatgagaactaccgggcacagtgcatccagagcatgacccgcctggtggtgaaggaacggaatcgcaagtatgaccagaagccaggacaaagctggcagggggagatcccaagcctagccttgggtgagaccaagccctacttttgttcttctataggccctgggctcaatctaagcgggtgctggggtcctcctcgccttatcaacccttttctccctttagcaaactgactcgggaaagtggtaccgacttccccatccctgctgtcccaccagggacagatccagaaactgagaagcttatccgagagaaagatgaggagctgcggcggatgcaggagatgctacacaaaatacaaaaacagatgaaggagaactattaactggctttcagccctggatatttaaatctcctcctcttcttcctgtccatgccggcccctcccagcaccagctctgctcaggccccttcagctactgccacttcgccttacatccctgctgactgcccagagactcagaggaaataaagtttaataaatctgtaggtggct

SEQ ID NO: 294551 - DNA, 1377 bp, Artificial Sequence
  derived and/or modified sequence
atgatcaagcgcttcctggaggacaccaccgacgacggcgagctgagcaagttcgtgaaggacttcagcggcaacgccagctgccacccccccgaggccaagacctgggccagccgcccccaggtgcccgagccccgcccccaggcccccgacctgtacgacgacgacctggagttccgcccccccagccgcccccagagcagcgacaaccagcagtacttctgcgcccccgcccccctgagccccagcgcccgcccccgcagcccctggggcaagctggacccctacgacagcagcgaggacgacaaggagtacgtgggcttcgccaccctgcccaaccaggtgcaccgcaagagcgtgaagaagggcttcgacttcaccctgatggtggccggcgagagcggcctgggcaagagcaccctggtgaacagcctgttcctgaccgacctgtaccgcgaccgcaagctgctgggcgccgaggagcgcatcatgcagaccgtggagatcaccaagcacgccgtggacatcgaggagaagggcgtgcgcctgcgcctgaccatcgtggacacccccggcttcggcgacgccgtgaacaacaccgagtgctggaagcccgtggccgagtacatcgaccagcagttcgagcagtacttccgcgacgagagcggcctgaaccgcaagaacatccaggacaaccgcgtgcactgctgcctgtacttcatcagccccttcggccacggcctgcgccccctggacgtggagttcatgaaggccctgcaccagcgcgtgaacatcgtgcccatcctggccaaggccgacaccctgaccccccccgaggtggaccacaagaagcgcaagatccgcgaggagatcgagcacttcggcatcaagatctaccagttccccgactgcgacagcgacgaggacgaggacttcaagctgcaggaccaggccctgaaggagagcatccccttcgccgtgatcggcagcaacaccgtggtggaggcccgcggccgccgcgtgcgcggccgcctgtacccctggggcatcgtggaggtggagaaccccggccactgcgacttcgtgaagctgcgcaccatgctggtgcgcacccacatgcaggacctgaaggacgtgacccgcgagacccactacgagaactaccgcgcccagtgcatccagagcatgacccgcctggtggtgaaggagcgcaaccgcaacaagctgacccgcgagagcggcaccgacttccccatccccgccgtgccccccggcaccgaccccgagaccgagaagctgatccgcgagaaggacgaggagctgcgccgcatgcaggagatgctgcacaagatccagaagcagatgaaggagaactac

SEQ ID NO: 294552 - protein, 21 aa, Artificial Sequence
  derived and/or modified sequence
ESGTDFPIPAVPPGTDPETEK

SEQ ID NO: 294553 - DNA, 1671 bp, Artificial Sequence
  derived and/or modified sequence
atgaaggcacagggggagacagaggagagcgagaaactatccaaaatgtcgagcctgctggaaagactgcacgccaagttcaaccagaaccggccttggtctgagaccataaagctcgtaagacaggtgatggagaaacgagtagtcatgagttccgggggacatcagcacctggtgagctgcttggaaactctgcagaaagctttgaaggtaacatcattgcctgccatgacagatcgccttgagtcgattgcacgccagaacggcctaggatcccatcttagtgcctctgggacggaatgttacatcacctccgacatgttttacgtggaggtgcagctggatcctgccggacagttgtgtgatgtaaaggtggcgcatcacggcgaaaaccctgttagttgtcccgagcttgtgcagcaactgcgggaaaagaattttgatgagttctccaaacacttgaaagggttagttaacctgtacaatcttcctggcgataacaagcttaaaacgaagatgtacttggcccttcagtccctggaacaagacctcagcaaaatggccatcatgtattggaaagccaccaacgctggcccactcgataaaatcttacacggaagtgtggggtaccttacccctagaagcggcgggcacctcatgaacctgaaatattatgtttcgccttctgatctcctagatgataaaactgcgtcacctatcatcctgcacgagaataatgtttcccggtccctaggtatgaacgcgagcgtcaccattgaggggacaagcgcagtctacaagctgcccatcgctcctctaattatgggctctcatccagtcgataataaatggaccccctctttcagcagtattacttcagccaatagcgtcgacctcccggcttgtttttttctgaagttcccacaaccgattcccgtgtctcgtgcgttcgtccagaagctgcaaaattgcactgggatcccactgtttgagacgcagcccacctacgcacctttatatgaactaatcacacagttcgagttgtccaaggatcctgaccccatacctctgaatcacaatatgaggttctacgctgctctgcccggtcagcaacattgctactttcttaataaggacgcccccctgccagacgggaggtctctgcagggaactctggtaagcaagatcacgttccagcatcctggaagagtgccattgatcctcaacttgattagacaccaggtggcctataatacactaatcgggtcatgcgttaaaaggactatcctcaaggaagacagccctggccttctgcaattcgaggtctgccccctctctgaatcccgattcagcgtgtcatttcagcaccctgtgaacgattctctcgtttgcgttgtgatggatgtccaagacagtacccatgtatcctgtaagttatacaagggattaagcgacgcgctgatctgcactgacgatttcattgcaaaggtagtccagaggtgtatgtcaatccctgtgacaatgagggcaatcagaaggaaagcggaaacgatacaggcggatactccagcgctgagtttgattgctgaaacagtggaggacatggtcaagaagaatctgccacctgccagcagtcccggaagcaaaaaccctgagttggggagcggctag

SEQ ID NO: 294554 - DNA, 1671 bp, Artificial Sequence
  derived and/or modified sequence
atgaaggcccagggcgagacagaggagagcgagaagctgagcaagatgagcagcctgctggagcggctgcacgccaagttcaaccagaaccggccctggagcgagaccatcaagctggtgcggcaggtgatggagaagagggtggtgatgagcagcggcggccaccagcacctggtgtcctgcctggagaccctgcagaaggccctgaaggtgaccagcctgcctgccatgacagaccggctggagagcatcgcccggcagaatggcctgggcagccacctgagcgccagcggcacagagtgctacatcaccagtgacatgttttatgtggaggtgcagctggaccctgctggccagctgtgtgatgtgaaggtggcccaccacggggagaaccctgtgtcctgcccagagctggtgcagcagctgcgggagaagaactttgatgagttcagcaagcacctgaagggcctggtgaacctgtacaacctgcccggggacaacaagctgaagaccaagatgtacctggccctgcagagcctggagcaggacctgagcaagatggccatcatgtactggaaggccaccaatgccggccccctggacaagatcctgcacggctctgtgggctacctgacccccaggtctgggggccacctgatgaacctgaagtactacgtgagccccagcgacctgctggatgacaagacagccagccccatcatcctgcacgagaacaacgtgagccgcagcctgggcatgaatgcctctgtgaccatcgagggcaccagcgctgtgtacaagctgcccatcgcccccctcatcatgggcagccaccctgtggacaacaagtggacccccagcttcagcagcatcaccagcgccaacagcgtggacctgcctgcctgcttcttcctgaagttcccccagcccatccctgtgtcccgggcctttgtgcagaagctgcagaactgcaccggcatccccctgtttgagacccagcccacctacgcccccctgtatgagctgatcacccagtttgagctgagcaaggaccctgaccccatccccctgaaccacaacatgaggttctatgctgccctgcccggccagcagcactgctacttcctgaacaaggatgcccccctgcctgatggccgcagcctgcagggcaccctggtgtccaagatcaccttccagcaccctggccgggtgcccctcatcctgaacctgatccgccaccaggtggcctacaacaccctgattggcagctgtgtgaagaggaccatcctgaaggaggacagccctggcctgctgcagtttgaggtgtgccccctgtctgagagccgcttctctgtgtccttccagcaccctgtgaatgacagcctggtgtgtgtggtgatggatgtgcaggacagcacccacgtgtcctgcaagctgtacaagggcctgagtgatgccctgatctgcacagatgacttcatcgccaaggtggtgcagcgctgcatgagcatccctgtgaccatgagggccatccggaggaaggccgagaccatccaggccgacaccccagccctgagcctgattgctgagaccgtggaggacatggtgaagaagaacctgcccccagccagcagccctggcagcaagaaccctgagctgggcagcggctag

SEQ ID NO: 294555 - DNA, 2870 bp, Artificial Sequence
  derived and/or modified sequence
tttgggaagttccgttggggaagatggcggcggcctcgagcacccttctcttcttgccgccggggacttcagattgatccttcccgggaagagtagggactgctggtgccctgcgtcccgggatcccgagccaacttgtttcctccgttagtggtggggaagggcttatccttttgtggcggatctagcttctcctcgccttcaggatgaaagctcagggggaaaccgaggagtcagaaaagctgagtaagatgagttctctcctggaacggctccatgcaaaatttaaccaaaatagaccctggagtgaaaccattaagcttgtgcgtcaagtcatggagaagagggttgtgatgagttctggagggcatcaacatttggtcagctgtttggagacattgcagaaggctctcaaagtaacatctttaccagcaatgactgatcgtttggagtccatagcaagacagaatggactgggctctcatctcagtgccagtggcactgaatgttacatcacgtcagatatgttctatgtggaagtgcagttagatcctgcaggacagctttgtgatgtaaaagtggctcaccatggggagaatcctgtgagctgtccggagcttgtacagcagctaagggaaaaaaattttgatgaattttctaagcaccttaagggccttgttaatctgtataaccttccaggggacaacaaactgaagactaaaatgtacttggctctccaatccttagaacaagatctttctaaaatggcaattatgtactggaaagcaactaatgctggtcccttggataagattcttcatggaagtgttggctatctcacaccaaggagtgggggtcatttaatgaacctgaagtactatgtctctccttctgacctactggatgacaagactgcatctcccatcattttgcatgagaataatgtttctcgatctttgggcatgaatgcatcagtgacaattgaaggaacatctgctgtgtacaaactcccaattgcaccattaattatggggtcacatccagttgacaataaatggaccccttccttctcctcaatcaccagtgccaacagtgttgatcttcctgcctgtttcttcttgaaatttccccagccaatcccagtatctagagcatttgttcagaaactgcagaactgcacaggaattccattgtttgaaactcaaccaacttatgcacccctgtatgaactgatcactcagtttgagctatcaaaggaccctgaccccatacctttgaatcacaacatgagattttatgctgctcttcctggtcagcagcactgctatttcctcaacaaggatgctcctcttccagatggccgaagtctacagggaacccttgttagcaaaatcacctttcagcaccctggccgagttcctcttatcctaaatctgatcagacaccaagtggcctataacaccctcattggaagctgtgtcaaaagaactattctgaaagaagattctcctgggcttctccaatttgaagtgtgtcctctctcagagtctcgtttcagcgtatcttttcagcaccctgtgaatgactccctggtgtgtgtggtaatggatgtgcaggactcaacacatgtgagctgtaaactctacaaagggctgtcggatgcactgatctgcacagatgacttcattgccaaagttgttcaaagatgtatgtccatccctgtgacgatgagggctattcggaggaaagctgaaaccattcaagccgacaccccagcactgtccctcattgcagagacagttgaagacatggtgaaaaagaacctgcccccggctagcagcccaggatcaaagaatcccgagttaggatctggatgaaggataagcccctgaattgtcgatgggctcacccccacactgacccagcatctgaacttgcttaacagggagccggggctaaactgcttcaccctgcctgagaaccagggagcactgcatttctccacagggtggaggagaagaggcagaataaaccaagcctgggacacctccctcctgtctaggtgtactcattcttctgtttcaaaagaaggcaaggacatgaagtcaacttctacctatcttctgctgctggtgtcttatgtattctcagtttgacctgattcctcttctgtcttttgacttaacattaggggttcttggtcataacctgctctgatgtacataaagatttcaggttcaatatcaatgtgtcttaaaacagaagtattttagcgggtggggggtggggtggtggggacaaacaacgcaggatataattgccaaaaccaggcttgaggttggtgactcttgaaagattttctttcttcaggcctagatcagaaaattaagtgcagcaatatcatgaattctcagaagccctttcagggagccagtgagtcatacagtatccacagttgagtcacttaaagatgtcagtatacgaaacattattcacaatccttgggcaatctcatttttttttccttctcccctcctcccctgccccccatacatttctatccttgagttagttttggaggggcaggaagtacttaacatctcagaagctagattgggaaacatgctcagctataagaactgagctttaaattttgagtttaaaaatgtacatcaggagcagctggggagggtctttttttaaaaaaatctttcaaatttggttttctgtgcatatggccgttttgtaaatactttggggtttttcatttttttgaaagtagatgaaatctgttgtgggatttttttcccgaaacattacaaaataacctgtttatttacatgcaaataaacttctttgataaaaagtaa

SEQ ID NO: 294556 - DNA, 1671 bp, Artificial Sequence
  derived and/or modified sequence
atgaaggcccagggcgagaccgaggagagcgagaagctgagcaagatgtcttccttgttggaaagacttcatgcgaagtttaatcaaaaccgaccctggagcgaaactatcaagttggtgcgccaagttatggagaaaagagtcgtcatgtcttcgggcggccaccagcacctcgtctcatgtttggagacactgcagaaggctcttaaggtaactagccttcccgcgatgacagacagactggagagcattgctcgccagaacgggttgggaagccatctttcggcatctggcaccgagtgctatatcacctccgatatgttctacgtggaagtgcagctcgaccctgctggacagttatgcgatgtgaaagttgcgcaccacggggaaaatccagtcagctgccctgagcttgtgcaacagcttcgcgagaagaacttcgacgagttctctaagcacttgaagggactggtcaatctttacaacctgcctggagacaacaagcttaaaaccaaaatgtacttggcgctgcagtccttagagcaggaccttagcaagatggcaattatgtactggaaggcaaccaacgccgggcccctcgataaaatcctgcatgggagtgttggttatctgacacccaggtctggagggcacctcatgaacctgaaatactacgtgagccccagcgacctgctggatgacaaaacggcgtcgcccatcattcttcacgagaacaatgtgtccagatccctcggaatgaatgccagcgtgacaattgagggcacttctgcggtctacaagttgcccattgcacccctgatcatgggctcacaccccgtggacaacaagtggacaccttcattctcaagtataacatctgctaactctgtggacctgcctgcatgcttctttctgaagtttccacagcccatacccgtgtctcgtgccttcgttcagaagctgcagaactgtacaggtatccctctgttcgaaacacaacccacatatgcccctctctacgaacttattactcaatttgaactctcgaaagacccagaccccatacctctgaaccataacatgaggttttatgcagccctgccagggcagcagcactgttactttctaaacaaggacgccccattacctgacggaagaagcctgcagggaacactggtttctaagatcacctttcaacatcctggccgggtccccctgatactcaacctgattaggcatcaggtggcctataataccctgatcggctcgtgcgtaaagcgcactatcctcaaggaggactccccaggacttttgcagtttgaggtgtgccccctgagcgagtccagattctcagtctccttccagcaccccgtcaatgactcactggtgtgcgtggtaatggacgtgcaagacagcacacacgtgagctgcaaactttataaaggactctctgacgccctgatttgcacagacgatttcatcgctaaggttgtccagagatgcatgagtattccagtgacaatgcgagctatcaggagaaaggctgaaacgatccaggccgacacgccagcactgagcctcatcgcagagacagtcgaagacatggtcaaaaaaaacctcccgccagcaagttcccctgggtctaagaacccggagctgggcagcggttag

SEQ ID NO: 294557 - DNA, 1671 bp, Artificial Sequence
  derived and/or modified sequence
atgaaggcccagggcgagaccgaggagtcggaaaaattgtcaaaaatgtcttcattacttgaacgactgcacgctaagtttaatcaaaatcggccatggagcgagactattaagctggtccgacaggtgatggagaaacgtgtagtgatgtctagcggcggacatcagcacttagtgtcatgcctcgaaaccttgcaaaaggcattaaaggtgaccagcttacctgccatgacagatcgactggaatctatcgctcgacaaaatggcttaggctcccatttaagtgcctcaggcacagagtgctatattacttccgatatgttttatgttgaggtccagctggatcctgcaggacagctgtgtgacgtgaaagtagcgcatcatggtgaaaaccccgttagttgccctgaattggttcagcagctgagagaaaagaattttgacgagtttagcaaacatctcaagggactagtgaacctgtacaatttgcccggtgataacaagctcaagacaaaaatgtacctggctctgcagagtctggagcaggaccttagcaagatggccattatgtattggaaagcaacgaacgcaggtcccttagataagatcctccatggctctgtcggctaccttacccctaggtcgggcggtcacctgatgaatcttaagtattacgtttctccaagcgatctcttagacgacaaaactgcctctcctattattctccatgagaataatgtgagtcgaagcctcggcatgaacgcatccgtgacaatcgaaggcacaagcgccgtgtacaaattaccaatagctcccttgattatggggagccatcctgtcgataacaaatggactccttctttcagtagcataacaagtgcaaactccgtggatttaccagcttgtttctttctgaagtttccacagcccattcccgtctcccgggcttttgtgcagaaactgcaaaactgcacagggattcctctttttgagacccagccgacatacgcaccactgtacgaactaattacccaatttgagctgtccaaggatcccgatcccatcccactgaaccacaatatgcgcttttatgcagctttacctggtcagcagcactgctacttcctgaataaggacgctcccctgcccgatgggaggtctttgcagggaacattggtaagcaagattacgtttcagcatccaggccgagtgcccctgatcctcaatctgatacgtcatcaggtggcttataacactttgataggctcctgtgtcaagcggacgattttgaaagaggacagcccgggacttctgcagtttgaagtttgtccacttagcgagtctagattttccgtgagtttccagcaccctgtgaacgactccctagtttgtgtggtgatggatgtccaggatagcacccacgtttcatgtaagctttacaaggggctctccgatgcgctcatttgtactgacgattttatcgccaaagtggttcagaggtgcatgagcattccggtcactatgagagcaattcggaggaaagccgagactattcaggcggacacccctgccctgagcctgatcgcagagaccgtggaggatatggtaaagaagaacctgccccctgctagtagcccgggaagcaagaaccctgagctgggatcgggctag

SEQ ID NO: 294558 - DNA, 1671 bp, Artificial Sequence
  derived and/or modified sequence
atgaaggcccagggcgagaccgaggagagcgagaagctgagcaagatgagcagcctgctggagagactgcacgccaagttcaaccagaacagaccctggagcgagaccatcaagctggtgagacaggtgatggagaagagagtggtgatgagcagcggcggccaccagcacctggtgagctgcctggagaccctgcagaaggccctgaaggtgaccagcctgcccgccatgaccgacagactggagagcatcgccagacagaacggcctgggcagccacctgagcgccagcggcaccgagtgctacatcaccagcgacatgttctacgtggaggtgcagctggaccccgccggccagctgtgcgacgtgaaggtggcccaccacggcgagaaccccgtgagctgccccgagctggtgcagcagctgagagagaagaacttcgacgagttcagcaagcacctgaagggcctggtgaacctgtacaacctgcccggcgacaacaagctgaagaccaagatgtacctggccctgcagagcctggagcaggacctgagcaagatggccatcatgtactggaaggccaccaacgccggccccctggacaagatcctgcacggcagcgtgggctacctgacccccagaagcggcggccacctgatgaacctgaagtactacgtgagccccagcgacctgctggacgacaagaccgccagccccatcatcctgcacgagaacaacgtgagcagaagcctgggcatgaacgccagcgtgaccatcgagggcaccagcgccgtgtacaagctgcccatcgcccccctgatcatgggcagccaccccgtggacaacaagtggacccccagcttcagcagcatcaccagcgccaacagcgtggacctgcccgcctgcttcttcctgaagttcccccagcccatccccgtgagcagagccttcgtgcagaagctgcagaactgcaccggcatccccctgttcgagacccagcccacctacgcccccctgtacgagctgatcacccagttcgagctgagcaaggaccccgaccccatccccctgaaccacaacatgagattctacgccgccctgcccggccagcagcactgctacttcctgaacaaggacgcccccctgcccgacggcagaagcctgcagggcaccctggtgagcaagatcaccttccagcaccccggcagagtgcccctgatcctgaacctgatcagacaccaggtggcctacaacaccctgatcggcagctgcgtgaagagaaccatcctgaaggaggacagccccggcctgctgcagttcgaggtgtgccccctgagcgagagcagattcagcgtgagcttccagcaccccgtgaacgacagcctggtgtgcgtggtgatggacgtgcaggacagcacccacgtgagctgcaagctgtacaagggcctgagcgacgccctgatctgcaccgacgacttcatcgccaaggtggtgcagagatgcatgagcatccccgtgaccatgagagccatcagaagaaaggccgagaccatccaggccgacacccccgccctgagcctgatcgccgagaccgtggaggacatggtgaagaagaacctgccccccgccagcagccccggcagcaagaaccccgagctgggcagcggctag

SEQ ID NO: 294559 - protein, 398 aa, Artificial Sequence
  derived and/or modified sequence
MELEEGKAGSGLRQYYLSKIEELQLIVNDKSQNLRRLQAQRNELNAKVRLLREELQLLQEQGSYVGEVVRAMDKKKVLVKVHPEGKFVVDVDKNIDINDVTPNCRVALRNDSYTLHKILPNKVDPLVSLMMVEKVPDSTYEMIGGLDKQIKEIKEVIELPVKHPELFEALGIAQPKGVLLYGPPGTGKTLLARAVAHHTDCTFIRVSGSELVQKFIGEGARMVRELFVMAREHAPSIIFMDEIDSIGSSRLEGGSGGDSEVQRTMLELLNQLDGFEATKNIKVIMATNRIDILDSALLRPGRIDRKIEFPPPNEEARLDILKIHSRKMNLTRGINLRKIAELMPGASGAEVKGVCTEAGMYALRERRVHVTQEDFEMAVAKVMQKDSEKNMSIKKLWK

SEQ ID NO: 294560 - DNA, 6276 bp, Artificial Sequence
  derived and/or modified sequence
gaaggatgcgtgtgtgccggtctgctgtgcatgtgtgtatctgcatgtctgtgatgcatgcgcatgcgtctgtatgtgcattgtgtgtgcaggactttgattctgtgcaactctgtgcatatctatgtgtctacaaaagtgtgcacatgtgtactcatttgtgtgtgtgtatctgtgtgtctgcatatttgcacatgcttgtctgtatgtttgtggtatgttccgtctacatgagtgtatgtggctggggctgtgtctgcataagtatgtgtctatctgggagtgcatatatgtgtgcatgtgtgtgtgtgagattgtgcatgagctaagacaacgacaggcacttcctgggcaggaaggctgtatccagggtcctgcacatagtaggtgctcagtgaacatttgctgaactcagctgaactgaactgaatgaacttgcttcactgccactgggcccaagagatgggtgctctcctaggcgccccttcccctggcaggggccgaggacgctgctgctgtacaaaagtccccaggacggctttggcttcactctgcgccacttcatcgtgtacccacccgagtcggccgtgcactgcagcctgaaggaggaagagaatggaggccgtggaggaggaccctccccccggtaccgcctggagcccatggacaccatctttgtcaagaatgtgaaggaagacggccctgcccatagggcggggcttcgcacaggagaccggctggtaaaggtgaatggggaaagcgtcattgggaagacctactctcaggtcatagctctgatccagaatagtgatgacactctggagctgtctatcatgcccaaggacgaggacatcctccagctggcctactcccaggatgcctacctgaaagggaacgagccgtattctggagaggcccgcagcatcccagagccaccgccgatctgctacccccgcaagacctacgcccctcctgcccgggcctccaccagggccactatggtgcctgagcccacctcagcactgcccagtgacccccggagtcctgctgcctggagtgacccggggctccgtgtgccacctgctgcccgtgcccacctggacaactcttccttggggatgagccagccccgccccagccctggtgccttcccccacctctcctcggagccccggacgccccgtgccttcccagagcctggcagccgggtgccccccagcagactggagtgccagcaggccttgtcacactggctgtcaaaccaggtaccccgccgggcgggggagagacggtgcccagccatggccccccgggcccgcagcgcctcccaggaccggttggaggaggtggctgccccccgcccgtggccctgctccacctcccaggatgctttgagccagctgggccaggagggctggcaccgagctcgctcagatgactacttgagccgggccacccgttctgccgaggcactggggccaggggcactggtgtcaccccgctttgagcggtgtggctgggcttcccagcgttcgtctgcccgcacccccgcctgcccaactcgggacctgccagggccccaggccccacccccgtctggcctgcagggcctggatgacctcgggtacatcggctaccggagctacagcccatcattccagcgccggaccggcctcctccatgcgctctccttccgggactcaccctttggggggctgcctaccttcaacctggcccagtcccctgcgtcattcccaccagaggcctccgagccacccagggttgtacggccggaacccagcacccgggccctggagcctcctgcggaggatcgcggcgatgaggtggtcctgaggcagaagcccccgacgggccgcaaggttcagctgacccccgcaagacagatgaaccttggatttggtgacgagtccccagagccagaggccagtgggcgaggggaacgcctgggcaggaaggtggcccctttggccaccaccgaagactctctggcttccatcccctttattgatgagcccaccagccccagcattgacctccaagccaagcacgtccctgcctctgctgtggtctccagtgccatgaactcagcccctgtcctgggcaccagcccatcttccccgaccttcactttcaccctcggacgccattactcgcaggactgcagcagcatcaaggctggccgccgctcctcctacctgctggccatcaccacggagcgctccaagtcctgcgatgatggactcaacaccttccgcgacgagggccgggttctgcggcgcctgccaaaccgcatacccagcctgcggatgctccggagcttcttcaccgacgggtccttggatagctggggcacctctgaagatgctgacgctccttctaagcgacactcaacctctgacctctcagatgcgaccttcagcgatatcaggagagaaggctggttgtattataagcagattctcaccaagaaggggaagaaagcgggcagcggcctgcgccagtggaagcgggtgtacgccgcgctgcgggcgcgctcgctctcgctgagcaaggagcggcgggagcccgggccggcggcggcgggggctgcggcggccggcgcaggtgaggacgaggcggcgcccgtctgcatcggctcctgcctcgtggacatctcctacagcgagaccaagaggaggcacgtgttccggctgaccaccgctgacttctgtgaatatctctttcaggctgaggaccgggatgacatgctgggctggatcagagcgatccgggagaacagcagggccgagggcgaggaccccggctgtgccaaccaagctctgatcagcaagaagcttaacgattatcgcaaagtgagccatagctctgggcccaaagctgattcctcccccaaaggctctcgcggcctggggggcctcaagtctgagttcctcaagcagagtgcggcacgtggcctcaggactcaggacctgcccgcagggagcaaggatgacagtgctgcagcccccaaaaccccctggggcatcaacatcatcaagaaaaataagaaggccgctccgagggcgtttggggtcaggctggaggagtgccagccagccacggagaaccagcgcgtccccttaatcgtggctgcatgctgtcgcattgtggaggcacgagggctggagtccacaggcatttaccgagtgcccggcaacaatgcagtggtgtccagcctacaggagcagctcaaccgcgggcctggtgacatcaacctgcaggatgagcgctggcaagacctcaatgtgatcagcagcctgctcaagtccttcttccgaaagctgcccgagcctcttttcactgatgacaaatacaacgacttcatcgaggccaaccgcattgaggacgcacgggagcgaatgaggacgctgcggaagctgatccgggatctcccaggacactactatgaaacgctcaaattccttgtgggccatctcaagaccatcgctgaccactctgagaaaaacaagatggaaccccggaacctggccctggtctttgggccgacactggtgaggacgtctgaggacaacatgacagacatggtgacccacatgcctgaccgctacaagatcgtggagacactgatccagcactcagactggttcttcagtgacgaagaggacaagggagagagaacccctgtgggcgacaaggagcctcaggcagtgcccaacattgagtacctcctgcccaacattggcaggacagtgccccctggcgacccggggtcagattctaccacctgtagttcagccaagtccaagggttcgtgggcccccaagaaggagccgtacgcccgggagatgctggcgatctccttcatctcggccgtcaaccgcaagcgcaagaagcggcgggaggcgcgggggctgggcagcagcaccgacgacgactcggagcaggaggcgcacaagcctggggcgggggccacagcgccggggactcaggagcggccgcaggggccgctgcctggcgccgtcgcccccgaggcccccggacgcctcagtcccccggcggcgccggaggagcggccggccgcggacacgcgctccattgtgtcgggctactccaccctgtccaccatggaccgcagcgtgtgctcgggcgctagcggtcggcgggcaggggcgggggatgaggcggacgacgagcgtagcgagctgagccacgtggagacggacactgagggcgcggcgggcgcggggcctggggggcgcctgacacgccggccgtccttcagctcgcaccacctcatgccctgcgacactctggcgcgccgccgcctggcccggggccgcccagacggcgagggcgcgggccggggcggtccccgcgccccggagccgcccggctcggcgtcgtccagcagccaggagtcgctgcggcccccggcggcggcgctggcctcccggccctcgcgcatggaggcgctgcgtctaaggctccgcggcacggcggacgacatgctcgccgtgcgcctgcggcggccgctgtcgcccgagacccggcggcgccggagcagctggcgccgccacaccgtggtggtgcagagcccgctgactgacctcaacttcaacgagtggaaggagctgggcggagggggccccccggagcctgcgggcgcgcgggcgcacagtgacaacaaggactccggactcagcagcctggagtccaccaaggcgcgggccccgtcgtccgctgcctcgcagccgcccgcgcccggggacacggggtccctgcagagccagcccccgcgccgctcggccgcctcccgcctgcatcagtgtctgtgatccccacctcccgcgccgctcgggcgccacccctccctagagcccctttggaaccaggaggcttcaccagcctgcacctcctcttctgtggcccctgggtgcatggtgtgggtggagggcgcagcaggcagtgtctctagttggtgtgctggaactggcagggcagaggagaaggctggggccggactaattgaatggaagggggttccagaggtgatgagcagaagaggagggggcgtgggctgctggggtctgtgtccctgcacacatgcgcccgataggtccttctgagcctttctgtggctgcacttggggacccttgtggaccatggggtgtggctagggaacccctaagtttcagactaaaggaaagatcctgggtgatgctggctttttgcttctttcttctgccctcccacctcagcttgtaagcggggatgtgtgtatgtctggggagaggaggtgtagggtgcgtatgtccatggggggaggggcttgtgtgtgcagtcattgtcccaaggtgtttccagtagcgacttctgtccccctatccccaccctggtccccactttgcgcccccgggctccctgcctttggtgcacacaggatcctgcccgccccccttgccagagccagagaagggggttggggccattccaaggaggcaggactgaaaccctcaccagggttactccccaacatccttttgcctgagtcaccctctaagcgctttaaccacgggcagctgcctgttccccagacagtttttggtggggggggtccagggtcccccttgctggtacctccctcacccctctttttgtttttccatctgtgcctgttccttccacagcccaggcacacagaagcccaccttcttccccttaggaggagggatagtcaacacccctgctgtctctctgtcactcacacactgatttatggggtctgagctgggctgttcctgcaggatggacaggacccagcgccctcttctccccacaggctgtaaatagacttccaatcaccaggccagcccccacacaccctcactcattccagggaagcccaggtaggtggtgaacccgctgccacgtctatcagtcctcttgttttatgcaaagatttactgtaaagtagatttctttccctccctcccccattcttttattgtaaatattgtctctaaatgtgtaacatattataaagaatttataaggatttttaaagatgttttgctcatttacaaaagtgttgtaacagtgttggacaaagccttccaccccatgtccgcatggctcctttcactgtgtccttgacacacctctctggcaacaactaaaatttcctgcttctgaaaagtcctgtcttaaaagtacagtctatatcttggaaataaatagctttcctcaaggcatga

SEQ ID NO: 294561 - protein, 1144 aa, Artificial Sequence
  derived and/or modified sequence
MNGVAFCLVGIPPRPEPRPPQLPLGPRDGCSPRRPFPWQGPRTLLLYKSPQDGFGFTLRHFIVYPPESAVHCSLKEEENGGRGGGPSPRYRLEPMDTIFVKNVKEDGPAHRAGLRTGDRLVKVNGESVIGKTYSQVIALIQNSDDTLELSIMPKDEDILQLAYSQDAYLKGNEPYSGEARSIPEPPPICYPRKTYAPPARASTRATMVPEPTSALPSDPRSPAAWSDPGLRVPPAARAHLDNSSLGMSQPRPSPGAFPHLSSEPRTPRAFPEPGSRVPPSRLECQQALSHWLSNQVPRRAGERRCPAMAPRARSASQDRLEEVAAPRPWPCSTSQDALSQLGQEGWHRARSDDYLSRATRSAEALGPGALVSPRFERCGWASQRSSARTPACPTRDLPGPQAPPPSGLQGLDDLGYIGYRSYSPSFQRRTGLLHALSFRDSPFGGLPTFNLAQSPASFPPEASEPPRVVRPEPSTRALEPPAEDRGDEVVLRQKPPTGRKVQLTPARQMNLGFGDESPEPEASGRGERLGRKVAPLATTEDSLASIPFIDEPTSPSIDLQAKHVPASAVVSSAMNSAPVLGTSPSSPTFTFTLGRHYSQDCSSIKAGRRSSYLLAITTERSKSCDDGLNTFRDEGRVLRRLPNRIPSLRMLRSFFTDGSLDSWGTSEDADAPSKRHSTSDLSDATFSDIRREGWLYYKQILTKKGKKAGSGLRQWKRVYAALRARSLSLSKERREPGPAAAGAAAAGAGEDEAAPVCIGSCLVDISYSETKRRHVFRLTTADFCEYLFQAEDRDDMLGWIRAIRENSRAEGEDPGCANQALISKKLNDYRKVSHSSGPKADSSPKGSRGLGGLKSEFLKQSAARGLRTQDLPAGSKDDSAAAPKTPWGINIIKKNKKAAPRAFGVRLEECQPATENQRVPLIVAACCRIVEARGLESTGIYRVPGNNAVVSSLQEQLNRGPGDINLQDERWQDLNVISSLLKSFFRKLPEPLFTDDKYNDFIEANRIEDARERMRTLRKLIRDLPGHYYETLKFLVGHLKTIADHSEKNKMEPRNLALVFGPTLVRTSEDNMTDMVTHMPDRYKIVETLIQHSDWFFSDEEDKGERTPVGDKEPQAVPNIEYLLPNIGRTVPPGDPGSADLLEI

SEQ ID NO: 294562 - DNA, 3435 bp, Artificial Sequence
  derived and/or modified sequence
atgaacggtgtcgcattttgcctggtgggcatcccaccacgaccagaacccagaccacctcagttacccttgggcccccgcgacggttgctccccaaggagacccttcccatggcagggccctcgcactctgctgctatataaatccccacaggacggattcggctttactttgagacactttattgtctacccacccgaaagcgctgtgcattgttctctgaaggaagaggagaatggagggcgcggaggaggacccagccccaggtaccgtttagagcctatggatactatattcgttaaaaacgtgaaggaagatggccctgcacatcgcgcaggccttaggactggggacaggctcgtgaaagtgaacggggaatcggtgatcggcaagacatattcccaggtcatcgctctgattcaaaacagtgatgacacattggagttgtctataatgcccaaggatgaagacattctgcagctggcttatagccaggatgcttacctgaaggggaatgaaccctactcaggggaggcccgttcaatccccgaaccacctccaatctgctaccccaggaaaacatacgcaccacctgcccgcgcgtctacccgggccactatggttcctgagccaaccagcgcactgccctcggacccaaggtctcccgctgcatggtctgatcctggtttacgtgttccacctgcggcgagggcccatttagataactctagccttggtatgtcccagccccggcctagtcccggggccttcccacacttaagctccgagccacgtacaccccgtgcgtttcccgagcccgggtcgagggtgcctcctagtcgattggaatgtcagcaggccctgtcgcattggctgagtaaccaggtcccgcgacgcgctggcgagaggaggtgtccagctatggcgcctcgcgctcgttcggcctcacaagatcggttggaggaggtggcagctcctagaccatggccatgttcaactagccaggacgccctctctcagctgggacaagaaggctggcatagagcccggagcgatgactacctgtcccgagcaacacgatcagccgaggctctcggtcctggcgctctcgtgtcaccgaggttcgagaggtgtggctgggcgtcccagcgcagcagtgctcgaacgcccgcatgtccaacccgcgatctgcccggcccccaagcacccccaccttcggggttgcaggggcttgacgacctgggctacattggttaccgatcctactccccatcttttcagcgtagaaccgggcttctgcacgcgctgtctttcagggacagtccctttggggggttacccaccttcaatttagcgcaatcccctgcatcttttccccctgaggcttctgaaccacctagggtcgtcaggccggagccgtccacacgagctttggaacctcctgcagaggacaggggtgacgaagtggtacttagacaaaaaccccccactgggaggaaagtccagctgactcctgcgcgacaaatgaacttaggcttcggagatgaaagcccggaacctgaggcctccggccggggagagagactcggcaggaaagtcgcgcccttggccactaccgaagatagtctggcaagtatcccattcatagacgaaccgacctctccctcaattgatctgcaggccaaacatgttccggcgtcagcagtcgtttcatcagccatgaattctgctcctgtgctgggtacatcaccctcctctcccacattcacttttaccttggggcggcactatagtcaggactgctcctccatcaaggctggtaggaggagcagttacttgctagccataacgaccgagcggagcaagtcatgtgacgacggattgaatactttccgggacgagggcagggtgctccgaagactcccaaatcgtattccttcattgaggatgctaagatctttcttcactgacggctcactcgacagttggggaacgtcggaagacgctgatgctcccagcaagcggcacagtacctcagacctctccgacgcaaccttttcggatattaggagagagggctggctctactataagcagatactcactaagaaaggaaagaaagcggggtcaggcctgagacagtggaagagagtgtacgccgcactgcgcgctagatccctcagcttgagcaaagagcgcagagagcccggtcctgccgccgcaggcgccgcagctgcgggagcgggagaagatgaagccgctccagtgtgcattgggtcatgcttagtggacatcagctacagcgagactaagagacggcacgttttccggctaactactgccgatttttgcgaatacctgttccaggccgaggatagagatgacatgttgggatggattcgggccattagagagaattcccgggcagaaggcgaagatccggggtgtgccaatcaagctctcatcagtaagaagttgaacgattacaggaaggtcagccattcgtccggcccaaaggctgacagttcacccaagggctcccgaggtctgggcggactcaaatcagaattccttaagcagtccgcggccagggggttacggacacaagatctccccgccggatccaaggacgactctgcagcagcaccaaagacgccgtggggaatcaatataatcaagaaaaataagaaagccgcccctagggcttttggagtccgcctggaagaatgccaacccgccacagaaaaccagcgtgttcctcttattgtcgccgcctgttgtcgaattgtggaagcaagggggctggaatcaaccgggatatatcgagtgccaggcaataacgctgtcgtcagcagtttacaggagcagcttaacagaggacccggggacatcaacttacaggacgagcggtggcaggacttaaacgttatcagcagtcttctaaaatcgttttttcggaagttgccagagccactgtttacagatgacaagtataatgacttcatcgaggccaacagaatcgaagatgctagggagcggatgagaactcttcgcaaattaattagagacctgccggggcactattacgagacgctgaaatttctggtgggccacctgaaaactattgccgaccactctgagaaaaataagatggaacctcgaaatctggctttggtttttggacctacactggtccgcaccagtgaggataacatgaccgacatggtaactcacatgcctgacaggtataaaatagtcgagacactcatccaacattccgattggtttttcagcgacgaggaggataagggcgaaaggacccccgttggggacaaagagccacaggctgtccccaatatagaatatctgctgccaaatataggaaggaccgttcctccaggggaccctggaagcgctgacttgcttgagatatag

SEQ ID NO: 294563 - DNA, 3435 bp, Artificial Sequence
  derived and/or modified sequence
atgaatggagtggccttctgcctggtgggcatcccccccaggcctgagcccaggcctccccagctgcccctgggccccagagatggctgcagcccccggcggcccttcccctggcagggccccaggaccctgctgctgtacaagagcccccaggacggcttcggcttcaccctgcggcacttcatcgtgtacccacctgagagcgctgtgcactgcagcctgaaggaggaggagaatggaggccggggcggcggccccagcccccgctaccgcctggagcccatggacaccatctttgtgaagaatgtgaaggaggatggccctgcccaccgggccggcctgaggactggagaccggctggtgaaggtgaatggagagagcgtgattggcaagacctacagccaggtgattgccctgatccagaacagtgatgacaccctggagctgagcatcatgcccaaggatgaggacatcctgcagctggcctacagccaggatgcctacctgaagggaaatgagccctacagcggggaggcccggagcatccctgagcccccacccatctgctaccccaggaagacctacgcccccccagcccgggccagcacccgggccaccatggtgcctgagcccaccagcgccctgcccagcgaccccaggagccctgctgcctggagcgaccccggcctgcgggtgcccccagctgcccgggcccacctggacaacagcagcctgggcatgagccagccccggcccagccctggggccttcccccacctgagcagcgagcccaggaccccccgggccttccctgagcccggcagccgggtgccccccagccggctggagtgccagcaggccctgagccactggctgagcaaccaggtgccccggcgggccggggagcggcgctgcccagccatggccccccgggcccggagcgccagccaggaccggctggaggaggtggccgccccccggccctggccctgcagcaccagccaggatgccctgagccagctgggccaggagggctggcaccgggcccggagtgatgactacctgagccgggccaccaggtctgctgaggccctgggccctggggccctggtgagccccaggtttgagcgctgtggctgggccagccagaggagcagcgcccggaccccagcctgccccacccgggacctgcccggcccccaggcccccccacccagcggcctgcagggcctggatgacctgggctacatcggctaccgcagctacagccccagcttccagaggagaacaggcctgctgcacgccctgtccttccgggacagcccctttggaggcctgcccaccttcaacctggcccagagccctgccagcttccccccagaggccagcgagcccccccgggtggtgcggcctgagcccagcacccgggccctggagcccccagcagaagatagaggagatgaggtggtgctgcggcagaagcccccaactggaaggaaggtgcagctgaccccagcccggcagatgaacctgggctttggagatgagagccctgagcctgaggccagcggccgcggggagcggctgggcaggaaggtggcccccctggccaccacagaggacagcctggccagcatccccttcattgatgagcccaccagccccagcattgacctgcaggccaagcacgtgcctgccagcgctgtggtgagcagcgccatgaacagcgcccctgtgctgggcaccagccccagcagccccaccttcaccttcaccctgggccgccactacagccaggactgcagcagcatcaaggccggccgccgcagcagctacctgctggccatcaccacagagaggagcaagagctgtgatgatggcctgaacaccttcagagatgagggccgggtgctgcggcggctgcccaaccgcatccccagcctgaggatgctgcgctccttcttcacagatggcagcctggacagctggggcaccagtgaagatgctgatgcccccagcaagaggcacagcaccagtgacctgagtgatgccaccttcagtgacatccggcgggagggctggctgtactacaagcagatcctgaccaagaagggcaagaaggccggcagcggcctgcggcagtggaagagggtgtatgctgccctgcgggcccggagcctgagcctgagcaaggagcggcgggagcccggccctgctgctgctggagctgctgctgctggggccggggaggatgaagctgcccctgtgtgcatcggcagctgcctggtggacatctcctacagcgagaccaagagaagacatgtgttccggctgaccacagctgacttctgtgagtacctgttccaggctgaagatagagatgacatgctgggctggatccgggccatccgggagaacagcagagctgagggggaggaccccggctgtgccaaccaggccctgatcagcaagaagctgaatgactacaggaaggtgagccacagcagcggccccaaggctgacagcagccccaagggcagccggggcctgggcggcctgaagtctgagttcctgaagcagagcgctgcccggggcctgcggacccaggacctgcctgctggcagcaaggatgattctgctgctgcccccaagaccccctggggcatcaacatcatcaagaagaacaagaaggccgccccccgggcctttggagtgcggctggaggagtgccagcctgccacagagaaccagagggtgcccctcatcgtggccgcctgctgcagaattgtggaggcccggggcctggagagcacaggcatctacagagtgcccggcaacaatgctgtggtgagcagcctgcaggagcagctgaacagaggccctggggacatcaacctgcaggatgagcgctggcaggacctgaatgtcatcagcagcctgctgaagagcttcttcaggaagctgcctgagcccctcttcacagatgacaagtacaatgacttcatcgaggccaacagaattgaagatgcccgggagaggatgaggaccctgaggaagctgatccgggacctgcccggccactactatgagaccctgaagttcctggtgggccacctgaagaccatcgctgaccacagcgagaagaacaagatggagcccaggaacctggccctggtgtttggccccaccctggtgaggaccagcgaggacaacatgacagacatggtgacccacatgccagaccgctacaagatcgtggagaccctcatccagcacagcgactggttcttcagtgatgaagaagataaaggagagaggacccctgtgggggacaaggagccccaggccgtgcccaacatcgagtacctgctgcccaacattggaagaacagtgcccccaggggaccccggcagcgctgacctgctggagatctag

SEQ ID NO: 294564 - DNA, 3435 bp, Artificial Sequence
  derived and/or modified sequence
atgaacggcgtggccttctgcctggtgggcatccccccccggcccgaacctcgccctccccagctgcccttagggcccagagacggctgctctcccaggaggccttttccctggcaggggcctcgtacactgttgctctataagtccccacaggatggatttggatttactctccgacacttcattgtttatccccctgagtctgccgtccactgctcacttaaggaggaagagaacggcggccgcggcgggggcccatcaccacggtatcgtctcgagcctatggacactattttcgttaagaatgtgaaggaggacggacccgcccatcgggcaggattgcgcacaggagataggctagtcaaagtcaacggggaaagtgtcataggaaaaacttattcccaggtcattgccttaatccagaacagtgacgacacactggagctgtccattatgcccaaggatgaagatattctccagctggcatactcccaagacgcttatcttaagggcaatgaaccttattccggcgaggctcggtccatccctgagcctccacctatttgttacccgcgcaaaacatacgcaccgcctgctcgtgcttctactcgagccaccatggtaccggagcccactagcgctttaccttccgacccccgcagccccgcggcctggtcagatcccggcctgcgagtcccccccgcagccagagcacacctggataactcaagcctgggtatgtctcagcctcggccttcccctggagcctttcctcacctgagtagtgaacccagaactccaagggcctttccagagcccggaagcagagtccctccatccaggctcgagtgtcagcaggccctgtctcactggttatctaatcaagtaccccggcgggctggtgagcggcgctgtcctgccatggcaccccgcgctagatccgcaagccaggaccggttggaggaagtcgctgcccctcgaccctggccctgttctacctcccaggacgcactgtcccagctgggccaggagggctggcaccgagcgagatccgacgactatctgtcccgcgcaaccagatcagcggaggccttaggccccggagccctggtctctccaaggtttgaaaggtgtggatgggcttctcagagatcttcggcccgtaccccagcatgccctacacgtgacctgcctggccctcaggctccaccgccttcaggccttcagggtctcgatgacttaggctatatcggttaccgatcctatagtccctctttccaacggaggaccggccttttgcacgccctttctttcagggattctccttttggaggacttcctacattcaacctggcacagtcccctgcatccttccctccagaagcctccgaaccacctagggtggttagacccgagccgagcactagagctctggagccaccagccgaggacagaggcgacgaagtggtcctacgccagaaacctccaacagggagaaaggtgcagctaactcccgccaggcagatgaatctcgggttcggcgacgagagccctgaacctgaggcgagtggccgaggtgaaagactaggaaggaaggttgcccccctggccacaacagaggattcactcgctagcattccgtttattgacgagcccacatcacccagcatcgacctgcaagccaaacacgttcctgcatcagctgttgtgtcctcagcaatgaattccgcacctgtgctgggaacaagcccgtccagccctaccttcacttttaccctcggcaggcattactctcaggactgctctagcatcaaggcgggccgcagaagttcctacttgctagccattaccacggagcggtctaagagctgtgatgatggcctgaacacatttcgggacgaaggccgcgtactgcgcaggcttccgaaccgcatccctagccttcgcatgttgcggagcttcttcacggacgggtcactggacagttggggaactagcgaagacgctgatgccccttctaaaaggcatagcacttcggatctgtcagatgccactttttctgacatcaggagagagggctggctgtactacaagcaaattctgacaaagaagggaaagaaggcgggcagtgggctccgacagtggaaacgggtctatgccgctttaagggctcggtcactgtctctgtcaaaggaacggagggagccaggccctgctgccgctggagcagcagctgcgggcgcaggggaggatgaagcagcccccgtctgcataggctcatgcttggtggacataagttactctgaaactaaaagacgccatgtctttcgcttgaccaccgctgacttctgtgagtacctttttcaggctgaagacagagatgacatgctggggtggatcagggcaatacgggagaacagcagggccgaaggcgaagatccagggtgcgcaaaccaagcactcattagcaagaaattgaacgactaccggaaggtgagtcattcctcagggccaaaggcagatagcagccccaaaggtagccgggggctggggggcctgaaaagcgaattcctgaagcagagtgccgcccggggactgcggacacaggatcttccagcaggctctaaggacgacagtgccgcggcacccaagacaccgtggggaatcaatatcattaaaaagaataagaaagctgcaccacgcgctttcggagtgcggctcgaggagtgtcagcctgcgactgagaatcagcgggttccactcatcgtggccgcttgttgtaggattgtcgaagccagagggctggagtctactggaatttacagagttcccggcaacaacgcagtggtgtcaagtctgcaggaacaacttaatagagggcctggcgatattaatctgcaggatgaacgctggcaagacctgaacgtaattagttcactgctgaagagtttcttccgtaagctgcccgagcccctgttcacagacgacaaatacaatgatttcatagaagccaaccggatcgaagacgccagagaacgaatgaggactctgaggaaattaatccgggacctgccaggccactactacgaaaccctcaagttcctcgtgggccatctcaaaactattgcagatcactccgagaagaataagatggagccgagaaatctggcgctggtctttggacctacattggtccggacatccgaagacaacatgactgatatggtaacccacatgccagacagatataaaatagttgagaccctcatccagcactccgattggttcttctccgacgaggaggacaaaggggagcgtacacctgtgggcgacaaggagccgcaggccgttcctaatattgaataccttttacctaatataggacgtacagtacctccgggggatccgggcagcgcagacttattggagatctag

SEQ ID NO: 294565 - DNA, 3435 bp, Artificial Sequence
  derived and/or modified sequence
atgaacggcgttgccttctgcctcgtgggaatacccccacgtccagagccccgacctccccagctgcctttggggcctcgcgacggctgcagccctcgaaggccttttccatggcaggggccaagaacccttctactttacaagagtccccaggatgggttcggattcacacttcgccatttcatcgtgtacccacccgagagtgccgtccattgtagccttaaagaggaggagaacggaggcaggggcggtgggccatccccacggtatagactggagccaatggacacgatatttgtgaaaaacgttaaagaggacgggcctgcccaccgagctggtctgagaactggggatcggctggtcaaggtgaacggggagtcagtgattggcaagacctattcacaggtgattgcactcattcagaacagtgatgacactctggaattatccataatgcctaaagacgaggacatcctgcagctggcttacagtcaggacgcctaccttaaggggaacgagccctattccggtgaggcccgttccattccagagcccccacccatctgttatccaaggaaaacatatgctcctcccgctcgggcatccacaagagctactatggtgcctgaacctacttcagctctgccaagcgacccgaggtcacccgctgcctggtccgaccctgggctaagggttccaccagccgcacgggctcatttggataactctagcttgggtatgtctcagccgcgaccatcaccaggggcttttccccacctaagctctgaaccccgaacacccagagctttccctgagccaggaagtcgcgtgcctcctagtcgcctcgaatgccagcaggcactgtcacactggctgtccaaccaggtgcccaggagagctggtgagcgaagatgtcctgcaatggcacctcgggctagatccgcctcgcaggatagactcgaagaagtggcggctcctagaccttggccatgcagcacaagccaggacgccctgtcacagttgggacaggaaggctggcacagagcccgtagtgatgactacctctccagagcaactcgtagcgccgaagcgctcggacccggagctctggtgagtccgaggttcgagagatgtggatgggcctcccagaggtcgtctgcccgaacgcccgcatgccctaccagagatctgccaggtccacaggccccaccaccctccggcctgcaggggctggatgatcttggttatattggctataggtcctacagccctagcttccaacggaggactggcctgctgcatgccctttcctttcgggattcaccttttggaggtctgccgacgttcaacttggcccagagccctgcctccttccctcctgaggcctcagagcccccaagagtggttcgcccagaacctagcacacgcgctctagagccgcctgcggaggataggggtgacgaagtcgtactgcggcagaagcctcccacagggagaaaggtacagttgacaccagcgcgacagatgaatctgggattcggggatgagagtcctgagcccgaagcatccgggaggggtgagcgcctgggcagaaaagtcgctcccctggccaccacagaagattcgcttgcatccatcccttttatcgacgaaccaacaagcccaagcattgacctgcaggccaagcatgtccctgcgtcagccgtggtttcctcagctatgaactctgctcctgtgctcggcactagtccttcttcccctacatttacctttacactgggccgacactactcacaagattgttccagtattaaggcgggacgtcggtcttcctatctgctggctattacgaccgagaggtctaagtcctgtgacgatgggctgaatacctttagagatgaaggcagagttttacgtcgtctgcctaatcggataccgagccttcgaatgctccgcagcttttttacagatgggtccctggacagttggggaactagcgaggacgctgatgcaccaagcaaaagacacagcacatcggatctctcagacgctacattttcggacattaggcgcgagggctggttgtactacaaacaaatcttgacaaagaagggaaagaaggcagggtctggcttacggcaatggaagcgggtctatgcagcgttgcgagctcggtcactctcactcagcaaagagagacgcgagcccggaccagccgcagccggagccgctgcagccggagctggagaggacgaagctgcaccagtgtgcatcggctcttgcctcgtcgacataagctattcagaaaccaaacgacggcatgtgtttaggttgacaaccgcagacttttgcgagtatctttttcaggccgaagatcgtgatgatatgctgggatggatacgggctatcagagagaattctagggccgagggggaggatcccggttgcgctaatcaggccctgatatccaaaaagctcaatgactatcggaaggtatctcactcctctggaccaaaggcagattctagcccaaaaggctctcgcggtttagggggtcttaaatctgaattcttaaagcagtctgcagcaagaggtcttaggacacaggacttgccagcaggctccaaggacgattctgcagcggcacctaagacgccctgggggatcaacatcattaagaagaacaaaaaagctgcgcctcgggcatttggcgtcaggctggaagaatgccagccagccaccgaaaatcagcgggttcccctcatagttgctgcctgttgccgtatagtggaagcacggggactggagtcaaccggcatctacagagtacctggcaataacgctgtggtctcctcactccaggaacaactgaatcgcggtccaggagacatcaacctgcaggacgagagatggcaagacctgaatgtgatctctagcttactgaaatcattctttcggaagcttccggagcctctgtttacagacgacaagtataacgacttcatcgaagccaaccgtatcgaggatgcaagggagaggatgcgcacccttaggaaattgattcgcgacctgccaggacactactatgagaccctaaaattcttggtgggacacctgaagacaatagcagatcatagcgagaagaataaaatggagcctcgtaacttggccctggtgtttggtcctacactggtcagaaccagcgaagacaatatgaccgacatggtcacccatatgcccgataggtataagattgtggagacactgatacaacacagcgattggttcttctctgatgaggaggataagggcgagcgcacaccagtcggggataaagaaccgcaagctgtgcccaatatcgagtatctgttaccaaacataggcaggacagtgccacccggtgatccagggagtgctgacctgcttgaaatatag

SEQ ID NO: 294566 - DNA, 5929 bp, Artificial Sequence
  derived and/or modified sequence
ctgccacccgatgaatggagtcgccttctgcctggtcgggatcccgccccgcccggagccccggcccccacagctgccactgggcccaagagatgggtgctctcctaggcgccccttcccctggcaggggccgaggacgctgctgctgtacaaaagtccccaggacggctttggcttcactctgcgccacttcatcgtgtacccacccgagtcggccgtgcactgcagcctgaaggaggaagagaatggaggccgtggaggaggaccctccccccggtaccgcctggagcccatggacaccatctttgtcaagaatgtgaaggaagacggccctgcccatagggcggggcttcgcacaggagaccggctggtaaaggtgaatggggaaagcgtcattgggaagacctactctcaggtcatagctctgatccagaatagtgatgacactctggagctgtctatcatgcccaaggacgaggacatcctccagctggcctactcccaggatgcctacctgaaagggaacgagccgtattctggagaggcccgcagcatcccagagccaccgccgatctgctacccccgcaagacctacgcccctcctgcccgggcctccaccagggccactatggtgcctgagcccacctcagcactgcccagtgacccccggagtcctgctgcctggagtgacccggggctccgtgtgccacctgctgcccgtgcccacctggacaactcttccttggggatgagccagccccgccccagccctggtgccttcccccacctctcctcggagccccggacgccccgtgccttcccagagcctggcagccgggtgccccccagcagactggagtgccagcaggccttgtcacactggctgtcaaaccaggtaccccgccgggcgggggagagacggtgcccagccatggccccccgggcccgcagcgcctcccaggaccggttggaggaggtggctgccccccgcccgtggccctgctccacctcccaggatgctttgagccagctgggccaggagggctggcaccgagctcgctcagatgactacttgagccgggccacccgttctgccgaggcactggggccaggggcactggtgtcaccccgctttgagcggtgtggctgggcttcccagcgttcgtctgcccgcacccccgcctgcccaactcgggacctgccagggccccaggccccacccccgtctggcctgcagggcctggatgacctcgggtacatcggctaccggagctacagcccatcattccagcgccggaccggcctcctccatgcgctctccttccgggactcaccctttggggggctgcctaccttcaacctggcccagtcccctgcgtcattcccaccagaggcctccgagccacccagggttgtacggccggaacccagcacccgggccctggagcctcctgcggaggatcgcggcgatgaggtggtcctgaggcagaagcccccgacgggccgcaaggttcagctgacccccgcaagacagatgaaccttggatttggtgacgagtccccagagccagaggccagtgggcgaggggaacgcctgggcaggaaggtggcccctttggccaccaccgaagactctctggcttccatcccctttattgatgagcccaccagccccagcattgacctccaagccaagcacgtccctgcctctgctgtggtctccagtgccatgaactcagcccctgtcctgggcaccagcccatcttccccgaccttcactttcaccctcggacgccattactcgcaggactgcagcagcatcaaggctggccgccgctcctcctacctgctggccatcaccacggagcgctccaagtcctgcgatgatggactcaacaccttccgcgacgagggccgggttctgcggcgcctgccaaaccgcatacccagcctgcggatgctccggagcttcttcaccgacgggtccttggatagctggggcacctctgaagatgctgacgctccttctaagcgacactcaacctctgacctctcagatgcgaccttcagcgatatcaggagagaaggctggttgtattataagcagattctcaccaagaaggggaagaaagcgggcagcggcctgcgccagtggaagcgggtgtacgccgcgctgcgggcgcgctcgctctcgctgagcaaggagcggcgggagcccgggccggcggcggcgggggctgcggcggccggcgcaggtgaggacgaggcggcgcccgtctgcatcggctcctgcctcgtggacatctcctacagcgagaccaagaggaggcacgtgttccggctgaccaccgctgacttctgtgaatatctctttcaggctgaggaccgggatgacatgctgggctggatcagagcgatccgggagaacagcagggccgagggcgaggaccccggctgtgccaaccaagctctgatcagcaagaagcttaacgattatcgcaaagtgagccatagctctgggcccaaagctgattcctcccccaaaggctctcgcggcctggggggcctcaagtctgagttcctcaagcagagtgcggcacgtggcctcaggactcaggacctgcccgcagggagcaaggatgacagtgctgcagcccccaaaaccccctggggcatcaacatcatcaagaaaaataagaaggccgctccgagggcgtttggggtcaggctggaggagtgccagccagccacggagaaccagcgcgtccccttaatcgtggctgcatgctgtcgcattgtggaggcacgagggctggagtccacaggcatttaccgagtgcccggcaacaatgcagtggtgtccagcctacaggagcagctcaaccgcgggcctggtgacatcaacctgcaggatgagcgctggcaagacctcaatgtgatcagcagcctgctcaagtccttcttccgaaagctgcccgagcctcttttcactgatgacaaatacaacgacttcatcgaggccaaccgcattgaggacgcacgggagcgaatgaggacgctgcggaagctgatccgggatctcccaggacactactatgaaacgctcaaattccttgtgggccatctcaagaccatcgctgaccactctgagaaaaacaagatggaaccccggaacctggccctggtctttgggccgacactggtgaggacgtctgaggacaacatgacagacatggtgacccacatgcctgaccgctacaagatcgtggagacactgatccagcactcagactggttcttcagtgacgaagaggacaagggagagagaacccctgtgggcgacaaggagcctcaggcagtgcccaacattgagtacctcctgcccaacattggcaggacagtgccccctggcgacccggggtcagcggacctgttggagatttaaaggattctaccacctgtagttcagccaagtccaagggttcgtgggcccccaagaaggagccgtacgcccgggagatgctggcgatctccttcatctcggccgtcaaccgcaagcgcaagaagcggcgggaggcgcgggggctgggcagcagcaccgacgacgactcggagcaggaggcgcacaagcctggggcgggggccacagcgccggggactcaggagcggccgcaggggccgctgcctggcgccgtcgcccccgaggcccccggacgcctcagtcccccggcggcgccggaggagcggccggccgcggacacgcgctccattgtgtcgggctactccaccctgtccaccatggaccgcagcgtgtgctcgggcgctagcggtcggcgggcaggggcgggggatgaggcggacgacgagcgtagcgagctgagccacgtggagacggacactgagggcgcggcgggcgcggggcctggggggcgcctgacacgccggccgtccttcagctcgcaccacctcatgccctgcgacactctggcgcgccgccgcctggcccggggccgcccagacggcgagggcgcgggccggggcggtccccgcgccccggagccgcccggctcggcgtcgtccagcagccaggagtcgctgcggcccccggcggcggcgctggcctcccggccctcgcgcatggaggcgctgcgtctaaggctccgcggcacggcggacgacatgctcgccgtgcgcctgcggcggccgctgtcgcccgagacccggcggcgccggagcagctggcgccgccacaccgtggtggtgcagagcccgctgactgacctcaacttcaacgagtggaaggagctgggcggagggggccccccggagcctgcgggcgcgcgggcgcacagtgacaacaaggactccggactcagcagcctggagtccaccaaggcgcgggccccgtcgtccgctgcctcgcagccgcccgcgcccggggacacggggtccctgcagagccagcccccgcgccgctcggccgcctcccgcctgcatcagtgtctgtgatccccacctcccgcgccgctcgggcgccacccctccctagagcccctttggaaccaggaggcttcaccagcctgcacctcctcttctgtggcccctgggtgcatggtgtgggtggagggcgcagcaggcagtgtctctagttggtgtgctggaactggcagggcagaggagaaggctggggccggactaattgaatggaagggggttccagaggtgatgagcagaagaggagggggcgtgggctgctggggtctgtgtccctgcacacatgcgcccgataggtccttctgagcctttctgtggctgcacttggggacccttgtggaccatggggtgtggctagggaacccctaagtttcagactaaaggaaagatcctgggtgatgctggctttttgcttctttcttctgccctcccacctcagcttgtaagcggggatgtgtgtatgtctggggagaggaggtgtagggtgcgtatgtccatggggggaggggcttgtgtgtgcagtcattgtcccaaggtgtttccagtagcgacttctgtccccctatccccaccctggtccccactttgcgcccccgggctccctgcctttggtgcacacaggatcctgcccgccccccttgccagagccagagaagggggttggggccattccaaggaggcaggactgaaaccctcaccagggttactccccaacatccttttgcctgagtcaccctctaagcgctttaaccacgggcagctgcctgttccccagacagtttttggtggggggggtccagggtcccccttgctggtacctccctcacccctctttttgtttttccatctgtgcctgttccttccacagcccaggcacacagaagcccaccttcttccccttaggaggagggatagtcaacacccctgctgtctctctgtcactcacacactgatttatggggtctgagctgggctgttcctgcaggatggacaggacccagcgccctcttctccccacaggctgtaaatagacttccaatcaccaggccagcccccacacaccctcactcattccagggaagcccaggtaggtggtgaacccgctgccacgtctatcagtcctcttgttttatgcaaagatttactgtaaagtagatttctttccctccctcccccattcttttattgtaaatattgtctctaaatgtgtaacatattataaagaatttataaggatttttaaagatgttttgctcatttacaaaagtgttgtaacagtgttggacaaagccttccaccccatgtccgcatggctcctttcactgtgtccttgacacacctctctggcaacaactaaaatttcctgcttctgaaaagtcctgtcttaaaagtacagtctatatcttggaaataaatagctttcctcaaggcatga

SEQ ID NO: 294567 - DNA, 3435 bp, Artificial Sequence
  derived and/or modified sequence
atgaacggcgtggccttctgcctggtgggcatcccccccagacccgagcccagacccccccagctgcccctgggccccagagacggctgcagccccagaagacccttcccctggcagggccccagaaccctgctgctgtacaagagcccccaggacggcttcggcttcaccctgagacacttcatcgtgtacccccccgagagcgccgtgcactgcagcctgaaggaggaggagaacggcggcagaggcggcggccccagccccagatacagactggagcccatggacaccatcttcgtgaagaacgtgaaggaggacggccccgcccacagagccggcctgagaaccggcgacagactggtgaaggtgaacggcgagagcgtgatcggcaagacctacagccaggtgatcgccctgatccagaacagcgacgacaccctggagctgagcatcatgcccaaggacgaggacatcctgcagctggcctacagccaggacgcctacctgaagggcaacgagccctacagcggcgaggccagaagcatccccgagcccccccccatctgctaccccagaaagacctacgccccccccgccagagccagcaccagagccaccatggtgcccgagcccaccagcgccctgcccagcgaccccagaagccccgccgcctggagcgaccccggcctgagagtgccccccgccgccagagcccacctggacaacagcagcctgggcatgagccagcccagacccagccccggcgccttcccccacctgagcagcgagcccagaacccccagagccttccccgagcccggcagcagagtgccccccagcagactggagtgccagcaggccctgagccactggctgagcaaccaggtgcccagaagagccggcgagagaagatgccccgccatggcccccagagccagaagcgccagccaggacagactggaggaggtggccgcccccagaccctggccctgcagcaccagccaggacgccctgagccagctgggccaggagggctggcacagagccagaagcgacgactacctgagcagagccaccagaagcgccgaggccctgggccccggcgccctggtgagccccagattcgagagatgcggctgggccagccagagaagcagcgccagaacccccgcctgccccaccagagacctgcccggcccccaggcccccccccccagcggcctgcagggcctggacgacctgggctacatcggctacagaagctacagccccagcttccagagaagaaccggcctgctgcacgccctgagcttcagagacagccccttcggcggcctgcccaccttcaacctggcccagagccccgccagcttcccccccgaggccagcgagccccccagagtggtgagacccgagcccagcaccagagccctggagccccccgccgaggacagaggcgacgaggtggtgctgagacagaagccccccaccggcagaaaggtgcagctgacccccgccagacagatgaacctgggcttcggcgacgagagccccgagcccgaggccagcggcagaggcgagagactgggcagaaaggtggcccccctggccaccaccgaggacagcctggccagcatccccttcatcgacgagcccaccagccccagcatcgacctgcaggccaagcacgtgcccgccagcgccgtggtgagcagcgccatgaacagcgcccccgtgctgggcaccagccccagcagccccaccttcaccttcaccctgggcagacactacagccaggactgcagcagcatcaaggccggcagaagaagcagctacctgctggccatcaccaccgagagaagcaagagctgcgacgacggcctgaacaccttcagagacgagggcagagtgctgagaagactgcccaacagaatccccagcctgagaatgctgagaagcttcttcaccgacggcagcctggacagctggggcaccagcgaggacgccgacgcccccagcaagagacacagcaccagcgacctgagcgacgccaccttcagcgacatcagaagagagggctggctgtactacaagcagatcctgaccaagaagggcaagaaggccggcagcggcctgagacagtggaagagagtgtacgccgccctgagagccagaagcctgagcctgagcaaggagagaagagagcccggccccgccgccgccggcgccgccgccgccggcgccggcgaggacgaggccgcccccgtgtgcatcggcagctgcctggtggacatcagctacagcgagaccaagagaagacacgtgttcagactgaccaccgccgacttctgcgagtacctgttccaggccgaggacagagacgacatgctgggctggatcagagccatcagagagaacagcagagccgagggcgaggaccccggctgcgccaaccaggccctgatcagcaagaagctgaacgactacagaaaggtgagccacagcagcggccccaaggccgacagcagccccaagggcagcagaggcctgggcggcctgaagagcgagttcctgaagcagagcgccgccagaggcctgagaacccaggacctgcccgccggcagcaaggacgacagcgccgccgcccccaagaccccctggggcatcaacatcatcaagaagaacaagaaggccgcccccagagccttcggcgtgagactggaggagtgccagcccgccaccgagaaccagagagtgcccctgatcgtggccgcctgctgcagaatcgtggaggccagaggcctggagagcaccggcatctacagagtgcccggcaacaacgccgtggtgagcagcctgcaggagcagctgaacagaggccccggcgacatcaacctgcaggacgagagatggcaggacctgaacgtgatcagcagcctgctgaagagcttcttcagaaagctgcccgagcccctgttcaccgacgacaagtacaacgacttcatcgaggccaacagaatcgaggacgccagagagagaatgagaaccctgagaaagctgatcagagacctgcccggccactactacgagaccctgaagttcctggtgggccacctgaagaccatcgccgaccacagcgagaagaacaagatggagcccagaaacctggccctggtgttcggccccaccctggtgagaaccagcgaggacaacatgaccgacatggtgacccacatgcccgacagatacaagatcgtggagaccctgatccagcacagcgactggttcttcagcgacgaggaggacaagggcgagagaacccccgtgggcgacaaggagccccaggccgtgcccaacatcgagtacctgctgcccaacatcggcagaaccgtgccccccggcgaccccggcagcgccgacctgctggagatctag

SEQ ID NO: 294568 - protein, 320 aa, Artificial Sequence
  derived and/or modified sequence
MVGYDPKPDGRNNTKFQVAVAGSVSGLVTRALISPFDVIKIRFQLQHERLSRSDPSAKYHGILQASRQILQEEGPTAFWKGHVPAQILSIGYGAVQFLSFEMLTELVHRGSVYDAREFSVHFVCGGLAACMATLTVHPVDVLRTRFAAQGEPKVYNTLRHAVGTMYRSEGPQVFYKGLAPTLIAIFPYAGLQFSCYSSLKHLYKWAIPAEGKKNENLQNLLCGSGAGVISKTLTYPLDLFKKRLQVGGFEHARAAFGQVRRYKGLMDCAKQVLQKEGALGFFKGLSPSLLKAALSTGFMFFSYEFFCNVFHCMNRTASQR

SEQ ID NO: 294569 - protein, 263 aa, Artificial Sequence
  derived and/or modified sequence
MVGYDPKPDGRNNTKFQVAVAGSVSGLVTRALISPFDVIKIRFQLQHERLSRSDPSAKYHGILQASRQILQEEGPTAFWKGHVPAQILSIGYGAVQVYNTLRHAVGTMYRSEGPQVFYKGLAPTLIAIFPYAGLQFSCYSSLKHLYKWAIPAEGKKNENLQNLLCGSGAGVISKTLTYPLDLFKKRLQVGGFEHARAAFGQVRRYKGLMDCAKQVLQKEGALGFFKGLSPSLLKAALSTGFMFFSYEFFCNVFHCMNRTASQR

SEQ ID NO: 294570 - DNA, 963 bp, Artificial Sequence
  derived and/or modified sequence
atggtgggctatgaccctaaaccggacgggaggaataacactaagtttcaggtggctgtggccggctctgtatctggactcgtcaccagggcgctgatttcgccctttgacgtgataaagattaggttccagctgcagcatgagcgactatcacgatccgaccctagcgccaagtatcacgggatcctccaggcatcaaggcagatccttcaagaagaagggccaaccgcattctggaaaggccacgtaccagcccagatcctttcaatcggatacggcgctgttcaatttctcagcttcgaaatgcttacagagctcgttcaccggggcagtgtttacgatgcccgcgagttctccgtccatttcgtgtgcggcgggctagctgcctgtatggccaccttaacagtgcatcctgttgacgtcttacggacacgattcgccgctcagggtgaaccgaaggtatataacacattgaggcatgcagttgggacaatgtacagatccgagggtcctcaggtgttctataaggggttggcccccacgcttatcgctatcttcccgtatgccggcctccagtttagttgctacagctcacttaagcatctgtacaaatgggccatccctgccgaagggaaaaagaacgaaaatttacaaaacctgctgtgtggaagcggcgcaggggtcatctcaaaaaccctcacttatccactggatctgtttaaaaagaggctccaggttggtgggtttgaacacgctagagccgcattcggccaggtgagaaggtacaagggactcatggactgtgcaaaacaagtccttcaaaaagaaggtgctctcggatttttcaagggtctatcaccttcccttcttaaagcagccctttctacagggttcatgttttttagctacgagtttttctgcaacgtgttccattgtatgaatagaactgcttctcagcgttag

SEQ ID NO: 294571 - DNA, 963 bp, Artificial Sequence
  derived and/or modified sequence
atggtgggatatgatccaaagccagacggcaggaataacactaaatttcaagtggctgtggcgggaagtgtcagtggtttggtcacacgcgctcttatctcaccgttcgacgtgatcaaaatcagattccaactgcagcatgaacgactttcccgttccgacccatccgcaaagtatcacggaatcttacaggcctcgcgacaaatccttcaggaggagggaccgaccgctttctggaaaggacacgtgccagcacagatcctgtcaataggctacggtgccgtgcagttcctgtcattcgagatgctgactgagctcgttcacagaggcagcgtttatgacgctcgggagttcagcgtacactttgtgtgcggcgggttggccgcctgcatggctactctgacggtgcacccagtagacgtgctccgcacgaggttcgccgcacagggcgagcccaaagtatataacactttgcggcatgccgtcggtactatgtatagatctgaagggcctcaagtgttctacaaagggctggccccaacacttattgccatttttccctatgccggcctgcagttcagttgctatagtagtctgaagcatctctacaagtgggctataccagccgaaggcaagaagaatgaaaacttgcagaacttgctttgcggaagcggggcaggtgtgatttctaagaccctcacttatcctctggacctgttcaaaaaaagactgcaggtaggaggctttgagcacgccagggccgcatttgggcaggttaggcggtataaagggctgatggactgcgctaagcaggtgcttcagaaagaaggggccttgggattcttcaagggcctctctccttctctgttgaaagcagccttaagcacaggcttcatgttcttctcttatgaatttttttgcaacgtcttccactgcatgaatcgtactgcgtcacagcgttag

SEQ ID NO: 294572 - DNA, 792 bp, Artificial Sequence
  derived and/or modified sequence
atggttggttacgatccgaaaccggacgggagaaacaacacaaaattccaggtggcagtcgctggctctgtcagtggcctcgtgactcgtgcactcatatccccttttgacgtgatcaagattagatttcagctgcagcacgaacgtctgagtaggtccgaccccagcgcaaagtatcacggaattctgcaggccagccgccaaatcttacaggaagaaggccccacggcattttggaaggggcacgtccccgcccagatcctcagtattggatatggagccgttcaggtgtataatactttgcgtcatgcagtgggcacgatgtacaggagcgaaggcccccaggtcttttacaaggggctggcccctaccctgattgccatcttcccgtacgccggactccagttttcttgctattcatcattgaaacacctctataagtgggccattccggccgagggcaagaaaaatgagaacctacagaacctactgtgtggatccggagccggagtgatttccaaaacgctcacatacccactggacctcttcaagaagcggctgcaggtgggaggtttcgaacatgctagggccgcatttggacaggtccgaagatataagggtctgatggattgcgcaaaacaagtgctgcagaaagaaggcgctcttggcttctttaagggcctgtccccctcattgctcaaagccgccctgagcacagggttcatgttcttctcatatgaattcttttgcaatgtttttcactgtatgaatcggacagccagtcagcgctag

SEQ ID NO: 294573 - DNA, 963 bp, Artificial Sequence
  derived and/or modified sequence
atggtcggatatgatccgaaacccgatggacgaaacaacacaaagtttcaagttgcggtggcaggcagcgtatccggactggtaacccgcgctctcatctcacctttcgatgtgatcaaaatcagattccagctgcagcacgaacggctatcaaggagcgacccgtctgctaaataccacgggattttgcaggcttctcgccagatcttacaggaagagggccccacagccttctggaaaggacatgtgcccgcacagatcctgagtatcggatacggagctgttcagtttctgagcttcgaaatgctcacagaacttgtccatcgaggaagcgtatacgacgctcgcgaattcagcgtccacttcgtttgtgggggacttgcagcatgtatggctacgttgacggtgcatcccgtggatgttctcaggactcgcttcgctgcgcagggtgagcccaaagtgtataatacactgcgacatgcagtcggcaccatgtatagaagtgaaggcccccaggttttctacaagggactggcccccacgctgatcgcaatattcccttacgcgggtctgcagttcagttgttacagctctctcaagcatctgtacaaatgggctatccctgccgagggcaaaaaaaacgaaaatttacagaacctgctttgtggtagcggcgcgggcgtaattagtaagaccctgacgtacccattagacttgttcaaaaagaggctgcaggtgggtggatttgaacacgctcgcgctgcattcggacaggttcgaaggtataaaggcctaatggactgtgcaaaacaggtgctgcagaaggagggggcattgggtttcttcaaaggtctgtcaccttctttgctgaaagccgccctctccactgggtttatgttcttctcctatgaatttttctgcaacgtattccactgcatgaacaggaccgcttcccagagatag

SEQ ID NO: 294574 - DNA, 963 bp, Artificial Sequence
  derived and/or modified sequence
atggtcgggtacgaccccaaacctgatgggaggaataatacaaagttccaggtcgcagtagcgggatccgtcagtggccttgtgactcgagcgctgatttcaccattcgacgttataaaaatccggttccagcttcagcacgaacggctgtcccgctccgacccaagtgctaagtatcacgggatcctacaagcatccaggcagatcctccaggaggaggggccaacagcattttggaaaggccacgttcctgctcagatcctgtccattggctacggggccgtccagttcctttcattcgaaatgctcactgaactcgtccaccggggctctgtgtacgatgctcgggaattcagtgtacacttcgtgtgcgggggccttgctgcgtgcatggctaccctcacagtgcacccagtggatgtcctgcgaacacgttttgccgcccaaggcgagccaaaagtatacaataccctgagacacgccgtcggcacaatgtatcgctccgaaggcccccaggtcttctacaagggacttgcgcccacgcttattgcaattttcccctacgccggacttcaattctcctgttattcatctctaaagcacctgtacaaatgggcaatccctgccgaaggtaaaaagaacgaaaatctgcagaatctgctgtgtggatccggagctggggtgattagcaaaactctgacctatccactggacctattcaagaagcggcttcaagtcgggggcttcgagcacgcccgggcagcctttggccaggtccggcgatataagggcctaatggattgcgcaaagcaggtgctgcagaaggaaggtgctctcggcttctttaagggactctctcccagcttactcaaagccgcgcttagcacgggattcatgttcttctcctatgaatttttctgtaacgtcttccattgtatgaatcggacagcctcccagagatag

SEQ ID NO: 294575 - DNA, 963 bp, Artificial Sequence
  derived and/or modified sequence
atggttggctatgatccgaagccagatgggcggaataatacaaagttccaggtcgccgttgctggctcagtttcaggtcttgttactcgggccctaataagcccctttgacgtgatcaagatccggtttcaactacagcacgaaaggctgtcacggtcagatccgagcgcaaaatatcatggaatcctgcaggcttcccgccagattctacaggaggagggacctactgccttctggaaggggcatgtacccgcccaaatcctctccataggctatggggccgtccagttcctctccttcgagatgttgactgagctggtccaccgaggcagtgtctatgacgctagagagttctccgttcacttcgtctgtggcggcttggccgcttgcatggccaccctgactgttcatcccgtggacgtgctgagaacaaggtttgcggcgcagggagaacccaaagtgtataacactctacgacacgctgtaggcactatgtataggagtgagggcccacaggtgttctacaagggccttgcacccactctgatcgcaatctttccatacgccggactccagttctcctgctattctagtctgaaacacctctacaagtgggctattccggctgagggtaaaaaaaacgagaacttgcagaatctgctttgcgggagtggggctggcgtcatttccaaaactcttacctatccgctggacctcttcaaaaaaagactgcaagtgggcggtttcgaacacgctagggcagccttcgggcaggtgagacggtacaaaggtctcatggattgtgcaaaacaagtgttgcagaaggagggggccctggggtttttcaaaggcctgagtccctccctgctcaaggccgcactgtcaacaggttttatgtttttttcttacgaattcttctgcaatgtgtttcattgcatgaatcgtacagctagccagcgctag

SEQ ID NO: 294576 - DNA, 963 bp, Artificial Sequence
  derived and/or modified sequence
atggtgggctatgaccccaagccagatggaagaaacaacaccaagttccaggtggccgtggccggctctgtgtctggcctggtgacccgggccctgatcagcccctttgatgtgatcaagatccgcttccagctgcagcacgagcggctgagcagaagtgaccccagcgccaagtaccacggcatcctgcaggccagccggcagatcctgcaggaggagggccccacagccttctggaagggccacgtgcctgcccagatcctgagcatcggctacggggctgtgcagttcctgagctttgagatgctgacagagctggtgcaccggggctctgtgtatgatgcccgggagttctctgtgcactttgtgtgtggcggcctggccgcctgcatggccaccctgactgtgcaccctgtggatgtgctgcggaccaggtttgctgcccagggcgagcccaaggtgtacaacaccctgcggcatgctgtgggcaccatgtacagaagtgagggcccccaggtgttctacaagggcctggcccccaccctgattgccatcttcccctatgccggcctgcagttcagctgctacagcagcctgaagcacctgtacaagtgggccatcccagctgagggcaagaagaatgaaaacctgcagaacctgctgtgtggcagcggggccggggtcatcagcaagaccctgacctaccccctggacctcttcaagaagaggctgcaggtgggcggctttgaacatgcccgggccgccttcggccaggtgcggcgctacaagggcctgatggactgtgccaagcaggtgctgcagaaggagggcgccctgggcttcttcaagggcctgagccccagcctgctgaaggccgccctgagcacaggcttcatgttcttctcctatgagttcttctgcaatgtgttccactgcatgaacagaacagccagccagaggtag

SEQ ID NO: 294577 - DNA, 792 bp, Artificial Sequence
  derived and/or modified sequence
atggtgggctatgaccccaagccagatggaagaaacaacaccaagttccaggtggccgtggccggctctgtgtctggcctggtgacccgggccctgatcagcccctttgatgtgatcaagatccgcttccagctgcagcacgagcggctgagcagaagtgaccccagcgccaagtaccacggcatcctgcaggccagccggcagatcctgcaggaggagggccccacagccttctggaagggccacgtgcctgcccagatcctgagcatcggctacggggctgtgcaggtgtacaacaccctgcggcatgctgtgggcaccatgtacagaagtgagggcccccaggtgttctacaagggcctggcccccaccctcatcgccatcttcccctatgccggcctgcagttcagctgctacagcagcctgaagcacctgtacaagtgggccatcccagctgagggcaagaagaatgaaaacctgcagaacctgctgtgtggcagcggggccggggtcatcagcaagaccctgacctaccccctggacctcttcaagaagaggctgcaggtgggcggctttgagcacgcccgggccgccttcggccaggtgcggcgctacaagggcctgatggactgtgccaagcaggtgctgcagaaggagggcgccctgggcttcttcaagggcctgagccccagcctgctgaaggccgccctgagcacaggcttcatgttcttctcctatgagttcttctgcaatgtgttccactgcatgaacagaacagccagccagaggtag

SEQ ID NO: 294578 - DNA, 963 bp, Artificial Sequence
  derived and/or modified sequence
atggtgggctacgaccccaagcccgacggccggaacaacaccaagttccaggttgcagtggcagggagcgtctccggccttgtgacgcgggccctgatttctccttttgacgtgattaaaatccgctttcagctccaacacgagagactatcaagatccgacccatccgcgaaataccatgggattttgcaggccagcaggcaaatcctgcaggaagagggacccactgctttctggaagggccacgtgcctgcgcagatcctctccattggatacggcgcagtgcaattcctctccttcgaaatgctgacggagctggtgcatcggggcagcgtctatgatgctagagagttttctgtgcatttcgtttgtggaggattggcagcctgtatggctactctgactgtccaccccgtggatgtgttacggacgagattcgctgcccagggtgaaccaaaagtttacaatactctccgacatgccgttgggacaatgtaccgctctgagggcccccaggtcttttataagggcttagctcccaccttaatcgctatcttcccttatgccgggcttcagttctcctgctattcctcacttaaacacctttataagtgggccatcccagctgaggggaagaaaaacgaaaatttacagaacttgctgtgtggtagcggggccggcgtcatctctaagaccttgacctatcctctcgatctcttcaaaaaacgccttcaggtggggggtttcgagcacgcgagagccgctttcggtcaggttagaaggtacaaagggctgatggattgtgccaagcaggtgctgcaaaaggaaggggctctcggtttcttcaaaggactgagcccttcactgctcaaagctgctctgtccacaggatttatgttcttttcttacgagttcttttgcaacgtgtttcactgcatgaatagaacagcatcgcagcgatag

SEQ ID NO: 294579 - DNA, 963 bp, Artificial Sequence
  derived and/or modified sequence
atggtgggctacgaccccaagcccgacggccggaacaacaccaagtttcaagtggccgtggccggctctgtctcaggtctggtgacaagagccctgatcagtcccttcgacgttatcaagattcgctttcagctccagcatgaacggctttcaaggagcgacccgagcgccaaatatcatggaatcctccaggcctctaggcagattctccaggaagaaggcccaacagccttctggaagggccacgtgcctgcacagattctgtccatcggttatggggctgtgcagttcctgagcttcgagatgttgaccgagctggttcatagaggatcagtgtacgacgcacgagagtttagcgtacatttcgtgtgtgggggactggccgcatgtatggctaccctcaccgtgcatcctgtcgatgtgctgcgcactaggttcgcagcccagggggagcccaaggtgtacaatacactaaggcacgccgtagggaccatgtaccgctccgagggaccccaagtgttttataaagggctggcgcccacccttattgccatctttccctatgccgggctgcagttctcatgctattctagtctgaagcatctttataaatgggctattccggccgagggtaagaaaaatgaaaatctgcagaacctgctgtgtggtagcggcgccggtgtgatcagcaagaccctgacatatccactggacctgtttaagaagcgcctgcaggtcggcggctttgagcacgccagggcggcttttggacaagtgcggcgctacaagggtctgatggactgcgcaaagcaggtgctgcagaaagagggagcgttagggttctttaaaggcctttcaccaagccttttgaaagccgctctatcaacaggcttcatgttcttttcttacgagttcttctgtaatgtgttccattgcatgaaccgcactgccagccagcgttag

SEQ ID NO: 294580 - DNA, 792 bp, Artificial Sequence
  derived and/or modified sequence
atggtgggctacgaccccaagcccgacggccggaacaacaccaagttccaggtggcagtggccggttccgtgtctgggctggtgacaagggctctgatctcgcccttcgacgtgattaagattcgcttccaactgcagcacgagaggttgagccgcagcgaccctagcgccaaataccatggcatactgcaggcttcacggcagatcctgcaggaggaaggacctacagctttctggaaaggccatgtacccgcacagatcctgtcgatcgggtatggggccgtgcaagtctacaacaccctgcggcatgcagtgggcacaatgtatcggagcgaaggacctcaggttttttataaaggtctggcccccacactcattgccatcttcccttacgccggacttcagttttcttgttatagctctctgaagcatctttataaatgggccatccccgccgaagggaagaagaatgagaatctgcagaacctgctgtgcggtagcggggctggagtcatctcgaaaaccttaacgtatcctttagatctcttcaaaaagcgcctgcaggtgggagggtttgagcatgcgcgtgcagcattcggtcaagtacggagatacaaggggttgatggattgcgccaaacaggtcctgcagaaagagggagccctcggcttctttaaaggactgtccccttctttactcaaggcagctctgtccacggggttcatgttttttagttacgagttcttttgtaacgtgtttcattgtatgaatcgcaccgcctctcagagatag

SEQ ID NO: 294581 - DNA, 963 bp, Artificial Sequence
  derived and/or modified sequence
atggtgggctacgaccccaagcccgacggccggaacaacaccaagttccaagtggccgtggctgggtctgtcagcggcctagtcacaagagctctcattagcccctttgatgtgatcaaaatccgctttcagctgcagcatgaacgattaagccgctctgaccccagcgctaagtatcacggaattttgcaggcgtcgcgccagatactccaggaggagggcccaacagccttttggaagggccacgtccccgcacagattctcagcattgggtacggagcagtgcagttcctgagttttgaaatgttgacggagctcgttcatagaggctctgtctacgacgcccgagagttctctgtgcatttcgtgtgtgggggcttggctgcatgtatggcaacactgacagtgcatccagtagatgtcttgcgcacccgctttgccgctcagggggagcccaaggtgtacaacactctccgtcatgctgttggaactatgtatcgctctgagggccctcaggtgttctataaggggctcgcgcccacactcatagctatcttcccctatgcaggactgcaattcagttgttacagcagccttaaacatctgtataagtgggccatccctgctgagggcaaaaaaaatgaaaatctccagaaccttctctgtggatctggagccggggtgataagtaagaccctgacctatcctctggacttatttaaaaaacggctccaggtgggaggcttcgaacacgcacgagctgcgtttggtcaggtcagacggtataagggcttaatggactgtgccaaacaagtgctacagaaggaaggagctcttggcttctttaagggcctctctccttctcttctaaaggccgccctctcaaccggatttatgttcttctcctacgagttcttctgcaacgtgttccattgcatgaataggactgcctcacagaggtag

SEQ ID NO: 294582 - DNA, 963 bp, Artificial Sequence
  derived and/or modified sequence
atggtgggctacgaccccaagcccgacggccggaacaacaccaagtttcaggtggccgttgctggatccgtgtctggccttgttacaagggctctgatatccccctttgacgtgattaaaatcaggttccagcttcagcacgagcgtctttctaggtcggatccgagcgctaaatatcatgggatcctccaggcaagcagacagatcttgcaagaagaaggccctacagcattttggaagggtcatgtgccggcccaaatcctgtccatcgggtacggcgccgtgcagtttctcagctttgaaatgttgaccgagctcgtccatcgtggaagcgtttacgatgcccgcgagttttccgtacatttcgtttgtggagggctcgcggcctgcatggccaccctcactgttcacccagtggacgttctgaggacgagatttgccgctcagggcgagcctaaggtgtacaacacgttacgtcacgccgttggtacaatgtacaggtccgaagggccccaggtgttctacaagggactcgccccaacgttaatcgccatattcccctacgcaggattacagttttcatgttattcctccctcaaacatctctacaagtgggctatccccgcagaaggaaagaagaacgagaatctgcagaatctgctctgcggcagcggggcgggcgtgatttccaagacgctgacttatccactggacctcttcaaaaaacggctgcaggttggcggttttgaacatgcccgtgccgcatttgggcaggtcagacgatataaaggcctcatggattgtgccaaacaggtgctccagaaagaaggcgcactgggtttcttcaaggggctgtcaccaagtctcctgaaagcagcactgtccacaggattcatgttcttcagttatgagtttttttgtaatgtgtttcactgcatgaataggacagcatctcaaagatag

SEQ ID NO: 294583 - DNA, 963 bp, Artificial Sequence
  derived and/or modified sequence
atggtgggctacgaccccaagcccgacggccggaacaacaccaagtttcaggtagcagtggcaggttctgtgtccggcctggtgacgcgcgctttaatcagtccatttgatgtgataaaaattcgctttcaactacagcacgagagactcagcagaagcgacccttccgctaagtaccacggcatcctccaggcgtctagacaaatccttcaagaggagggacctacggctttctggaaggggcacgtgcctgcacagatccttagtatcggatatggagccgttcagttcctgtccttcgagatgttgactgagctggtgcatcggggctccgtctatgatgcccgggaattcagcgtgcattttgtctgtgggggtctggccgcgtgcatggccactttaacagtgcaccccgtggatgtgttgagaacaaggtttgccgcccaaggggagcccaaggtctacaacacgctgagacatgctgtcggaaccatgtaccggtctgagggtccacaagtgttctacaaaggcctggcgcctaccttaatcgcaatcttcccttacgcaggactgcagttctcctgttactcttccctgaagcacctatacaaatgggccatccccgccgaaggaaaaaagaatgaaaacctgcagaacctgctgtgcgggtcaggcgccggggttatctccaaaactctcacttaccctcttgacctgtttaagaagcgtctgcaggtgggaggctttgagcacgctagagctgcttttggacaagtgagacggtacaaggggctgatggattgcgctaaacaggtgcttcagaaagaaggcgctctgggcttctttaaaggcctcagtcccagcctgcttaaagccgccctgagcacgggattcatgttcttttcctacgagtttttctgtaatgtgttccactgtatgaaccgcaccgcatcccagaggtag

SEQ ID NO: 294584 - DNA, 963 bp, Artificial Sequence
  derived and/or modified sequence
atggtgggatacgacccaaagccagatgggaggaataacaccaagttccaggtcgccgtggccggaagcgtcagcgggctggtcacccgtgccctcatctcacccttcgatgttattaaaattcgctttcagcttcagcacgaacgccttagccgcagcgatccaagtgccaagtatcacgggattttgcaggcaagccggcagatactgcaggaagaaggaccaacagctttctggaaggggcacgtcccagctcaaattctgtctattggttatggggctgtccaatttctaagttttgagatgcttacagaactcgtgcacaggggatcagtttacgacgcccgtgaattctcagtccatttcgtgtgtgggggattggctgcttgtatggctacgctgactgtgcacccagtggatgtactgaggaccagattcgccgctcagggagagccaaaggtgtacaataccctcaggcacgcagtgggcactatgtataggtctgaagggcctcaggtgttctacaagggcctggctcccacactcatcgctatctttccctatgctgggctgcagttctcatgttactccagtctgaagcacctctataagtgggctattccagctgaaggcaaaaagaacgagaacctgcagaacttgttgtgcggcagtggggctggggtgatctctaagacactaacctacccactcgacttattcaaaaaacgcctgcaggtgggtggattcgagcatgcccgagctgcgttcggacaagtgagacggtataaagggttgatggactgcgcaaaacaagttctccagaaggaaggcgcactgggttttttcaaagggctgagtccttctctgctcaaagctgcgctctcgaccgggtttatgtttttttcctacgagttcttttgtaacgtgttccattgtatgaatcgaacagctagtcagagatag

SEQ ID NO: 294585 - DNA, 963 bp, Artificial Sequence
  derived and/or modified sequence
atggtgggatacgaccccaagcccgatggcaggaataataccaaatttcaggttgctgtcgctggcagcgtgtccgggctggtgactagagcactcattagccctttcgatgtcataaagatccgcttccagctccagcacgaaaggctgtctcgcagcgaccctagcgcaaaatatcatggcatcctgcaggccagccggcaaatactgcaggaggagggcccaactgccttttggaaaggccacgtcccagcccagatcttatcaattggctatggcgctgtacagtttttgagctttgagatgctcaccgagctcgtccatagagggtccgtctacgacgccagagaattttctgtgcactttgtatgtgggggactcgcggcatgcatggctaccttaacagtgcacccagtggatgtgctccgcacccgcttcgccgctcagggcgagcccaaggtgtataacacactgagacacgctgtcggcaccatgtacaggagcgaaggcccacaggtgttctacaagggattggcaccaactctgatcgcaattttcccatatgcaggtttgcagttcagctgttactcctcacttaaacacctttataagtgggcaatccctgctgaaggaaaaaaaaatgagaacctccagaaccttctgtgcggttcgggggcaggagtgatctctaagactttaacatacccactcgacctctttaaaaaacggctacaggtcggcggattcgagcacgctcgcgctgcctttggccaggttcgccgttataagggcctaatggattgcgccaagcaagttcttcaaaaagaaggagcactcggattttttaaaggattgtctccttctctgttaaaagccgcactctccactgggttcatgtttttctcctatgaattcttttgtaatgtttttcactgtatgaatagaaccgccagtcagcggtag

SEQ ID NO: 294586 - DNA, 792 bp, Artificial Sequence
  derived and/or modified sequence
atggtaggctacgacccaaagccggacgggcgaaataacactaagtttcaggtggccgtggccggaagtgtgtctggcctggtcaccagagcactgatctcccctttcgatgtcattaaaatccgttttcagctgcagcatgaaagattaagcagatccgaccccagtgcaaagtaccatggcatattgcaagccagcagacaaatcttgcaggaggagggtcctacagctttctggaagggtcacgttcccgctcagatactgagtatcggctatggagcagtgcaggtttacaataccctgcggcacgcggtcggcaccatgtataggagcgaggggccacaggtgttttataaaggactcgccccaaccctcatagctatctttccttacgccggtttacaattcagttgctactcatccctgaagcacctttacaagtgggctattccagcagaaggcaaaaaaaacgagaacctgcagaatctcttatgcgggtccggagctggggtgatttctaagaccctgacttatcctcttgacctgttcaaaaagcggcttcaggttgggggatttgagcatgccagagctgcctttggtcaggttaggcggtacaagggccttatggactgcgccaagcaggttctgcagaaggaaggagctctcggattctttaagggcctgtcgccatctctgctgaaagctgcgctaagtaccggtttcatgttttttagctatgaatttttttgcaatgtcttccactgtatgaatagaacggcatcacagcgctag

SEQ ID NO: 294587 - DNA, 963 bp, Artificial Sequence
  derived and/or modified sequence
atggtaggctacgatcccaagcctgatggtcgaaataacactaagttccaggtagccgttgcaggttccgtgtccgggctggtgacacgggcacttatctcaccctttgatgtaatcaagattagattccagttacaacatgagcggttgagcaggtctgatccaagcgccaaatatcacggcattcttcaagcttcccggcagattctccaggaagaaggtcctaccgccttctggaagggccacgtaccggctcagattctctccatcggatacggggcagtgcaattcctgtctttcgaaatgctgactgaactcgtgcacaggggaagcgtttacgacgccagagagttcagcgtgcacttcgtgtgtggtgggctggcagcctgtatggccaccctgaccgttcacccagtcgacgtgctccgtactagattcgctgcccaaggtgaacctaaagtgtacaacactctgcgtcatgcggtggggaccatgtaccgtagcgagggcccacaggtgttctacaaaggcctcgcccctaccttgatcgcgatctttccgtacgcgggtctccagttctcatgttattcctctcttaagcacctgtataaatgggcgatccctgcagagggaaagaaaaatgagaacctgcagaatctgctgtgcggttctggcgctggagttatctcaaagacactgacatacccactggacctgttcaaaaaaaggctccaggtaggaggattcgaacacgcaagggcggcatttgggcaggtgaggagatataagggtttaatggattgcgccaaacaggttttacaaaaggagggcgctctggggttcttcaaagggctgagcccctctttgcttaaggccgcactgtcaaccggcttcatgttcttctcctatgagttcttctgcaacgtgtttcattgtatgaaccgcaccgcaagtcagcgctag

SEQ ID NO: 294588 - DNA, 963 bp, Artificial Sequence
  derived and/or modified sequence
atggtaggatacgaccctaaacctgacggaaggaacaatactaagtttcaggtagccgtggccggatctgtctccggtttggttacccgggctctcatctcgcctttcgacgtcataaagatccgcttccagctccagcatgagaggctgtcccggtcagacccctcggccaaatatcacggcattctgcaagcctcacggcagatcctccaggaggagggccctacggcattctggaagggtcacgtgcctgcccagatcctctccatcggatatggtgcggtccaatttttaagcttcgaaatgctcacagaactggtccaccggggttccgtttatgatgctagagaattcagcgtgcacttcgtctgtggaggactagccgcatgtatggccacattgaccgtgcatcccgtggacgtgctgcgtaccaggtttgctgcacagggcgagccaaaagtctacaataccttgaggcacgccgttggcactatgtacaggtccgaggggcctcaggttttttacaagggcttggccccaacccttatcgcaatcttcccgtatgctggtctgcagttctcgtgttactccagtctcaagcatttatataaatgggcaataccagccgaaggcaaaaaaaatgaaaatctgcagaatctcctatgtgggtccggtgccggagtgattagtaagaccctgacctaccctttggatctattcaagaagaggctgcaggtcgggggatttgaacacgcacgggctgccttcgggcaggttcggagatacaaaggtctcatggactgcgccaagcaagtgcttcagaaggaaggcgcactggggttcttcaaaggactcagtccaagtctcctgaaagcggctttgtctacaggattcatgttcttcagctacgagtttttctgtaacgtgtttcactgcatgaacaggacggcaagtcagcggtag

SEQ ID NO: 294589 - DNA, 963 bp, Artificial Sequence
  derived and/or modified sequence
atggtgggctacgaccctaagcctgatggtcggaataataccaagtttcaggtcgccgtcgctggcagtgtgtccggacttgtgactcgggcactcatcagtcctttcgacgtcataaagattaggtttcagctgcagcacgagcgcctgtcaaggagtgatccatctgccaagtaccatgggatcttgcaggcttctcgccagatcctgcaagaggaaggacccacggctttctggaaaggccacgtgcctgcccaaattctatcaatcggatacggggcagttcagtttctgtccttcgagatgctcacggagctggttcatcgcggttccgtctacgacgctcgcgaattttctgttcatttcgtatgcggcggtctggcggcatgcatggctacattgacagtgcacccggttgacgtattacgcacgcggttcgcggctcagggagaaccgaaagtatacaatacactgagacatgctgtgggtactatgtaccgcagcgaaggccctcaggtattctacaagggtctcgctcccacccttatcgcgatattcccctacgccggtctacaattttcctgctactcctccctgaaacacttgtacaaatgggctattcctgctgagggcaaaaagaacgaaaatcttcaaaatctgctctgcgggtctggagccggtgtgattagcaagacactgacatatcctttggatttgtttaagaagcgcctgcaagtgggcggatttgagcacgcaagggccgctttcggtcaggtgcggaggtacaaaggcttgatggactgcgccaaacaagtgctccagaaggagggggctctcggtttttttaagggcctgagtcctagcctcctaaaggcagccctcagtaccggttttatgtttttcagctacgaattcttttgtaacgtgtttcattgcatgaatagaacagcaagtcagcgctag

SEQ ID NO: 294590 - DNA, 1554 bp, Artificial Sequence
  derived and/or modified sequence
tgcgcgaggagctagagagagcggagagcgctgagccgggccgcacccgccgagccgtgaaaaaagtacatctcctggaagggatgctttttagctgagctctggtggatgagaggagctagccttgaaaaacttgatactgatggacattgtgtgggccagaggcagggatggttggctatgaccccaaaccagatggcaggaataacaccaagttccaggtggcagtggctgggtctgtgtctggacttgttactcgggcgctgatcagtcccttcgacgtcatcaagatccgtttccagcttcagcatgagcgcctgtctcgcagtgaccccagcgcaaagtaccatggcatcctccaggcctctaggcagattctgcaggaggagggtccgacagctttctggaaaggacacgtcccagctcagattctctccataggctatggagctgtccaattcttgtcatttgaaatgctgacggagctggtccacagaggcagcgtgtatgacgcccgggaattctcagtgcactttgtatgtggtggcctggctgcctgtatggccaccctcactgtgcaccccgtggatgttctgcgcacccgctttgcagctcagggtgagcccaaggtctataatacgctgcgccacgccgtggggaccatgtataggagcgaaggcccccaggttttctacaaaggcttggctcccaccttgatcgccatcttcccctacgccgggctgcagttctcttgctacagctccttgaagcacctgtacaagtgggccataccagccgaaggaaagaaaaatgagaacctccaaaacctgctttgtggcagtggagctggtgtcatcagcaagaccctgacatatccgctggacctcttcaagaagcggctacaggttggagggtttgagcatgccagagctgcctttggccaggtacggagatacaagggcctcatggactgtgccaagcaggtgctgcaaaaggaaggcgccctgggcttcttcaagggcctgtcccccagcttgctgaaggctgccctctccacaggcttcatgttcttctcgtatgaattcttctgtaatgtcttccactgcatgaacaggacagccagccagcgctgagtgcaggaaggaccccaggtcttccctggaggcagcctcctgaaggaaggaagattcagtctccactgagaggtgccgtctggcccttccctgcaggccagctgccccaagcggggtagcagccttgaacccacccagctgggacaccaccagaaggtccagggctctccccatgagagaatcagagggaatgcaggacgtggtctatggtgagccaacgacacagtgagaaggagcaggaagttgctgtttctcctctgaccagcccacactccaaaggaaacagacgccatcctacacctatcagccctgcctgccaggagaacagaacacactcctggtctggatggggctgctgcttgagtgcagagggctgcggtaggccctttgcaggagtcaggtccctacacttggcctgttt

SEQ ID NO: 294591 - DNA, 1651 bp, Artificial Sequence
  derived and/or modified sequence
agtagagttttgctgttaagactgcgcgaggagctagagagagcggagagcgctgagccgggccgcacccgccgagccgtcccttctccctgtgatcagttaccaactacctgttgatgaaaaaagtacatctcctggaagggatgctttttagctgagctctggtggatgagaggagctagccttgaaaaacttgatactgatggacattgtgtgggccagaggcagggatggttggctatgaccccaaaccagatggcaggaataacaccaagttccaggtggcagtggctgggtctgtgtctggacttgttactcgggcgctgatcagtcccttcgacgtcatcaagatccgtttccagcttcagcatgagcgcctgtctcgcagtgaccccagcgcaaagtaccatggcatcctccaggcctctaggcagattctgcaggaggagggtccgacagctttctggaaaggacacgtcccagctcagattctctccataggctatggagctgtccaattcttgtcatttgaaatgctgacggagctggtccacagaggcagcgtgtatgacgcccgggaattctcagtgcactttgtatgtggtggcctggctgcctgtatggccaccctcactgtgcaccccgtggatgttctgcgcacccgctttgcagctcagggtgagcccaaggtctataatacgctgcgccacgccgtggggaccatgtataggagcgaaggcccccaggttttctacaaaggcttggctcccaccttgatcgccatcttcccctacgccgggctgcagttctcttgctacagctccttgaagcacctgtacaagtgggccataccagccgaaggaaagaaaaatgagaacctccaaaacctgctttgtggcagtggagctggtgtcatcagcaagaccctgacatatccgctggacctcttcaagaagcggctacaggttggagggtttgagcatgccagagctgcctttggccaggtacggagatacaagggcctcatggactgtgccaagcaggtgctgcaaaaggaaggcgccctgggcttcttcaagggcctgtcccccagcttgctgaaggctgccctctccacaggcttcatgttcttctcgtatgaattcttctgtaatgtcttccactgcatgaacaggacagccagccagcgctgagtgcaggaaggaccccaggtcttccctggaggcagcctcctgaaggaaggaagattcagtctccactgagaggtgccgtctggcccttccctgcaggccagctgccccaagcggggtagcagccttgaacccacccagctgggacaccaccagaaggtccagggctctccccatgagagaatcagagggaatgcaggacgtggtctatggtgagccaacgacacagtgagaaggagcaggaagttgctgtttctcctctgaccagcccacactccaaaggaaacagacgccatcctacacctatcagccctgcctgccaggagaacagaacacactcctggtctggatggggctgctgcttgagtgcagagggctgcggtaggccctttgcaggagtcaggtccctacacttggcctgtttttccaacctatttaatagacattaaagctaaacacac

SEQ ID NO: 294592 - DNA, 792 bp, Artificial Sequence
  derived and/or modified sequence
atggttggctatgaccccaaaccagatggcaggaataacaccaagttccaggtggcagtggctgggtctgtgtctggacttgttactcgggcgctgatcagtcccttcgacgtcatcaagatccgtttccagcttcagcatgagcgcctgtctcgcagtgaccccagcgcaaagtaccatggcatcctccaggcctctaggcagattctgcaggaggagggtccgacagctttctggaaaggacacgtcccagctcagattctctccataggctatggagctgtccaagtctataatacgctgcgccacgccgtggggaccatgtataggagcgaaggcccccaggttttctacaaaggcttggctcccaccttgatcgccatcttcccctacgccgggctgcagttctcttgctacagctccttgaagcacctgtacaagtgggccataccagccgaaggaaagaaaaatgagaacctccaaaacctgctttgtggcagtggagctggtgtcatcagcaagaccctgacatatccgctggacctcttcaagaagcggctacaggttggagggtttgagcatgccagagctgcctttggccaggtacggagatacaagggcctcatggactgtgccaagcaggtgctgcaaaaggaaggcgccctgggcttcttcaagggcctgtcccccagcttgctgaaggctgccctctccacaggcttcatgttcttctcgtatgaattcttctgtaatgtcttccactgcatgaacaggacagccagccagcgctga

SEQ ID NO: 294593 - DNA, 2331 bp, Artificial Sequence
  derived and/or modified sequence
cacttgagtgggctcactcagtgagcaggagtttgctataaagttgccagatgtcttggaaaaccagttgatctctgggaccaacaattgcctatcaagcctgttcattcgattctcaaatattattaagcacttaccatgatgggctctattccaggaaccggaaatttacgagtgaacaaatgagaccaaggtcgtgtttccacgggcttacattctagtcagggagagagacaagaaacaaatgtactgtataaataacccatggcgtgccgggcgctgtggctcatgcatgtaatctcagcaattcaggaggctgaggcaggagaatcacttgaggccaggagttcgagaccagccagggcaacattgagaccttatctctacaaaaataaaaaacttagccaggcctgcacctgttaagtgacagctaattgggaggctgaggcaagagaatcacttgagcccaggagttcaaggctatggtgagttatgatggcaccactgcattccagcctgggcaacagagtgagaccctgtctctaaaaaagtaaacaaatatgccatagtaataagtactgtaaagaggaataaaacaagtgctattttattttatttttaaatttttgtattttttgtagagttggggttttgcagtgttgcccaggctggtcttgaactcctgagctcaagcaatccacccacctcggcctccgaaagtgctgggatacaggcatgaaccgctgcgcccagtccaaaagtgagtgctattttagacagtctagtcagggagggctgctctgaggaggtgatatttgagcagagaccataagaaacttgcctggtgtttattccgtatctcttgcatttagcttgatactgatggacattgtgtgggccagaggcagggatggttggctatgaccccaaaccagatggcaggaataacaccaagttccaggtggcagtggctgggtctgtgtctggacttgttactcgggcgctgatcagtcccttcgacgtcatcaagatccgtttccagcttcagcatgagcgcctgtctcgcagtgaccccagcgcaaagtaccatggcatcctccaggcctctaggcagattctgcaggaggagggtccgacagctttctggaaaggacacgtcccagctcagattctctccataggctatggagctgtccaattcttgtcatttgaaatgctgacggagctggtccacagaggcagcgtgtatgacgcccgggaattctcagtgcactttgtatgtggtggcctggctgcctgtatggccaccctcactgtgcaccccgtggatgttctgcgcacccgctttgcagctcagggtgagcccaaggtctataatacgctgcgccacgccgtggggaccatgtataggagcgaaggcccccaggttttctacaaaggcttggctcccaccttgatcgccatcttcccctacgccgggctgcagttctcttgctacagctccttgaagcacctgtacaagtgggccataccagccgaaggaaagaaaaatgagaacctccaaaacctgctttgtggcagtggagctggtgtcatcagcaagaccctgacatatccgctggacctcttcaagaagcggctacaggttggagggtttgagcatgccagagctgcctttggccaggtacggagatacaagggcctcatggactgtgccaagcaggtgctgcaaaaggaaggcgccctgggcttcttcaagggcctgtcccccagcttgctgaaggctgccctctccacaggcttcatgttcttctcgtatgaattcttctgtaatgtcttccactgcatgaacaggacagccagccagcgctgagtgcaggaaggaccccaggtcttccctggaggcagcctcctgaaggaaggaagattcagtctccactgagaggtgccgtctggcccttccctgcaggccagctgccccaagcggggtagcagccttgaacccacccagctgggacaccaccagaaggtccagggctctccccatgagagaatcagagggaatgcaggacgtggtctatggtgagccaacgacacagtgagaaggagcaggaagttgctgtttctcctctgaccagcccacactccaaaggaaacagacgccatcctacacctatcagccctgcctgccaggagaacagaacacactcctggtctggatggggctgctgcttgagtgcagagggctgcggtaggccctttgcaggagtcaggtccctacacttggcctgtttttccaacctatttaatagacattaaagctaaacacac

SEQ ID NO: 294594 - DNA, 1657 bp, Artificial Sequence
  derived and/or modified sequence
agtttcgtccgagctcagtagagttttgctgttaagactgcgcgaggagctagagagagcggagagcgctgagccgggccgcacccgccgagccgtcccttctccctgtgatcagttaccaactacctgttgatgtgtgtggttacagacttctttctatgctttgtacaactctacagaccgtatcttgatactgatggacattgtgtgggccagaggcagggatggttggctatgaccccaaaccagatggcaggaataacaccaagttccaggtggcagtggctgggtctgtgtctggacttgttactcgggcgctgatcagtcccttcgacgtcatcaagatccgtttccagcttcagcatgagcgcctgtctcgcagtgaccccagcgcaaagtaccatggcatcctccaggcctctaggcagattctgcaggaggagggtccgacagctttctggaaaggacacgtcccagctcagattctctccataggctatggagctgtccaattcttgtcatttgaaatgctgacggagctggtccacagaggcagcgtgtatgacgcccgggaattctcagtgcactttgtatgtggtggcctggctgcctgtatggccaccctcactgtgcaccccgtggatgttctgcgcacccgctttgcagctcagggtgagcccaaggtctataatacgctgcgccacgccgtggggaccatgtataggagcgaaggcccccaggttttctacaaaggcttggctcccaccttgatcgccatcttcccctacgccgggctgcagttctcttgctacagctccttgaagcacctgtacaagtgggccataccagccgaaggaaagaaaaatgagaacctccaaaacctgctttgtggcagtggagctggtgtcatcagcaagaccctgacatatccgctggacctcttcaagaagcggctacaggttggagggtttgagcatgccagagctgcctttggccaggtacggagatacaagggcctcatggactgtgccaagcaggtgctgcaaaaggaaggcgccctgggcttcttcaagggcctgtcccccagcttgctgaaggctgccctctccacaggcttcatgttcttctcgtatgaattcttctgtaatgtcttccactgcatgaacaggacagccagccagcgctgagtgcaggaaggaccccaggtcttccctggaggcagcctcctgaaggaaggaagattcagtctccactgagaggtgccgtctggcccttccctgcaggccagctgccccaagcggggtagcagccttgaacccacccagctgggacaccaccagaaggtccagggctctccccatgagagaatcagagggaatgcaggacgtggtctatggtgagccaacgacacagtgagaaggagcaggaagttgctgtttctcctctgaccagcccacactccaaaggaaacagacgccatcctacacctatcagccctgcctgccaggagaacagaacacactcctggtctggatggggctgctgcttgagtgcagagggctgcggtaggccctttgcaggagtcaggtccctacacttggcctgtttttccaacctatttaatagacattaaagctaaacacacattccttatctt

SEQ ID NO: 294595 - DNA, 1567 bp, Artificial Sequence
  derived and/or modified sequence
agtttcgtccgagctcagtagagttttgctgttaagactgcgcgaggagctagagagagcggagagcgctgagccgggccgcacccgccgagccgtcttgatactgatggacattgtgtgggccagaggcagggatggttggctatgaccccaaaccagatggcaggaataacaccaagttccaggtggcagtggctgggtctgtgtctggacttgttactcgggcgctgatcagtcccttcgacgtcatcaagatccgtttccagcttcagcatgagcgcctgtctcgcagtgaccccagcgcaaagtaccatggcatcctccaggcctctaggcagattctgcaggaggagggtccgacagctttctggaaaggacacgtcccagctcagattctctccataggctatggagctgtccaattcttgtcatttgaaatgctgacggagctggtccacagaggcagcgtgtatgacgcccgggaattctcagtgcactttgtatgtggtggcctggctgcctgtatggccaccctcactgtgcaccccgtggatgttctgcgcacccgctttgcagctcagggtgagcccaaggtctataatacgctgcgccacgccgtggggaccatgtataggagcgaaggcccccaggttttctacaaaggcttggctcccaccttgatcgccatcttcccctacgccgggctgcagttctcttgctacagctccttgaagcacctgtacaagtgggccataccagccgaaggaaagaaaaatgagaacctccaaaacctgctttgtggcagtggagctggtgtcatcagcaagaccctgacatatccgctggacctcttcaagaagcggctacaggttggagggtttgagcatgccagagctgcctttggccaggtacggagatacaagggcctcatggactgtgccaagcaggtgctgcaaaaggaaggcgccctgggcttcttcaagggcctgtcccccagcttgctgaaggctgccctctccacaggcttcatgttcttctcgtatgaattcttctgtaatgtcttccactgcatgaacaggacagccagccagcgctgagtgcaggaaggaccccaggtcttccctggaggcagcctcctgaaggaaggaagattcagtctccactgagaggtgccgtctggcccttccctgcaggccagctgccccaagcggggtagcagccttgaacccacccagctgggacaccaccagaaggtccagggctctccccatgagagaatcagagggaatgcaggacgtggtctatggtgagccaacgacacagtgagaaggagcaggaagttgctgtttctcctctgaccagcccacactccaaaggaaacagacgccatcctacacctatcagccctgcctgccaggagaacagaacacactcctggtctggatggggctgctgcttgagtgcagagggctgcggtaggccctttgcaggagtcaggtccctacacttggcctgtttttccaacctatttaatagacattaaagctaaacacacattccttatctt

SEQ ID NO: 294596 - DNA, 963 bp, Artificial Sequence
  derived and/or modified sequence
atggtgggctacgaccccaagcccgacggcagaaacaacaccaagttccaggtggccgtggccggcagcgtgagcggcctggtgaccagagccctgatcagccccttcgacgtgatcaagatcagattccagctgcagcacgagagactgagcagaagcgaccccagcgccaagtaccacggcatcctgcaggccagcagacagatcctgcaggaggagggccccaccgccttctggaagggccacgtgcccgcccagatcctgagcatcggctacggcgccgtgcagttcctgagcttcgagatgctgaccgagctggtgcacagaggcagcgtgtacgacgccagagagttcagcgtgcacttcgtgtgcggcggcctggccgcctgcatggccaccctgaccgtgcaccccgtggacgtgctgagaaccagattcgccgcccagggcgagcccaaggtgtacaacaccctgagacacgccgtgggcaccatgtacagaagcgagggcccccaggtgttctacaagggcctggcccccaccctgatcgccatcttcccctacgccggcctgcagttcagctgctacagcagcctgaagcacctgtacaagtgggccatccccgccgagggcaagaagaacgagaacctgcagaacctgctgtgcggcagcggcgccggcgtgatcagcaagaccctgacctaccccctggacctgttcaagaagagactgcaggtgggcggcttcgagcacgccagagccgccttcggccaggtgagaagatacaagggcctgatggactgcgccaagcaggtgctgcagaaggagggcgccctgggcttcttcaagggcctgagccccagcctgctgaaggccgccctgagcaccggcttcatgttcttcagctacgagttcttctgcaacgtgttccactgcatgaacagaaccgccagccagagatag

SEQ ID NO: 294597 - DNA, 792 bp, Artificial Sequence
  derived and/or modified sequence
atggtgggctacgaccccaagcccgacggcagaaacaacaccaagttccaggtggccgtggccggcagcgtgagcggcctggtgaccagagccctgatcagccccttcgacgtgatcaagatcagattccagctgcagcacgagagactgagcagaagcgaccccagcgccaagtaccacggcatcctgcaggccagcagacagatcctgcaggaggagggccccaccgccttctggaagggccacgtgcccgcccagatcctgagcatcggctacggcgccgtgcaggtgtacaacaccctgagacacgccgtgggcaccatgtacagaagcgagggcccccaggtgttctacaagggcctggcccccaccctgatcgccatcttcccctacgccggcctgcagttcagctgctacagcagcctgaagcacctgtacaagtgggccatccccgccgagggcaagaagaacgagaacctgcagaacctgctgtgcggcagcggcgccggcgtgatcagcaagaccctgacctaccccctggacctgttcaagaagagactgcaggtgggcggcttcgagcacgccagagccgccttcggccaggtgagaagatacaagggcctgatggactgcgccaagcaggtgctgcagaaggagggcgccctgggcttcttcaagggcctgagccccagcctgctgaaggccgccctgagcaccggcttcatgttcttcagctacgagttcttctgcaacgtgttccactgcatgaacagaaccgccagccagagatag

SEQ ID NO: 294598 - protein, 377 aa, Artificial Sequence
  derived and/or modified sequence
MEAAAVTVTRSATRRRRRQLQGLAAPEAGTQEEQEDQEPRPRRRRPGRSIKDEEEETVFREVVSFSPDPLPVRYYDKDTTKPISFYLSSLEELLAWKPRLEDGFNVALEPLACRQPPLSSQRPRTLLCHDMMGGYLDDRFIQGSVVQTPYAFYHWQCIDVFVYFSHHTVTIPPVGWTNTAHRHGVCVLGTFITEWNEGGRLCEAFLAGDERSYQAVADRLVQITQFFRFDGWLINIENSLSLAAVGNMPPFLRYLTTQLHRQVPGGLVLWYDSVVQSGQLKWQDELNQHNRVFFDSCDGFFTNYNWREEHLERMLGQAGERRADVYVGVDVFARGNVVGGRFDTDKSLELIRKHGFSVALFAPGCSVFPGVGNLLCC

SEQ ID NO: 294599 - DNA, 1134 bp, Artificial Sequence
  derived and/or modified sequence
atggaagctgccgccgtcacggtgactcggagcgccactagaagaagacgaagacagttgcagggactggccgctcctgaagcggggacacaggaggaacaggaggatcaggagcccaggcctcgcaggcgacgcccaggacgatcaatcaaagacgaagaggaagaaacagtgtttcgtgaagttgttagttttagccccgacccactcccggtgcgctactatgacaaagacacaacaaaaccaattagcttttacctgagcagcttagaggaactgttggcctggaaacctcggctggaggatggctttaatgtggcactagagcctctggcctgtaggcagcctcccctgagctcacagcgccctcgcacgttactgtgtcacgatatgatgggtggctatttagatgatcgctttattcaggggtccgtcgttcaaaccccctacgccttctatcattggcagtgtatcgatgtgtttgtatacttttcacaccataccgtcaccattccccctgtcggttggaccaatacagcacataggcacggagtgtgcgtactcggcacttttatcactgagtggaacgagggagggaggctctgcgaagcgttcttggccggagatgaaagatcttaccaggccgtcgcagatcggcttgtgcaaataacgcaattcttccgctttgacgggtggttgatcaatatcgagaacagcctgtcgcttgccgccgtaggtaacatgcccccgtttttaagatatctgacaactcagcttcacaggcaggtgccaggtgggcttgtattgtggtatgacagtgtggtccagtctggacagctcaagtggcaggacgaattgaaccagcacaatcgggtgttctttgattcttgtgatggtttctttaccaactacaactggcgggaagagcatctggaacgcatgcttggtcaggccggcgagagacgtgctgatgtgtacgtaggcgtcgatgtgttcgccaggggtaacgtggttgggggccggtttgacactgataagtccttagaactgatcaggaagcacggtttcagcgtggccctctttgctccggggtgcagcgttttcccaggtgtgggaaatctactctgctgttag

SEQ ID NO: 294600 - DNA, 1134 bp, Artificial Sequence
  derived and/or modified sequence
atggaggccgctgctgtgacagtgaccaggtctgccaccaggagaagaagacggcagctgcagggcctggccgcccctgaggccggcacccaggaggagcaggaggaccaggagccccggcccaggagaagaagacctggccgcagcatcaaggatgaggaggaggagaccgtcttccgggaggtggtgtccttctccccagaccccctgcctgtgcgctactatgacaaggacaccaccaagcccatctccttctacctgagcagcctggaggagctgctggcctggaagccccggctggaggatggcttcaacgtggccctggagcccctggcctgccggcagccccccctgagcagccagaggcccaggaccctgctgtgccacgacatgatgggcggctacctggatgaccgcttcatccagggctctgtggtgcagaccccctatgccttctaccactggcagtgcattgatgtgtttgtgtacttcagccaccacacagtgaccatcccccctgtgggctggaccaacacagcccacagacatggagtgtgtgtgctgggcaccttcatcacagagtggaatgaaggaggccgcctgtgtgaggccttcctggccggagatgagaggagctaccaggccgtggccgaccggctggtgcagatcacccagttcttccgctttgatggctggctgatcaacatcgagaacagcctgagcctggccgctgtgggcaacatgccacccttcctgcgctacctgaccacccagctgcaccggcaggtgcctgggggcctggtgctgtggtatgattctgtggtgcagagcggccagctgaagtggcaggatgagctgaaccagcacaacagagtcttctttgacagctgtgatggcttcttcaccaactacaactggagggaggagcacctggagaggatgctgggccaggccggggagaggagagcagatgtgtatgtgggcgtggatgtgtttgcccggggaaatgtggtgggcggccgctttgacacagacaagagcctggagctgatcaggaagcacggcttctctgtggccctgtttgcccctggctgcagcgtcttccctggggtgggcaacctgctgtgctgctag

SEQ ID NO: 294601 - DNA, 1134 bp, Artificial Sequence
  derived and/or modified sequence
atggaggccgccgccgtgaccgtgacccggagcgccacccggcggcggagacgtcagctccagggactcgccgctccggaagctggaacccaggaagaacaagaagatcaggaaccacgccctagacgtaggcgccctggccggtccattaaggatgaagaagaggagactgtgttccgagaggtcgtgtccttctctcctgatccactgccagtccgatattacgataaagacacgacaaagcctatatccttttacctttcgtcccttgaggagcttctggcctggaagccgcgcctggaggatggttttaatgtggctctggaaccgttagcctgccggcaacctccactcagcagccagaggcctcgcactctactgtgtcacgatatgatgggcgggtacctcgacgaccgctttatccagggatcagtggtacagacaccatacgctttttaccattggcaatgcatagacgtgtttgtgtacttcagtcatcacacagtcaccattcctcccgtgggttggaccaacaccgcccatcgacacggggtgtgcgtgcttgggacttttatcaccgaatggaacgagggcggaaggttgtgcgaagcctttctagccggcgacgaacggagttaccaagctgttgcagatcggctggtacagattactcagttctttaggttcgacggatggttaatcaacatcgagaattcactttcactggcagcagtgggaaatatgcccccttttctccgctacctgaccacccagcttcatagacaggtgcccgggggattagtgctctggtacgatagcgtggttcagtctggacagctgaaatggcaggacgagctgaaccaacacaatcgcgtatttttcgacagctgcgatgggtttttcaccaactataattggcgggaagaacacctcgagaggatgctgggtcaagcaggtgagagacgtgccgatgtatatgtcggtgtcgatgtctttgctagaggaaacgtcgtagggggaagattcgacacggacaaatctctggagctgattaggaaacatggcttttccgtcgctctgtttgctccaggttgctctgtcttccctggcgttggcaacctgctgtgttgctag

SEQ ID NO: 294602 - DNA, 1134 bp, Artificial Sequence
  derived and/or modified sequence
atggaagctgccgcagttaccgtgactagatccgcaacgcggagaaggaggcgccagctacaggggctggccgcacccgaagctggcactcaggaggaacaggaggatcaggaacctagacctaggagaaggcggcctgggaggtccataaaggatgaagaggaagaaaccgtattccgcgaagttgtgtctttctcccccgacccgctgccagtccgctactacgataaggacaccaccaagcctatctcattttacctctcatctttggaggaattacttgcctggaagccacgcttagaggatgggttcaacgtagcgctggaaccgctcgcttgcaggcaacccccactatcttcgcagcgaccgagaaccctcctctgtcacgacatgatggggggttatttggatgaccggttcattcagggcagtgtggtccagacaccctatgcattttaccactggcaatgtattgacgtgttcgtctacttctcacaccacaccgttaccataccccctgtgggatggacgaatacggcacaccgccatggggtctgtgtcctggggacctttattactgagtggaacgagggaggtaggctgtgcgaggccttccttgccggagacgagaggtcatatcaagctgtggccgatagactggtgcaaataactcagttcttccggtttgacggatggttgataaacatcgaaaacagtctgtcactagcagccgtcggtaatatgcctccctttctcagatacttaactacccagttgcaccgacaggtgccaggcggattggtgctatggtacgactctgttgtgcagagtggtcagctaaaatggcaggacgagctgaatcaacacaaccgtgtattctttgactcctgcgacggcttcttcacaaactacaattggcgagaagagcacctcgagaggatgctagggcaggcaggagagcgcagagctgacgtctatgtcggagttgatgtgttcgccaggggcaatgtagtggggggaaggttcgacacagacaagtccctcgagttgatccggaagcacgggtttagcgtcgctctgttcgctccgggatgctccgtgtttccaggggtgggtaacctgctctgttgctag

SEQ ID NO: 294603 - DNA, 1142 bp, Artificial Sequence
  derived and/or modified sequence
acagtgtcatggaggccgcggcggtgacggtcacccggtcggctacacggcggcggcggcggcagctgcaggggctggcggccccggaggcggggacgcaggaggagcaggaggatcaggagccgcggccgcggcggcggcggccgggaaggagcatcaaagatgaagaagaagagacagtctttcgagaggtggtcagtttttccccggaccccctgccagttagatattatgacaaggacaccaccaaaccaatcagcttttacttgtcttcgctggaggagctcttggcgtggaagccccgcttggaggatggctttaatgtggccctggagcccctggcgtgtcgccagccccctctgagcagccagaggccccggactttgttgtgtcatgacatgatgggcgggtacctggatgacaggttcattcagggctcggtggtgcagactccctatgctttctaccactggcagtgcatcgacgtctttgtgtacttcagccaccacaccgtcaccattcccccagtgggctggaccaacactgcccacaggcatggggtctgcgtgctggggactttcatcacggagtggaatgaagggggaaggctctgtgaagccttcctggccggggatgagcgctcgtaccaggcagtggctgaccggctggtccagatcactcagttttttcgttttgatggctggctgatcaacatcgagaactcgctgagtctggccgctgtggggaacatgcctcctttcctgcggtacctcaccacacagctgcaccggcaggtcccagggggcctggtgctctggtatgacagcgtggtgcaaagtgggcagctcaaatggcaagacgaactcaaccagcacaacagggtcttctttgattcctgcgacggcttcttcactaactataactggcgggaggagcacttggagcggatgctggggcaggctggggagcgccgggctgatgtgtacgtgggcgtggatgtgtttgctcgagggaacgtggtcggaggccgattcgacacagacaagtcgttggagctgatccgaaagcatggcttctccgtggctttgtttgcccccggctgctccgtgtttcctggcgttggcaatttactgtgctgctga

SEQ ID NO: 294604 - DNA, 1134 bp, Artificial Sequence
  derived and/or modified sequence
atggaggccgccgccgtgaccgtgaccagaagcgccaccagaagaagaagaagacagctgcagggcctggccgcccccgaggccggcacccaggaggagcaggaggaccaggagcccagacccagaagaagaagacccggcagaagcatcaaggacgaggaggaggagaccgtgttcagagaggtggtgagcttcagccccgaccccctgcccgtgagatactacgacaaggacaccaccaagcccatcagcttctacctgagcagcctggaggagctgctggcctggaagcccagactggaggacggcttcaacgtggccctggagcccctggcctgcagacagccccccctgagcagccagagacccagaaccctgctgtgccacgacatgatgggcggctacctggacgacagattcatccagggcagcgtggtgcagaccccctacgccttctaccactggcagtgcatcgacgtgttcgtgtacttcagccaccacaccgtgaccatcccccccgtgggctggaccaacaccgcccacagacacggcgtgtgcgtgctgggcaccttcatcaccgagtggaacgagggcggcagactgtgcgaggccttcctggccggcgacgagagaagctaccaggccgtggccgacagactggtgcagatcacccagttcttcagattcgacggctggctgatcaacatcgagaacagcctgagcctggccgccgtgggcaacatgccccccttcctgagatacctgaccacccagctgcacagacaggtgcccggcggcctggtgctgtggtacgacagcgtggtgcagagcggccagctgaagtggcaggacgagctgaaccagcacaacagagtgttcttcgacagctgcgacggcttcttcaccaactacaactggagagaggagcacctggagagaatgctgggccaggccggcgagagaagagccgacgtgtacgtgggcgtggacgtgttcgccagaggcaacgtggtgggcggcagattcgacaccgacaagagcctggagctgatcagaaagcacggcttcagcgtggccctgttcgcccccggctgcagcgtgttccccggcgtgggcaacctgctgtgctgctag

SEQ ID NO: 294605 - protein, 156 aa, Artificial Sequence
  derived and/or modified sequence
MGQMRRPPGRNLRRRPRSRLRVTSVSDQNDRVVECQLQTHNSKMVTFRFDLDGDSPEEIAAAMVYNEFILPSERDGFLRRIREIIQRVETLLKRDTGPMEAAEDTLSPQVRPLGGHFQGKWTLCSRVYYSLPSAVPLDLTPLHLWDPKTVALFFFF

SEQ ID NO: 294606 - DNA, 471 bp, Artificial Sequence
  derived and/or modified sequence
atgggccagatgagaagaccccccggcagaaacctgagaagaagacccagaagcagactgagagtgaccagcgtgagcgaccagaacgacagagtggtggagtgccagctgcagacccacaacagcaagatggtgaccttcagattcgacctggacggcgacagccccgaggagatcgccgccgccatggtgtacaacgagttcatcctgcccagcgagagagacggcttcctgagaagaatcagagagatcatccagagagtggagaccctgctgaagagagacaccggccccatggaggccgccgaggacaccctgagcccccaggtgagacccctgggcggccacttccagggcaagtggaccctgtgcagcagagtgtactacagcctgcccagcgccgtgcccctggacctgacccccctgcacctgtgggaccccaagaccgtggccctgttcttcttcttctag

SEQ ID NO: 294607 - DNA, 471 bp, Artificial Sequence
  derived and/or modified sequence
atgggccagatgaggaggccacccgggaggaatctgagaagaaggccacgtagtaggctgcgcgtgacctcagtctccgaccagaacgatcgggtagtggaatgccagctacaaactcacaattcaaagatggttacctttagattcgacctggacggggattcccctgaagaaattgcagccgctatggtttacaacgaattcatccttccaagtgaacgggatgggtttttgaggcgtattcgagaaattatccagcgagttgagaccctcctgaaacgcgacactggccccatggaggccgctgaggatacactgagccctcaggtccgccccctcggggggcacttccaagggaaatggaccctgtgttcacgggtgtactattctctgccctctgccgtccctctcgacctcacccctctccatctgtgggaccccaaaacagtggctttgttcttctttttctag

SEQ ID NO: 294608 - DNA, 471 bp, Artificial Sequence
  derived and/or modified sequence
atgggccagatgagaagacctcctggcaggaacctgcggcggcggcccaggagccggctgcgggtgacctctgtgtctgaccagaatgacagagtggtggagtgccagctgcagacccacaacagcaagatggtgaccttccgctttgacctggatggagacagccctgaggagattgctgctgccatggtgtacaatgagttcatcctgcccagcgagagagatggcttcctgcggcgcatccgggagatcatccagagggtggagaccctgctgaagagggacaccggccccatggaggccgctgaggacaccctgagcccccaggtgcggcccctgggcggccacttccagggcaagtggaccctgtgcagccgggtgtactacagcctgcccagcgctgtgcccctggacctgacccccctgcacctgtgggaccccaagacagtggccctcttcttcttcttctag

SEQ ID NO: 294609 - DNA, 471 bp, Artificial Sequence
  derived and/or modified sequence
atgggccagatgcggcggccccccggccggaacctgcggcggcggccccgatcccggctccgggttacgagcgtgtcagaccagaatgatcgcgtggtggaatgccagctgcagacccacaattccaagatggtcacctttaggtttgatcttgatggtgatagccctgaagagatcgctgccgctatggtatacaatgagttcattctgccctctgaaagggacgggtttttgagaaggattcgggagatcatccagagggttgaaaccctgctcaagagggacacgggcccaatggaggccgcggaagatacgctttctccacaggttaggcccctgggcggtcattttcaaggaaaatggacactttgttctagagtgtactactctctcccctctgcggtgcccctggaccttacgccgttacatttatgggatcccaaaactgtggctctgttttttttcttctag

SEQ ID NO: 294610 - DNA, 471 bp, Artificial Sequence
  derived and/or modified sequence
atgggccaaatgagaagacccccaggccgaaatctgcggagacgcccaaggtcccggctgagagtgactagcgtttccgatcagaatgatcgagtcgtggaatgtcagctgcagacacataactccaaaatggtcacctttagatttgatcttgacggagactcgccagaggagatcgccgcagccatggtctataatgaattcattttgccttctgaaagagacgggtttctgcggaggataagagaaataattcagcgtgtcgagaccttgctgaagcgcgacacgggccctatggaggcagcggaggatacactgtctccacaggttcggccactggggggacatttccagggcaagtggaccttgtgctctagggtgtactatagcctaccctccgccgttcctctcgacctgaccccactgcacttgtgggatccaaaaacagtcgccctgttcttctttttctag

SEQ ID NO: 294611 - protein, 764 aa, Artificial Sequence
  derived and/or modified sequence
MNGEADCPTDLEMAAPKGQDRWSQEDMLTLLECMKNNLPSNDSSKFKTTESHMDWEKVAFKDFSGDMCKLKWVEISNEVRKFRTLTELILDAQEHVKNPYKGKKLKKHPDFPKKPLTPYFRFFMEKRAKYAKLHPEMSNLDLTKILSKKYKELPEKKKMKYIQDFQREKQEFERNLARFREDHPDLIQNAKKSDIPEKPKTPQQLWYTHEKKVYLKVRPDATTKEVKDSLGKQWSQLSDKKRLKWIHKALEQRKEYEEIMRDYIQKHPELNISEEGITKSTLTKAERQLKDKFDGRPTKPPPNSYSLYCAELMANMKDVPSTERMVLCSQQWKLLSQKEKDAYHKKCDQKKKDYEVELLRFLESLPEEEQQRVLGEEKMLNINKKQATSPASKKPAQEGGKGGSEKPKRPVSAMFIFSEEKRRQLQEERPELSESELTRLLARMWNDLSEKKKAKYKAREAALKAQSERKPGGEREERGKLPESPKRAEEIWQQSVIGDYLARFKNDRVKALKAMEMTWNNMEKKEKLMWIKKAAEDQKRYERELSEMRAPPAATNSSKKMKFQGEPKKPPMNGYQKFSQELLSNGELNHLPLKERMVEIGSRWQRISQSQKEHYKKLAEEQQKQYKVHLDLWVKSLSPQDRAAYKEYISNKRKSMTKLRGPNPKSSRTTLQSKSESEEDDEEDEDDEDEDEEEEDDENGDSSEDGGDSSESSSEDESEDGDENEEDDEDEDDDEDDDEDEDNESEGSSSSSSSSGDSSDSDSN

SEQ ID NO: 294612 - DNA, 4603 bp, Artificial Sequence
  derived and/or modified sequence
ggtgaggtggctttgaccccgggttgcccggccagcacgaccgaggaggtggctggacagctggaggatgaacggagaagccgactgccccacagacctggaaatggccgcccccaaaggccaagaccgttggtcccaggaagacatgctgactttgctggaatgcatgaagaacaaccttccatccaatgacagctccaagttcaaaaccaccgaatcacacatggactgggaaaaagtagcatttaaagacttttctggagacatgtgcaagctcaaatgggtggagatttctaatgaggtgaggaagttccgtacattgacagaattgatcctcgatgctcaggaacatgttaaaaatccttacaaaggcaaaaaactcaagaaacacccagacttcccaaagaagcccctgaccccttatttccgcttcttcatggagaagcgggccaagtatgcgaaactccaccctgagatgagcaacctggacctaaccaagattctgtccaagaaatacaaggagcttccggagaagaagaagatgaaatatattcaggacttccagagagagaaacaggagttcgagcgaaacctggcccgattcagggaggatcaccccgacctaatccagaatgccaagaaatcggacatcccagagaagcccaaaaccccccagcagctgtggtacacccacgagaagaaggtgtatctcaaagtgcggccagatgccactacgaaggaggtgaaggactccctggggaagcagtggtctcagctctcggacaaaaagaggctgaaatggattcataaggccctggagcagcggaaggagtacgaggagatcatgagagactatatccagaagcacccagagctgaacatcagtgaggagggtatcaccaagtccaccctcaccaaggccgaacgccagctcaaggacaagtttgacgggcgacccaccaagccacctccgaacagctactcgctgtactgcgcagagctcatggccaacatgaaggacgtgcccagcacagagcgcatggtgctgtgcagccagcagtggaagctgctgtcccagaaggagaaggacgcctatcacaagaagtgtgatcagaaaaagaaagattacgaggtggagctgctccgtttcctcgagagcctgcctgaggaggagcagcagcgggtcttgggggaagagaagatgctgaacatcaacaagaagcaggccaccagccccgcctccaagaagccagcccaggaagggggcaagggcggctccgagaagcccaagcggcccgtgtcggccatgttcatcttctcggaggagaaacggcggcagctgcaggaggagcggcctgagctctccgagagcgagctgacccgcctgctggcccgaatgtggaacgacctgtctgagaagaagaaggccaagtacaaggcccgagaggcggcgctcaaggctcagtcggagaggaagcccggcggggagcgcgaggaacggggcaagctgcccgagtcccccaaaagagctgaggagatctggcaacagagcgttatcggcgactacctggcccgcttcaagaatgaccgggtgaaggccttgaaagccatggaaatgacctggaataacatggaaaagaaggagaaactgatgtggattaagaaggcagccgaagaccaaaagcgatatgagagagagctgagtgagatgcgggcacctccagctgctacaaattcttccaagaagatgaaattccagggagaacccaagaagcctcccatgaacggttaccagaagttctcccaggagctgctgtccaatggggagctgaaccacctgccgctgaaggagcgcatggtggagatcggcagtcgctggcagcgcatctcccagagccagaaggagcactacaaaaagctggccgaggagcagcaaaagcagtacaaggtgcacctggacctctgggttaagagcctgtctccccaggaccgtgcagcatataaagagtacatctccaataaacgtaagagcatgaccaagctgcgaggcccaaaccccaaatccagccggactactctgcagtccaagtcggagtccgaggaggatgatgaagaggatgaggatgacgaggacgaggatgaagaagaggaagatgatgagaatggggactcctctgaagatggcggcgactcctctgagtccagcagcgaggacgagagcgaggatggggatgagaatgaagaggatgacgaggacgaagacgacgacgaggatgacgatgaggatgaagataatgagtccgagggcagcagctccagctcctcctcctcaggggactcctcagactctgactccaactgaggctcagccccaccccagggcagccagggagagcccaggagctcccctccccaactgaccacctttgtttctcccccatgttctgtcccttgcccccctggcctcccccactttctttctttctttaaaaaaaaaaaaaaatacggtgggggtagggggctggaggagcccaggccaggactctgcagcctcagagacatcagcccttgggggtcctcctccagggacagcaactatcagactaagccagcaccggaccagcctggcccaccccacccacttctgcacttgcggttccggcatggacaatggaccggagagtgggggtggggggtcccaaagagtttgatgaggccctccacacctgcggcccaatccaaggtggggtggaagcttggggaagacccattccttcccagaggggcctgccacctggacccctgcattggaactggaggcagggaacatggggaggaggagggtcggtgccttcaagaaaacaggcactgccctggtggccctctcccctgccccctgcaggaaggagctgcctggacccgttcatgggggagggggcagaagtgttttttatatatgtgtatatatttttttttaagctctgagctgtcaacgagacgtttcctaccgatctcggctgccgtctctgttgtcatttctgggagagggagggtttaggggtagatttggaaccttttaaaaatggtcttgatgtatgtggaagagagtatgtgtatgtgtgttcctgtacatagcatgggtgcagctgtggatgtgtgcaaaagagtgtgagtgtgtgtgtgtgtgtgtaaaggggtctgtcctagagcccacatcagtttgttgtgaatctggaaaaagggtcggtgagggccgggagatgttgaccctggtgggagcaggctgaggctgccccgttctccacatcctctgttttgcccagtctctgattccattagggggagtgtgctgaagccattctcggatgcttcccagaccaggctccctctgccagagtcacatgcatccgagctgctggtctccattgtccagcaggaaggcggaaaggcaggcaagatggtgtgaagcttaaagcttgtatttgatggaaaaggtctcccctgttcatctgagaggccaagcctggccaccccaggctcagaacctgggcttcaagaaatgtgctgggagctcctaacttacacatccctccagccttccttgaatcctcccaccaccccctatttcctttaatttctcaggtctgctccctcctcccccaaccccacagctgggcaagaagtctgcaaaagctgcatctgcagctgtctctaactcttcccagccatctcccgtattttttggtaccttgattccttgactcttaataagccaagccaccttatctctgtagttcttatttttttgttgactaaatttggggggttcttttttatggtcatgtcactgacctattaaattggggcttggtgcttttccaccttccccctctgaatgaaagccaaggaatgggggaagagcgggaactctgccgcggaggtggagcaagaacggtgaagggccctggtcccagagaggctggtgggtccctctcccaaaggaaggcagacagtctctgctttgccttggaccttggtgctgggggtggggaggcctgggggggacactccccactcccattccccttcctttgtcctaatcctggaattaagtacaggggtttataggttctatttcttcccaagagccctgcaaagaaccccagtttcctatttggatgcccctacactgttgtgtttcagtggaatgtattttcatttaaaaacaactttgaatggggcactttttctttcctgttttaaaaattgaaaaattcttacagtacaaacaggactgtcagggtgggggtgttggtgctgtaagaggtcactcttgagtgcattttggcactgggatgggatggctggggtgggaagacccccatccccacccccaacttcttttctaatatttaaggagtgttttgtaggattcaacaaccaccacaacttgaatttgtatcatgggaggtgggagggagtggcttagaggtgtctgcctatgcttaaagccaactgtggaagttttgttttcccttttttgtataataaagtgaaaaacaaaggtttgaaaaaaaaaaaaaaaaaaaaaaaaaaaaaaaaa

SEQ ID NO: 294613 - DNA, 2295 bp, Artificial Sequence
  derived and/or modified sequence
atgaacggcgaggccgactgccccaccgacctggagatggccgcccccaagggccaggacagatggagccaggaggacatgctgaccctgctggagtgcatgaagaacaacctgcccagcaacgacagcagcaagttcaagaccaccgagagccacatggactgggagaaggtggccttcaaggacttcagcggcgacatgtgcaagctgaagtgggtggagatcagcaacgaggtgagaaagttcagaaccctgaccgagctgatcctggacgcccaggagcacgtgaagaacccctacaagggcaagaagctgaagaagcaccccgacttccccaagaagcccctgaccccctacttcagattcttcatggagaagagagccaagtacgccaagctgcaccccgagatgagcaacctggacctgaccaagatcctgagcaagaagtacaaggagctgcccgagaagaagaagatgaagtacatccaggacttccagagagagaagcaggagttcgagagaaacctggccagattcagagaggaccaccccgacctgatccagaacgccaagaagagcgacatccccgagaagcccaagaccccccagcagctgtggtacacccacgagaagaaggtgtacctgaaggtgagacccgacgccaccaccaaggaggtgaaggacagcctgggcaagcagtggagccagctgagcgacaagaagagactgaagtggatccacaaggccctggagcagagaaaggagtacgaggagatcatgagagactacatccagaagcaccccgagctgaacatcagcgaggagggcatcaccaagagcaccctgaccaaggccgagagacagctgaaggacaagttcgacggcagacccaccaagcccccccccaacagctacagcctgtactgcgccgagctgatggccaacatgaaggacgtgcccagcaccgagagaatggtgctgtgcagccagcagtggaagctgctgagccagaaggagaaggacgcctaccacaagaagtgcgaccagaagaagaaggactacgaggtggagctgctgagattcctggagagcctgcccgaggaggagcagcagagagtgctgggcgaggagaagatgctgaacatcaacaagaagcaggccaccagccccgccagcaagaagcccgcccaggagggcggcaagggcggcagcgagaagcccaagagacccgtgagcgccatgttcatcttcagcgaggagaagagaagacagctgcaggaggagagacccgagctgagcgagagcgagctgaccagactgctggccagaatgtggaacgacctgagcgagaagaagaaggccaagtacaaggccagagaggccgccctgaaggcccagagcgagagaaagcccggcggcgagagagaggagagaggcaagctgcccgagagccccaagagagccgaggagatctggcagcagagcgtgatcggcgactacctggccagattcaagaacgacagagtgaaggccctgaaggccatggagatgacctggaacaacatggagaagaaggagaagctgatgtggatcaagaaggccgccgaggaccagaagagatacgagagagagctgagcgagatgagagccccccccgccgccaccaacagcagcaagaagatgaagttccagggcgagcccaagaagccccccatgaacggctaccagaagttcagccaggagctgctgagcaacggcgagctgaaccacctgcccctgaaggagagaatggtggagatcggcagcagatggcagagaatcagccagagccagaaggagcactacaagaagctggccgaggagcagcagaagcagtacaaggtgcacctggacctgtgggtgaagagcctgagcccccaggacagagccgcctacaaggagtacatcagcaacaagagaaagagcatgaccaagctgagaggccccaaccccaagagcagcagaaccaccctgcagagcaagagcgagagcgaggaggacgacgaggaggacgaggacgacgaggacgaggacgaggaggaggaggacgacgagaacggcgacagcagcgaggacggcggcgacagcagcgagagcagcagcgaggacgagagcgaggacggcgacgagaacgaggaggacgacgaggacgaggacgacgacgaggacgacgacgaggacgaggacaacgagagcgagggcagcagcagcagcagcagcagcagcggcgacagcagcgacagcgacagcaactag

SEQ ID NO: 294614 - DNA, 2295 bp, Artificial Sequence
  derived and/or modified sequence
atgaacggagaagccgactgccccactgatttagagatggcggccccaaaaggacaagataggtggagtcaggaggatatgctgactttgctggagtgcatgaagaataatcttccttccaacgactctagtaaatttaaaaccacggagtctcacatggattgggagaaagtggccttcaaggatttttccggtgacatgtgcaagctcaaatgggtcgagattagtaatgaagtgcgcaaatttagaactctgactgaactcatcctagatgctcaggagcatgtgaagaatccatataaaggaaagaaacttaagaagcatcccgatttccctaagaaaccactgaccccctacttccgcttttttatggaaaaaagagcaaagtacgccaagctgcatccagagatgtcaaatttagatttgacgaaaatattatccaagaagtataaggagttaccagagaagaaaaaaatgaaatatattcaggattttcagagagagaaacaggaatttgagcgcaatctagcgcgctttcgtgaggatcatccagacctgatacagaacgctaaaaagtcagacatccccgaaaaacctaagaccccccagcaactgtggtacacccacgagaagaaggtgtatctgaaggttagaccagacgcgaccacgaaagaggtgaaagatagtttgggtaagcagtggagccaactgagtgataagaaaaggctcaagtggattcataaagcccttgaacagagaaaagagtatgaggagataatgagggattacattcagaaacacccggaacttaacatcagcgaggaggggattacaaaaagtactctgacaaaggccgagcggcaactgaaagataaattcgatggacggccgacaaagccacctccaaatagttattcactttactgcgctgaactgatggcgaatatgaaggacgtgccttccaccgaacggatggtgctatgctcccagcagtggaaactgctcagccaaaaggagaaagatgcatatcacaagaaatgtgatcaaaagaagaaggattacgaagtcgagctgctcaggtttctggagtccctcccagaagaggaacagcagagggtcttgggggaggaaaaaatgttaaatatcaacaaaaaacaggccacttctcctgcatcaaagaaacctgcccaggaaggcgggaaggggggctccgagaagcctaagcggccagtatccgctatgtttattttttcagaagagaaacggagacagctgcaggaggagaggcctgagctgtcagagagcgaacttacaaggttattagcaaggatgtggaatgacctgtccgagaagaaaaaggccaaatataaggcaagagaagcggccctgaaggcccagtccgagagaaagcccggaggcgaaagggaagaacgtgggaagctgcccgagagtcctaaacgtgcggaggaaatatggcagcagagtgtgatcggcgactatctggctagattcaaaaacgaccgcgtcaaagccctaaaagcaatggagatgacatggaacaatatggaaaaaaaagaaaaactgatgtggatcaaaaaggccgccgaggatcagaaaagatatgagcgggaactaagtgaaatgagagcccccccagctgctacaaacagctccaagaagatgaagttccagggtgaacctaagaagcctcccatgaacggttatcagaagttcagtcaagaactcctcagcaacggcgaactaaaccatttacctctcaaggaaaggatggtggagattggtagtcggtggcagaggattagccagagtcagaaagagcactataagaagttggctgaggagcagcagaagcagtataaggtgcaccttgacctctgggtgaaaagtctcagtcctcaggatcgtgctgcttacaaagaatacatatccaacaaaaggaagtccatgaccaagcttagaggccctaatcccaagagcagtagaacaaccctacagtccaaaagcgaatcagaggaggatgacgaggaagacgaagatgatgaggatgaggacgaggaggaggaggacgacgaaaacggcgactcttccgaggacggaggagatagttccgaaagctccagcgaagacgagtcagaggatggggacgaaaatgaagaagacgatgaggacgaagacgatgacgaggacgatgatgaagatgaagataatgagagtgagggctcatcctcatccagcagcagcagcggcgactcctctgattcagattccaactag

SEQ ID NO: 294615 - DNA, 2295 bp, Artificial Sequence
  derived and/or modified sequence
atgaatggagaggcagattgtcccacagacctggaaatggccgcccccaaaggtcaagaccggtggtctcaggaggacatgctcaccctgcttgagtgtatgaaaaacaacctgcccagcaacgattcatctaagttcaagacaaccgagagtcacatggactgggaaaaagtggcttttaaagatttttcgggagatatgtgcaaattgaaatgggtggagatcagcaacgaagtccgaaagttccgcaccctgaccgagttgatcctggatgctcaggaacacgtgaaaaacccatataaaggtaagaaactcaagaagcatcctgactttcctaagaagcctctgactccgtactttaggtttttcatggagaagagggctaagtatgctaaactgcatcctgagatgagtaacctagatctgactaagatcctgtctaagaaatataaggagttgcccgagaagaagaagatgaagtatatacaggacttccaaagagaaaaacaggagttcgagagaaacctggcccgctttcgggaggatcaccctgacctaattcaaaatgccaagaaatctgatatccctgagaagccaaaaacaccacagcagctttggtatacgcatgagaagaaagtttacctgaaagtgagacccgacgccacaacaaaggaagttaaagatagcttgggcaaacagtggtcgcagctgtcagacaagaaacgactcaagtggattcataaagccttggaacagcgaaaggaatatgaggaaattatgagggactacatccaaaaacatcctgagctaaacatctccgaggagggaattaccaaatctaccttgactaaagctgaaaggcagctgaaggataagttcgatgggcggcctactaagccccctccgaacagttacagtttatattgcgccgaactgatggccaacatgaaagatgtgccaagcacagaacgtatggtgctttgcagccagcagtggaagctgctgagccagaaagagaaagacgcctaccataagaagtgtgatcaaaagaaaaaggattacgaagtcgagctgctccggtttcttgaatccctgcctgaggaggagcagcagagagtgctgggagaagaaaaaatgctcaatatcaataagaagcaggccacatcacccgccagcaaaaaacccgctcaggagggtggcaaaggtggttccgagaagcctaaacgacccgtgagcgcaatgtttatcttctctgaagaaaaaaggcgtcagctccaggaggaacggcccgagctgagcgaatctgagctgacacgcttattggcgcgaatgtggaatgatctctcagaaaagaagaaggcaaaatacaaggcgcgggaggctgccctgaaagctcagtccgaacgaaagccaggcggcgaacgggaggaacgaggaaagttgcccgagagcccaaagagggccgaggagatctggcagcagtcagtgataggggactacctggcaaggttcaagaacgatcgggtcaaagctttgaaggccatggaaatgacttggaacaatatggagaagaaggagaaattaatgtggatcaaaaaagccgctgaggatcagaagcggtatgagcgtgagctatcggagatgagagcgcctcccgcagccactaatagcagcaagaaaatgaagtttcagggcgagcctaaaaagccaccaatgaacgggtatcagaaattttcccaggaattgttgtccaacggcgaactcaatcacttacctttgaaggagcgaatggttgagatagggtctaggtggcaaagaatctcccagagccagaaggagcactacaagaagctggctgaagagcagcagaaacaatataaggtccacctggacctgtgggtcaagtccctgagcccgcaagaccgggctgcctataaggaatatatctccaataagcggaagtctatgactaagctccggggaccgaatcccaagagctctcgaactaccctgcagagtaagtctgaaagcgaggaggatgacgaagaggatgaagatgacgaagacgaagacgaggaagaagaagacgatgaaaacggcgactcatccgaggatggcggggactcttctgagtcttcaagtgaggatgagtccgaagacggagatgagaacgaagaggatgatgaagatgaagatgacgacgaagatgacgatgaggacgaagacaacgagagtgagggatcaagttcttcatcaagctcctctggtgatagctccgatagcgatagcaattag

SEQ ID NO: 294616 - DNA, 2295 bp, Artificial Sequence
  derived and/or modified sequence
atgaatggagaggcagattgcccaactgatttagaaatggccgcaccaaagggtcaggaccggtggtcccaggaagatatgcttactcttctcgagtgcatgaagaataatctcccctctaatgactctagcaagtttaaaactacagaaagtcatatggactgggaaaaggtagctttcaaggacttcagtggtgacatgtgcaagctgaaatgggtagagatcagcaatgaggtgagaaagttcagaactctcacagagcttatcctcgatgctcaggagcatgtgaaaaatccatacaagggcaagaagttgaaaaaacaccccgactttcctaagaaacctctgactccctacttccgcttcttcatggagaaacgggcaaaatacgccaaactccatcccgagatgtccaacctcgacctgaccaaaatcctctcgaagaagtacaaggaacttccagaaaagaagaaaatgaaatatatccaggatttccagagagagaaacaggagttcgagagaaacctcgcacgtttcagagaggaccaccccgacctgatccagaatgcaaaaaaatcagatataccagagaagcccaagacaccccagcagctgtggtacactcacgagaaaaaggtatatctgaaagtccggccggatgcaaccaccaaagaggttaaggattctttagggaaacagtggagccagctgagtgacaaaaaacggctcaagtggatacacaaggcactggagcagcgcaaggaatatgaagaaatcatgagggactatatccagaaacaccctgaattgaacattagtgaagaaggtatcactaaaagcaccctgactaaggctgaaagacaactcaaggataagtttgatggtcgaccaaccaaacctccgccaaattcttattccctatattgtgccgaacttatggccaacatgaaggacgttccttctaccgagagaatggttctgtgtagtcagcagtggaaactcctgagccaaaaggaaaaggatgcttaccacaaaaaatgcgatcagaaaaaaaaggattacgaggtggaactactgcgctttcttgagtccctaccggaggaggaacaacagcgcgtcctgggtgaggagaaaatgctgaacattaataagaagcaggccacctcacccgcatccaagaaaccggctcaggaaggaggaaagggtggcagtgagaagcctaaaaggcctgtctccgcaatgtttatattttcagaggaaaagcgacgccaactgcaggaagaacgacctgaacttagcgaatccgaactaacccgtctcctggcgagaatgtggaacgatctatctgaaaagaagaaggccaaatataaggccagggaggcagctctgaaggcccagtcagagcgcaaaccaggtggcgaacgggaggagcgtggaaagctccccgagagccccaaacgagccgaagaaatttggcagcagtctgttatcggggattatctggctcggtttaaaaacgacagagtgaaagctctaaaggcaatggaaatgacatggaataatatggagaagaaggagaagctaatgtggattaagaaagccgccgaggaccagaagcgttatgaacgggagttaagtgaaatgagagcacccccggctgctactaatagctccaagaaaatgaagtttcagggagagcccaaaaagccccctatgaatggttatcagaaattcagccaagaactgctctccaatggggagctgaatcacctacccctgaaagaacggatggtagaaatcggcagtcggtggcagcggatctcccagagccagaaggagcactacaagaagttggctgaagaacaacaaaagcaatataaggttcacctcgatttatgggtaaagtccctctctccgcaggatcgcgcggcctacaaagaatatatctccaacaagaggaaatctatgacaaagctgcgcgggcccaaccctaagtctagccgcacaacactgcagagcaaaagtgaaagtgaggaagacgatgaagaagatgaggacgatgaggatgaagatgaagaggaggaggacgacgaaaacggagatagctcggaggatggcggcgatagcagcgaatcaagcagcgaggacgagtctgaggatggagacgagaacgaagaagacgacgaggacgaggacgatgacgaggacgacgacgaggatgaagacaatgagtctgagggaagttctagctcatcctcttcgagtggcgacagttcggatagcgacagtaattag

SEQ ID NO: 294617 - DNA, 2295 bp, Artificial Sequence
  derived and/or modified sequence
atgaatggagaggccgactgccccacagacctggagatggccgcccccaagggccaggaccgctggagccaggaggacatgctgaccctgctggagtgcatgaagaacaacctgcccagcaatgacagcagcaagttcaagaccacagagagccacatggactgggagaaggtggccttcaaggacttcagcggggacatgtgcaagctgaagtgggtggagatcagcaatgaggtgaggaagttccgcaccctgacagagctgatcctggatgcccaggagcacgtgaagaacccctacaagggcaagaagctgaagaagcacccagacttccccaagaagcccctgaccccctacttccgcttcttcatggagaagagggccaagtatgccaagctgcaccctgagatgagcaacctggacctgaccaagatcctgagcaagaagtacaaggagctgcctgagaagaagaagatgaagtacatccaggacttccagcgggagaagcaggagtttgagaggaacctggcccgcttccgggaggaccacccagacctgatccagaatgccaagaagagtgacatccctgagaagcccaagaccccccagcagctgtggtacacccatgagaagaaggtgtacctgaaggtgcggccagatgccaccaccaaggaggtgaaggacagcctgggcaagcagtggagccagctgagtgacaagaagaggctgaagtggatccacaaggccctggagcagaggaaggagtatgaggagatcatgagggactacatccagaagcaccctgagctgaacatcagcgaggagggcatcaccaagagcaccctgaccaaggccgagcggcagctgaaggacaagtttgatggccggcccaccaagcccccacccaacagctacagcctgtactgtgccgagctgatggccaacatgaaggatgtgcccagcacagagaggatggtgctgtgcagccagcagtggaagctgctgagccagaaggagaaggatgcctaccacaagaagtgtgaccagaagaagaaggactatgaggtggagctgctgcgcttcctggagagcctgcctgaggaggagcagcagagggtgctgggggaggagaagatgctgaacatcaacaagaagcaggccaccagccctgccagcaagaagccagcccaggagggcggcaaaggaggcagcgagaagcccaagaggcctgtgtctgccatgttcatcttcagcgaggagaagaggcggcagctgcaggaggagaggcctgagctgtctgagagcgagctgacccggctgctggccaggatgtggaatgacctgtctgagaagaagaaggccaagtacaaggcccgggaggccgccctgaaggcccagagcgagaggaagccaggaggagagcgggaggagcggggcaagctgcctgagagccccaagagagctgaggagatctggcagcagagcgtgattggagactacctggcccgcttcaagaatgacagagtgaaggccctgaaggccatggagatgacctggaacaacatggagaagaaggagaagctgatgtggatcaagaaggctgctgaggaccagaagagatatgagcgggagctgtctgagatgagggcccctcctgctgccaccaacagcagcaagaagatgaagttccagggcgagcccaagaagccacccatgaatggctaccagaagttcagccaggagctgctgagcaatggagagctgaaccacctgcccctgaaggagaggatggtggagatcggcagccgctggcagaggatcagccagagccagaaggagcactacaagaagctggccgaggagcagcagaagcagtacaaggtgcacctggacctgtgggtgaagagcctgagcccccaggacagagctgcctacaaggagtacatcagcaacaagaggaagtccatgaccaagctgcggggccccaaccccaagagcagcaggaccaccctgcagagcaagtctgagagtgaagaagatgatgaagaagatgaagatgatgaagatgaagatgaggaggaggaggatgatgaaaatggagacagcagtgaagatggaggagacagcagcgagagcagcagtgaagatgaaagtgaagatggagatgaaaatgaggaggatgatgaagatgaagatgatgatgaagatgatgatgaagatgaagataatgaaagtgagggcagcagcagcagcagcagcagcagcggggacagcagtgacagcgacagcaactag

SEQ ID NO: 294618 - DNA, 2295 bp, Artificial Sequence
  derived and/or modified sequence
atgaacggcgaggccgactgccccaccgacctggagatggccgcccctaagggtcaggatagatggtctcaagaggatatgctgaccctgctcgaatgtatgaagaacaaccttccgagcaacgattcgagcaagtttaaaaccaccgaaagtcatatggattgggaaaaagtcgcctttaaggactttagcggcgacatgtgcaagttgaagtgggtggaaatctccaacgaggtgcggaaatttcgtactctgaccgaactgattctggacgcacaagaacacgtgaaaaatccttacaaaggtaaaaaacttaaaaaacacccagacttcccaaagaaacctctgaccccttactttcggttctttatggaaaagcgggccaagtacgccaagctgcaccctgagatgtcaaacctggatctgaccaagatcctgtccaagaagtataaagaacttcctgaaaaaaagaaaatgaaatatatccaggatttccaacgtgagaagcaggaatttgaacgaaacctagctcgattcagagaagatcacccagacctcatacagaacgctaagaaatctgacattccagagaaacccaaaacacctcagcagttatggtatactcacgaaaaaaaggtttatcttaaggtgcgccctgacgcgacaaccaaggaggtgaaggacagtctcggcaagcaatggtctcagctgagtgacaaaaagcggctgaaatggatccacaaagccctcgaacagaggaaggagtatgaagaaatcatgcgcgattacattcaaaagcacccggagctgaatatctctgaggagggaatcaccaaatccaccctcacaaaggctgagcgacagctgaaggacaaatttgatggccggcctactaagccccctccgaacagttatagtctgtactgtgctgaactcatggcaaacatgaaggatgtgccgagcacagaacggatggtactctgctcccaacagtggaaattgctatcacagaaagagaaggatgcgtatcacaagaagtgcgatcagaaaaaaaaggactacgaagttgagctgcttagattcttagagagtctcccagaggaggaacaacagagggtgctcggagaggaaaagatgttgaacattaacaaaaagcaagccacatcaccggcgagcaagaaacccgcccaggagggagggaagggcggaagtgaaaagcccaaaagacccgtgtcagcaatgttcattttcagcgaagagaagcggcggcagttgcaggaagagaggccagaactatcggagagtgagcttacccgtctgctggcacggatgtggaatgacctgagcgagaagaaaaaggccaagtataaagcccgagaggctgctcttaaggctcagtcggagcggaaacctggaggagaaagggaggagagagggaaactgccagagtccccgaaacgcgcagaggagatatggcagcagtctgtaatcggcgactacttggcgagattcaagaatgaccgtgttaaggccttgaaggccatggagatgacatggaacaatatggaaaaaaaagagaagctgatgtggattaagaaggcggcagaagatcagaagagatatgaacgggagctcagtgagatgagagcgcccccagctgccacgaactccagcaaaaagatgaagtttcaaggagagcctaaaaaacctcctatgaacggttaccagaagttcagccaggagctgttgagtaacggcgagctcaatcacctcccactgaaagagagaatggtcgaaatcgggtcccgctggcagagaatctcccagtcacaaaaggagcactataagaaactggctgaggaacagcagaaacaatacaaagtgcacttggatttgtgggtcaagagcctgtctcctcaggaccgggcggcctataaagagtacattagtaataaaaggaagagtatgactaagctcagaggacctaatcccaaatcatcccggactacactgcagagtaagtcagaatctgaggaggacgatgaagaggatgaggatgatgaagatgaggacgaagaggaagaagatgatgagaacggtgactcttccgaggatggcggcgactcgagcgagtcatcaagtgaagacgaaagcgaggatggcgatgaaaacgaggaagatgatgaggatgaagatgatgacgaagatgatgacgaagacgaagataacgaatctgagggtagctccagcagcagcagctcttctggcgactcctcagactcggacagcaattag

SEQ ID NO: 294619 - DNA, 2295 bp, Artificial Sequence
  derived and/or modified sequence
atgaacggcgaggccgactgccccaccgacctggagatggccgcccccaaaggacaggacagatggtcccaggaagacatgctgactcttttggagtgcatgaaaaataaccttccttctaacgactcatctaagttcaagacaacagaatcacatatggattgggagaaggtggcgtttaaggatttctctggtgatatgtgtaagctgaaatgggtggagataagcaacgaggtcaggaagtttcggacactgaccgagttaatcctggacgctcaggagcacgtcaagaacccgtacaaggggaagaaactgaaaaaacaccctgattttcccaaaaaacccttaacaccttatttcagatttttcatggagaagcgggcaaagtacgccaagctgcatcctgagatgagtaacctggatcttacaaagatcctgtcaaaaaagtataaagaactccctgagaaaaaaaagatgaagtacatccaggattttcagagagaaaaacaggaatttgaaaggaacctggcccgtttccgagaagatcatcctgatctcatacagaacgctaaaaagagtgacattcctgagaaacctaaaactcctcagcagctgtggtacacacatgagaaaaaagtgtacctaaaggtccgccccgacgctacaactaaggaggtgaaagattccctggggaagcagtggtcacaactttcagacaagaagagactgaagtggattcacaaggccctggaacagcgcaaagaatacgaagagatcatgcgcgactatattcagaagcatcccgaattgaacatttctgaagagggtatcacgaaaagcacacttactaaggccgagcgccagctgaaagacaaatttgacggcaggcctactaagccgccacctaattcatactcactttattgtgcggagctgatggctaatatgaaggatgtcccgtcaaccgagagaatggttttatgttcccagcaatggaaactcttgagtcagaaggagaaagacgcatatcataagaagtgtgaccagaagaaaaaggactatgaagtggagctgcttagatttctggagtccctcccagaggaagaacagcagcgcgtcctcggagaggaaaaaatgctcaacataaacaagaaacaagccacatccccggcgagtaagaaaccggcccaggaaggcgggaagggtggatcagaaaaacccaaacgaccagtgtctgcgatgttcatattttcagaggaaaaacgaaggcagttgcaggaggagcggcctgaactctccgagtcagaactgaccagactgctcgctcgtatgtggaatgatctcagtgaaaagaagaaagccaaatacaaggccagggaagctgccttgaaagctcagagtgaacgaaagcccgggggtgaaagggaagagagagggaagctaccggaaagtcctaaaagggcagaggaaatatggcagcagagcgtcattggcgattacctggcacgctttaaaaatgatcgcgtgaaagccctgaaagccatggagatgacgtggaataatatggaaaaaaaggagaaactgatgtggatcaagaaggccgcagaggatcaaaagcgatacgagagagaactgtctgagatgcgcgctccccccgctgcaacaaattctagtaaaaaaatgaaatttcagggtgagcctaaaaaaccacctatgaatggataccaaaagtttagtcaagagctgctctcgaacggagaattaaatcacctgcctctgaaggaaaggatggtcgagattgggagccgctggcagcgcatctcccagagccaaaaggagcactataaaaagctggctgaagagcagcagaagcagtacaaagtgcaccttgacctgtgggtgaaatctttatcgcctcaagaccgggccgcatataaagaatacatttccaataagcggaagtcaatgaccaagctgcgtggtcctaatcccaagtcttcccgcactactctccagagcaagtcagaatcagaagaggatgatgaagaagatgaggacgacgaggatgaagacgaggaggaagaagacgacgagaatggagactcgagcgaagatggaggagactctagtgagagttcaagcgaagatgaatccgaggatggagacgagaacgaggaagacgacgaagatgaggatgatgatgaagacgacgacgaagatgaggacaacgagtcggaaggttcttcctccagctcctccagcagcggtgactcttctgacagtgacagcaactag

SEQ ID NO: 294620 - DNA, 2295 bp, Artificial Sequence
  derived and/or modified sequence
atgaacggcgaggccgactgccccaccgacctggagatggccgcccccaagggacaagaccgctggagccaggaagatatgcttacgctactggagtgcatgaaaaacaacctgccatctaacgattctagcaaattcaaaactactgaatctcatatggattgggagaaagttgcatttaaggatttctcaggagacatgtgtaaactgaagtgggtggaaatttcgaacgaggtgaggaagttccgaactttgacagaactgattttagatgcacaggagcacgttaagaatccttacaaaggaaaaaagctgaaaaagcacccggatttccctaagaaaccactgacgccatacttccgctttttcatggaaaagcgcgcaaaatacgccaagctgcaccctgagatgtccaacttggacttgactaagatcctgagtaaaaagtacaaagaactgcctgaaaagaagaagatgaagtatatacaggattttcagcgcgagaaacaggaattcgaacgcaatttagcgcgatttagggaggatcatcctgatctgattcaaaatgctaagaagtctgatataccagaaaagcccaagacaccccaacagctgtggtacacccatgaaaagaaggtgtacctgaaagttcggcctgacgccacgaccaaagaagttaaagactcactggggaagcaatggagccagctgagtgacaagaaacggctaaaatggattcataaagcccttgaacagaggaaagaatatgaggaaattatgcgggattacattcaaaaacatcctgaactgaatatttcggaggaggggatcaccaagtccactctgacgaaggcagagcgccagttaaaggataaattcgatggccgcccaactaagccacccccaaattcttatagtctttattgcgccgagcttatggccaacatgaaggacgtgcccagtacggagaggatggtgctgtgttctcagcaatggaaattactttcccaaaaggagaaagatgcctatcataagaaatgtgatcagaaaaaaaaagactacgaagtcgaactccttcgctttctcgaatcccttcctgaggaagagcagcagcgcgtcctcggagaagagaagatgctgaacattaacaagaaacaggctacctcaccagctagcaagaaacccgctcaggagggggggaaaggggggagtgaaaaaccgaagcggcctgtgagcgccatgtttatcttctccgaggagaaaaggaggcagctgcaagaggaaagacccgaactgtcagaatcagagttgacccggctgcttgccagaatgtggaacgatctttctgagaagaagaaggcgaagtacaaagccagagaagccgcactcaaggcccaatctgagcgtaagccagggggggaaagagaagaacgagggaagctgcccgaatctcccaaacgggccgaagagatatggcagcaaagcgttataggagattatttggccagattcaagaatgaccgtgtgaaagcactgaaagcaatggagatgacctggaacaatatggagaagaaagagaagctgatgtggatcaagaaagccgctgaagatcaaaagaggtatgagcgagagttgtccgaaatgagagctccacctgccgctactaattctagcaaaaagatgaagtttcagggtgagcctaagaaacctccaatgaacggctatcaaaaattttcacaggaactgctctctaacggggagctgaaccatctgcccctcaaagagcgaatggtcgagatcggatccaggtggcagagaatttcgcagagccaaaaggagcactataaaaagctcgcagaggaacagcagaaacaatacaaagttcacctggacctatgggtgaagtcgctgagtcctcaagatagggctgcatacaaggagtacatttccaacaagcgcaagagcatgaccaagcttcgcggccccaatcccaagtcctcacggacaacattgcagtccaaatccgagtcagaggaagacgatgaagaagacgaagacgacgaagacgaagacgaggaggaggaagatgatgagaacggcgactcgtccgaggatggaggcgacagctccgaaagttcttctgaggacgagtccgaggacggggacgaaaatgaggaggacgacgaagatgaggatgatgacgaggatgacgatgaagacgaggataacgaaagtgagggtagctcctcctcttcttcatcttccggtgattcctctgattccgatagcaactag

SEQ ID NO: 294621 - DNA, 2295 bp, Artificial Sequence
  derived and/or modified sequence
atgaatggggaggccgactgtcctacggacctcgaaatggcagctcccaaaggccaggacaggtggtctcaagaggacatgctgacccttctggaatgcatgaaaaacaatcttccaagcaatgacagctcaaagttcaagaccacagagtctcacatggattgggagaaggttgcgttcaaggacttcagtggggacatgtgtaaactgaaatgggtggagatcagcaacgaagtgagaaaattccggacattgacagagctaatcctagacgcacaggaacatgtgaagaacccttacaagggaaagaaactcaaaaagcacccggatttcccgaagaagccactgactccgtatttcaggttctttatggagaagagagctaagtacgcaaaactccacccggagatgtccaacctcgacctgaccaagatcttgtccaagaaatacaaagaactgccggaaaagaagaagatgaagtacatacaggattttcagagggagaagcaagagttcgaaagaaatctcgctcgctttcgggaggatcacccggacctgatccagaacgccaagaaatcagacatacccgagaagccaaagacgccccagcaactgtggtatactcatgaaaaaaaagtgtatctcaaggtgcgccctgatgccaccacaaaggaagtgaaagatagcttgggcaaacagtggagtcaacttagtgacaaaaagagacttaagtggattcacaaggcattggaacaaagaaaggaatatgaggagattatgcgggactacatccagaaacaccccgaactgaacatctctgaagagggtattacaaagtcaacgctgacaaaagcagagcggcagctgaaagacaagttcgacggtcgcccaaccaagcctcctcctaactcctacagcctgtactgtgctgaattgatggcaaatatgaaagatgttccatccactgagcgcatggttctgtgtagtcagcaatggaaattgctgtcacagaaagagaaggacgcgtatcataaaaaatgcgatcagaagaagaaagactacgaggtggagctcttaagatttctggagtcactccctgaggaggagcaacagcgtgtgctcggcgaagagaagatgttaaacattaacaaaaagcaggcgactagtccggcatcaaagaaacctgcccaggaagggggtaaagggggaagcgagaagccaaaaagaccagttagtgccatgtttatcttcagcgaagagaagcggagacagctccaggaggagcggccagaattgtctgagtcagaacttacccgcctcctcgcacgcatgtggaacgacctgtccgaaaaaaagaaggccaaatataaggccagggaggccgcactcaaagcccagtctgaacggaagcccggtggagaaagggaggagcggggtaaactgcctgagagtcccaagagagctgaggagatctggcagcaatcagtaataggagactacctggctcgcttcaagaatgacagagtcaaagccctgaaggccatggaaatgacctggaacaatatggaaaaaaaggagaaactaatgtggatcaaaaaagccgctgaagaccagaagaggtacgaaagagaactctcagagatgcgagcaccacctgcagccaccaactcaagcaagaagatgaaatttcagggcgaacctaagaaaccccctatgaacggttatcaaaagttctctcaggaactgctttcaaacggcgagctgaatcacctgcccctgaaggagcggatggtcgagattggttctcgatggcagagaatatctcaaagtcagaaggagcattataagaagctagctgaggagcagcagaagcagtacaaggtccacctggacctgtgggtcaagtccctgagtccccaggatcgcgcagcttacaaggaatatatctcaaacaagcgtaaatctatgaccaaactgcggggtcctaacccgaagtcgtcaaggaccactcttcagtccaaaagcgaatctgaggaagacgatgaagaagacgaagatgacgaagacgaagacgaagaagaagaggacgacgaaaacggagactcttctgaggacggcggagattcctcggaatcatcgagtgaagacgagtcggaggatggggatgagaatgaagaagatgatgaggacgaggatgacgacgaggatgatgacgaggacgaggataacgagtctgaggggagctctagttcgtcctccagcagcggggattcctccgactcagacagcaattag

SEQ ID NO: 294622 - DNA, 2295 bp, Artificial Sequence
  derived and/or modified sequence
atgaatggggaggccgattgcccgacagacctggagatggccgcaccaaaagggcaagaccgctggagccaggaggacatgctgacactgctggagtgtatgaaaaacaacctgccatctaacgattcaagcaagttcaaaacgaccgagtctcacatggattgggagaaggtggcttttaaagactttagtggcgacatgtgcaagctgaagtgggtggagattagcaacgaggttcggaaattccggacgctgactgagctgatactagacgcgcaggagcatgtgaagaatccctataaggggaagaaactcaagaagcatcccgacttcccgaagaaaccacttactccgtattttcgctttttcatggagaagcgggctaaatatgccaaactacatcctgaaatgagcaacctagatttgacaaagattctttccaagaagtacaaggagttgccggagaaaaaaaagatgaaatacatacaggatttccagcgggagaaacaggaatttgagcggaacctcgccagattcagggaggaccatcccgatctgatccaaaacgcgaagaagagtgatatacccgaaaagcccaaaaccccccagcagctctggtacacacatgaaaaaaaagtttatctaaaggtgagacccgacgccactaccaaagaggtgaaagattcactgggaaaacagtggagccagctctctgacaaaaagcggctcaagtggatccacaaagctttggagcagagaaaggaatatgaggagattatgcgcgactatatccaaaaacatccagaactcaatatatccgaggaggggattaccaagtcaaccctgactaaagcagagagacaactaaaggacaagtttgacggtagacctacaaaacccccaccaaatagttatagtctgtattgcgctgaactcatggcaaatatgaaggatgttcctagcaccgaacgcatggtgctgtgctcacaacaatggaagctcctgtcgcaaaaggaaaaggacgcctaccataaaaagtgcgatcagaaaaagaaggattacgaagtcgagttgcttcgtttccttgagtctctgccagaggaagagcaacagcgggtgctcggtgaggaaaagatgttaaacatcaataaaaagcaggctaccagtcccgcatccaaaaaaccagcacaagaaggtggcaaggggggttctgagaagcccaaacggccagtgtccgccatgttcatctttagcgaagaaaagcgaaggcagctgcaggaagagcgtcctgagctgagcgagagtgagcttacaagactcctggctagaatgtggaacgacctctcagaaaagaaaaaggcaaaatacaaggcgagagaagccgcactcaaagcccagtctgagcgcaaacctggtggggagcgcgaggaacgaggcaagctgcccgagtcaccaaaacgggctgaggaaatctggcaacaaagcgtgatcggggattatctcgcgagatttaagaatgatcgggtcaaagctctgaaagctatggagatgacctggaataatatggagaaaaaagagaagcttatgtggatcaaaaaagctgctgaggaccagaaaaggtacgaacgtgagctttctgaaatgcgcgcacctcccgctgccaccaacagttccaaaaagatgaaatttcagggcgaacctaagaagccccctatgaatggctatcagaagttttcccaggaacttctgagtaacggcgagctgaatcatctgccccttaaagagcggatggttgagatcggatctcgctggcagcgcatttcccagagccagaaggagcattataagaagttagctgaggagcagcagaagcagtacaaagtgcatctggatctctgggtgaaaagtctttcgcctcaggacagagctgcttacaaggagtacatttcaaacaaaaggaaaagcatgactaaacttagggggcctaaccctaagagcagtcggacaacactccaatcaaagtccgagagcgaggaggatgacgaggaagacgaggatgacgaggacgaagatgaagaagaagaggatgacgaaaacggcgactctagtgaggatggtggtgattccagcgagtcgtccagtgaggatgaatcggaggacggtgacgagaacgaggaggacgacgaggacgaggacgacgacgaagacgatgatgaagacgaagataacgagtctgagggttcttcctcctcaagctctagtagcggtgactcgtctgacagtgacagcaactag

SEQ ID NO: 294623 - DNA, 2295 bp, Artificial Sequence
  derived and/or modified sequence
atgaacggggaggcggattgtcctaccgacctggaaatggccgctcctaagggccaggacagatggtctcaggaggacatgcttacccttcttgaatgtatgaagaacaatctacctagcaatgatagttctaagtttaagacaaccgaatcacacatggattgggagaaggtggcctttaaggatttcagtggagatatgtgcaagttaaaatgggtggagattagtaatgaagtcaggaaatttagaactttgactgaactcatcctcgatgcccaagagcatgttaaaaatccgtacaagggcaaaaagcttaagaaacacccagatttccctaagaagcccttgactccttattttcgtttcttcatggagaagcgcgcaaagtacgcgaagctccaccccgagatgagtaatttggatttgacaaaaatcctctccaagaagtataaggaactgccggagaagaagaagatgaaatacattcaggacttccagcgggagaaacaggagttcgaaagaaatctggccaggttcagagaggaccatccagacctcatccaaaatgctaaaaaatccgatatccctgagaagcctaagactccacagcaactgtggtacacccacgagaagaaggtgtaccttaaagtgcggcctgatgcaactactaaagaggtgaaagatagcctcggcaaacagtggtctcagctgtctgacaagaagcgccttaagtggatccataaggctttagagcaacgcaaagagtatgaggaaataatgcgcgactatatccagaagcacccagagctaaacatcagcgaagagggcattacgaagagcacgctcaccaaggccgagcgtcagctcaaggataaatttgatgggcgtcccacaaagcccccacctaactcttattcactgtactgtgccgagctgatggccaatatgaaagatgtgcccagcaccgagagaatggtgctgtgttctcagcaatggaagctgctctcacagaaagaaaaggacgcctaccacaaaaagtgtgatcagaagaagaaagactatgaggtcgagttgctgcgctttttggaaagcctccccgaggaagagcaacagagagtgttaggagaggaaaagatgcttaacattaacaagaagcaagccacctcccctgcatctaaaaagccagctcaggagggcggaaagggaggttctgaaaaaccaaaacgaccagtgtctgccatgttcatttttagcgaagaaaagcgccgtcagctccaggaagaacgtccagaactcagcgaatccgaattgaccaggctacttgccaggatgtggaacgacttgagtgaaaagaagaaggctaaatacaaagcaagggaggctgctctgaaggcccagagtgagagaaagcccggaggtgaacgtgaagagcggggaaagctgcccgagagtcccaaacgcgctgaggaaatttggcagcagagcgtgatcggcgattatcttgcaagatttaagaacgatcgggtgaaagccttgaaggctatggaaatgacttggaacaacatggagaaaaaagaaaagctgatgtggataaaaaaggccgcagaagatcaaaaaaggtatgaaagagaactgtccgaaatgcgagctcctccagcagctacaaacagttcaaagaaaatgaagttccagggagaacccaagaagcctcccatgaacgggtaccagaaattctcccaagaacttctgtctaatggagagctgaaccacctgccactgaaggagagaatggtggagatcggttccaggtggcaacgcattagtcagagtcagaaggagcactacaagaaactcgccgaagaacagcagaagcagtataaggtgcacctggacctttgggtgaagagcctgtcgcctcaagatagagccgcatataaggaatacatttccaacaagcgtaagagcatgactaaactccgaggacctaaccctaaatcttctcggactactctccagagcaagtctgaatcggaggaggacgatgaagaggatgaggatgatgaggatgaggatgaagaagaagaagatgacgagaacggggactctagtgaggacggaggcgacagctctgagtccagctccgaggacgaatcagaggacggggacgagaacgaggaggacgacgaggacgaagacgacgacgaagatgacgatgaggacgaagataatgaatcagaaggctccagtagctcttccagtagttccggagactccagcgactccgatagtaactag

SEQ ID NO: 294624 - DNA, 4997 bp, Artificial Sequence
  derived and/or modified sequence
agacacacaccagtggcgacaggggagagttggaaagacgcaggagagaagcaggaggcaggaggcagcggggatggagcaatgggagcgggaagcaggcaggtttccttgcaaatccccctccggcctcacgccgtctcgccggccccggcaggggagcgaggaccccggcgaacagatggaggagtggagctcgctctaggcagctgggcttggccggagaatggaggagccaccaagcgaccggctgattggaagagaaacgcagagcgatggaggcggggtaggaggacgatttctctgcggggactggcggcggcgtacacgcccgggtcgggcgctgcagagcttggctggctttcaacccgcgctcgccggctccagccccgcgcgcccccacccctagccctcccggcggctccgcagggtgaggtggctttgaccccgggttgcccggccagcacgaccgaggaggtggctggacagctggaggatgaacggagaagccgactgccccacagacctggaaatggccgcccccaaaggccaagaccgttggtcccaggaagacatgctgactttgctggaatgcatgaagaacaaccttccatccaatgacagctccaagttcaaaaccaccgaatcacacatggactgggaaaaagtagcatttaaagacttttctggagacatgtgcaagctcaaatgggtggagatttctaatgaggtgaggaagttccgtacattgacagaattgatcctcgatgctcaggaacatgttaaaaatccttacaaaggcaaaaaactcaagaaacacccagacttcccaaagaagcccctgaccccttatttccgcttcttcatggagaagcgggccaagtatgcgaaactccaccctgagatgagcaacctggacctaaccaagattctgtccaagaaatacaaggagcttccggagaagaagaagatgaaatatattcaggacttccagagagagaaacaggagttcgagcgaaacctggcccgattcagggaggatcaccccgacctaatccagaatgccaagaaatcggacatcccagagaagcccaaaaccccccagcagctgtggtacacccacgagaagaaggtgtatctcaaagtgcggccagatgccactacgaaggaggtgaaggactccctggggaagcagtggtctcagctctcggacaaaaagaggctgaaatggattcataaggccctggagcagcggaaggagtacgaggagatcatgagagactatatccagaagcacccagagctgaacatcagtgaggagggtatcaccaagtccaccctcaccaaggccgaacgccagctcaaggacaagtttgacgggcgacccaccaagccacctccgaacagctactcgctgtactgcgcagagctcatggccaacatgaaggacgtgcccagcacagagcgcatggtgctgtgcagccagcagtggaagctgctgtcccagaaggagaaggacgcctatcacaagaagtgtgatcagaaaaagaaagattacgaggtggagctgctccgtttcctcgagagcctgcctgaggaggagcagcagcgggtcttgggggaagagaagatgctgaacatcaacaagaagcaggccaccagccccgcctccaagaagccagcccaggaagggggcaagggcggctccgagaagcccaagcggcccgtgtcggccatgttcatcttctcggaggagaaacggcggcagctgcaggaggagcggcctgagctctccgagagcgagctgacccgcctgctggcccgaatgtggaacgacctgtctgagaagaagaaggccaagtacaaggcccgagaggcggcgctcaaggctcagtcggagaggaagcccggcggggagcgcgaggaacggggcaagctgcccgagtcccccaaaagagctgaggagatctggcaacagagcgttatcggcgactacctggcccgcttcaagaatgaccgggtgaaggccttgaaagccatggaaatgacctggaataacatggaaaagaaggagaaactgatgtggattaagaaggcagccgaagaccaaaagcgatatgagagagagctgagtgagatgcgggcacctccagctgctacaaattcttccaagaagatgaaattccagggagaacccaagaagcctcccatgaacggttaccagaagttctcccaggagctgctgtccaatggggagctgaaccacctgccgctgaaggagcgcatggtggagatcggcagtcgctggcagcgcatctcccagagccagaaggagcactacaaaaagctggccgaggagcagcaaaagcagtacaaggtgcacctggacctctgggttaagagcctgtctccccaggaccgtgcagcatataaagagtacatctccaataaacgtaagagcatgaccaagctgcgaggcccaaaccccaaatccagccggactactctgcagtccaagtcggagtccgaggaggatgatgaagaggatgaggatgacgaggacgaggatgaagaagaggaagatgatgagaatggggactcctctgaagatggcggcgactcctctgagtccagcagcgaggacgagagcgaggatggggatgagaatgaagaggatgacgaggacgaagacgacgacgaggatgacgatgaggatgaagataatgagtccgagggcagcagctccagctcctcctcctcaggggactcctcagactctgactccaactgaggctcagccccaccccagggcagccagggagagcccaggagctcccctccccaactgaccacctttgtttctcccccatgttctgtcccttgcccccctggcctcccccactttctttctttctttaaaaaaaaaaaaaaatacggtgggggtagggggctggaggagcccaggccaggactctgcagcctcagagacatcagcccttgggggtcctcctccagggacagcaactatcagactaagccagcaccggaccagcctggcccaccccacccacttctgcacttgcggttccggcatggacaatggaccggagagtgggggtggggggtcccaaagagtttgatgaggccctccacacctgcggcccaatccaaggtggggtggaagcttggggaagacccattccttcccagaggggcctgccacctggacccctgcattggaactggaggcagggaacatggggaggaggagggtcggtgccttcaagaaaacaggcactgccctggtggccctctcccctgccccctgcaggaaggagctgcctggacccgttcatgggggagggggcagaagtgttttttatatatgtgtatatatttttttttaagctctgagctgtcaacgagacgtttcctaccgatctcggctgccgtctctgttgtcatttctgggagagggagggtttaggggtagatttggaaccttttaaaaatggtcttgatgtatgtggaagagagtatgtgtatgtgtgttcctgtacatagcatgggtgcagctgtggatgtgtgcaaaagagtgtgagtgtgtgtgtgtgtgtgtaaaggggtctgtcctagagcccacatcagtttgttgtgaatctggaaaaagggtcggtgagggccgggagatgttgaccctggtgggagcaggctgaggctgccccgttctccacatcctctgttttgcccagtctctgattccattagggggagtgtgctgaagccattctcggatgcttcccagaccaggctccctctgccagagtcacatgcatccgagctgctggtctccattgtccagcaggaaggcggaaaggcaggcaagatggtgtgaagcttaaagcttgtatttgatggaaaaggtctcccctgttcatctgagaggccaagcctggccaccccaggctcagaacctgggcttcaagaaatgtgctgggagctcctaacttacacatccctccagccttccttgaatcctcccaccaccccctatttcctttaatttctcaggtctgctccctcctcccccaaccccacagctgggcaagaagtctgcaaaagctgcatctgcagctgtctctaactcttcccagccatctcccgtattttttggtaccttgattccttgactcttaataagccaagccaccttatctctgtagttcttatttttttgttgactaaatttggggggttcttttttatggtcatgtcactgacctattaaattggggcttggtgcttttccaccttccccctctgaatgaaagccaaggaatgggggaagagcgggaactctgccgcggaggtggagcaagaacggtgaagggccctggtcccagagaggctggtgggtccctctcccaaaggaaggcagacagtctctgctttgccttggaccttggtgctgggggtggggaggcctgggggggacactccccactcccattccccttcctttgtcctaatcctggaattaagtacaggggtttataggttctatttcttcccaagagccctgcaaagaaccccagtttcctatttggatgcccctacactgttgtgtttcagtggaatgtattttcatttaaaaacaactttgaatggggcactttttctttcctgttttaaaaattgaaaaattcttacagtacaaacaggactgtcagggtgggggtgttggtgctgtaagaggtcactcttgagtgcattttggcactgggatgggatggctggggtgggaagacccccatccccacccccaacttcttttctaatatttaaggagtgttttgtaggattcaacaaccaccacaacttgaatttgtatcatgggaggtgggagggagtggcttagaggtgtctgcctatgcttaaagccaactgtggaagttttgttttcccttttttgtataataaagtgaaaaacaaaggtttga

SEQ ID NO: 294625 - DNA, 2738 bp, Artificial Sequence
  derived and/or modified sequence
agagccagggagggagccgctggagcgggaagcccggaggccgcgctgcgccggggtgaggtggctttgaccccgggttgcccggccagcacgaccgaggaggtggctggacagctggaggatgaacggagaagccgactgccccacagacctggaaatggccgcccccaaaggccaagaccgttggtcccaggaagacatgctgactttgctggaatgcatgaagaacaaccttccatccaatgacagctccaagttcaaaaccaccgaatcacacatggactgggaaaaagtagcatttaaagacttttctggagacatgtgcaagctcaaatgggtggagatttctaatgaggtgaggaagttccgtacattgacagaattgatcctcgatgctcaggaacatgttaaaaatccttacaaaggcaaaaaactcaagaaacacccagacttcccaaagaagcccctgaccccttatttccgcttcttcatggagaagcgggccaagtatgcgaaactccaccctgagatgagcaacctggacctaaccaagattctgtccaagaaatacaaggagcttccggagaagaagaagatgaaatatattcaggacttccagagagagaaacaggagttcgagcgaaacctggcccgattcagggaggatcaccccgacctaatccagaatgccaagaaatcggacatcccagagaagcccaaaaccccccagcagctgtggtacacccacgagaagaaggtgtatctcaaagtgcggccagatgccactacgaaggaggtgaaggactccctggggaagcagtggtctcagctctcggacaaaaagaggctgaaatggattcataaggccctggagcagcggaaggagtacgaggagatcatgagagactatatccagaagcacccagagctgaacatcagtgaggagggtatcaccaagtccaccctcaccaaggccgaacgccagctcaaggacaagtttgacgggcgacccaccaagccacctccgaacagctactcgctgtactgcgcagagctcatggccaacatgaaggacgtgcccagcacagagcgcatggtgctgtgcagccagcagtggaagctgctgtcccagaaggagaaggacgcctatcacaagaagtgtgatcagaaaaagaaagattacgaggtggagctgctccgtttcctcgagagcctgcctgaggaggagcagcagcgggtcttgggggaagagaagatgctgaacatcaacaagaagcaggccaccagccccgcctccaagaagccagcccaggaagggggcaagggcggctccgagaagcccaagcggcccgtgtcggccatgttcatcttctcggaggagaaacggcggcagctgcaggaggagcggcctgagctctccgagagcgagctgacccgcctgctggcccgaatgtggaacgacctgtctgagaagaagaaggccaagtacaaggcccgagaggcggcgctcaaggctcagtcggagaggaagcccggcggggagcgcgaggaacggggcaagctgcccgagtcccccaaaagagctgaggagatctggcaacagagcgttatcggcgactacctggcccgcttcaagaatgaccgggtgaaggccttgaaagccatggaaatgacctggaataacatggaaaagaaggagaaactgatgtggattaagaaggcagccgaagaccaaaagcgatatgagagagagctgagtgagatgcgggcacctccagctgctacaaattcttccaagaagatgaaattccagggagaacccaagaagcctcccatgaacggttaccagaagttctcccaggagctgctgtccaatggggagctgaaccacctgccgctgaaggagcgcatggtggagatcggcagtcgctggcagcgcatctcccagagccagaaggagcactacaaaaagctggccgaggagcagcaaaagcagtacaaggtgcacctggacctctgggttaagagcctgtctccccaggaccgtgcagcatataaagagtacatctccaataaacgtaagagcatgaccaagctgcgaggcccaaaccccaaatccagccggactactctgcagtccaagtcggagtccgaggaggatgatgaagaggatgaggatgacgaggacgaggatgaagaagaggaagatgatgagaatggggactcctctgaagatggcggcgactcctctgagtccagcagcgaggacgagagcgaggatggggatgagaatgaagaggatgacgaggacgaagacgacgacgaggatgacgatgaggatgaagataatgagtccgagggcagcagctccagctcctcctcctcaggggactcctcagactctgactccaactgaggctcagccccaccccagggcagccagggagagcccaggagctcccctccccaactgaccacctttgtttctcccccatgttctgtcccttgcccccctggcctcccccactttctttctttctttaaaaaaaaaaaaaaatacggtgggggtagggggctggaggagcccaggccaggactctgcagcctcagagacatcagcccttgggggtcctcctccagggacagcaactatcagactaagccagcaccggaccagcctggcccaccccacccacttctgcacttgcggttccggcatggacaatggaccggagagt

SEQ ID NO: 294626 - DNA, 2570 bp, Artificial Sequence
  derived and/or modified sequence
gcggagccgggctgcaggggctgggggagggggtcacgaggaagaggaggggcgcactcccattcccatagaccccttaagtctaataaggtcatggctgagtctctcagagtgtggacctgcccccttctactctgggcggttagaaagtcgttagtcgttcacctctcagccttcctgagtgggaactggtatgtcttccaaagggtgaggtggctttgaccccgggttgcccggccagcacgaccgaggaggtggctggacagctggaggatgaacggagaagccgactgccccacagacctggaaatggccgcccccaaaggccaagaccgttggtcccaggaagacatgctgactttgctggaatgcatgaagaacaaccttccatccaatgacagctccaagttcaaaaccaccgaatcacacatggactgggaaaaagtagcatttaaagacttttctggagacatgtgcaagctcaaatgggtggagatttctaatgaggtgaggaagttccgtacattgacagaattgatcctcgatgctcaggaacatgttaaaaatccttacaaaggcaaaaaactcaagaaacacccagacttcccaaagaagcccctgaccccttatttccgcttcttcatggagaagcgggccaagtatgcgaaactccaccctgagatgagcaacctggacctaaccaagattctgtccaagaaatacaaggagcttccggagaagaagaagatgaaatatattcaggacttccagagagagaaacaggagttcgagcgaaacctggcccgattcagggaggatcaccccgacctaatccagaatgccaagaaatcggacatcccagagaagcccaaaaccccccagcagctgtggtacacccacgagaagaaggtgtatctcaaagtgcggccagatgccactacgaaggaggtgaaggactccctggggaagcagtggtctcagctctcggacaaaaagaggctgaaatggattcataaggccctggagcagcggaaggagtacgaggagatcatgagagactatatccagaagcacccagagctgaacatcagtgaggagggtatcaccaagtccaccctcaccaaggccgaacgccagctcaaggacaagtttgacgggcgacccaccaagccacctccgaacagctactcgctgtactgcgcagagctcatggccaacatgaaggacgtgcccagcacagagcgcatggtgctgtgcagccagcagtggaagctgctgtcccagaaggagaaggacgcctatcacaagaagtgtgatcagaaaaagaaagattacgaggtggagctgctccgtttcctcgagagcctgcctgaggaggagcagcagcgggtcttgggggaagagaagatgctgaacatcaacaagaagcaggccaccagccccgcctccaagaagccagcccaggaagggggcaagggcggctccgagaagcccaagcggcccgtgtcggccatgttcatcttctcggaggagaaacggcggcagctgcaggaggagcggcctgagctctccgagagcgagctgacccgcctgctggcccgaatgtggaacgacctgtctgagaagaagaaggccaagtacaaggcccgagaggcggcgctcaaggctcagtcggagaggaagcccggcggggagcgcgaggaacggggcaagctgcccgagtcccccaaaagagctgaggagatctggcaacagagcgttatcggcgactacctggcccgcttcaagaatgaccgggtgaaggccttgaaagccatggaaatgacctggaataacatggaaaagaaggagaaactgatgtggattaagaaggcagccgaagaccaaaagcgatatgagagagagctgagtgagatgcgggcacctccagctgctacaaattcttccaagaagatgaaattccagggagaacccaagaagcctcccatgaacggttaccagaagttctcccaggagctgctgtccaatggggagctgaaccacctgccgctgaaggagcgcatggtggagatcggcagtcgctggcagcgcatctcccagagccagaaggagcactacaaaaagctggccgaggagcagcaaaagcagtacaaggtgcacctggacctctgggttaagagcctgtctccccaggaccgtgcagcatataaagagtacatctccaataaacgtaagagcatgaccaagctgcgaggcccaaaccccaaatccagccggactactctgcagtccaagtcggagtccgaggaggatgatgaagaggatgaggatgacgaggacgaggatgaagaagaggaagatgatgagaatggggactcctctgaagatggcggcgactcctctgagtccagcagcgaggacgagagcgaggatggggatgagaatgaagaggatgacgaggacgaagacgacgacgaggatgacgatgaggatgaagataatgagtccgagggcagcagctccagctcctcctcctcaggggactcctcagactctgactccaactgagg

SEQ ID NO: 294627 - DNA, 2330 bp, Artificial Sequence
  derived and/or modified sequence
ctggatttccgaggctggaggcgcctggccggctgggtggggaccaccatgggcaacgcggccggcagcgccgagcagcccgcgggccccgccgcgccgccccccaagcagcaccgctttgaaaagctgatggaatatttccggaatgaggacagcaacatcgacttcatggtggcctgcatgcagttcatcaacattgtggtacattcggtggagaacatgaacttccgtgtcttcctgcaatatgagttcacccacttgggcctggacctgtacttggagaggcttcggctcaccgagagtgacaagctgcaggtgcagatccaggcgtacctggacaatatttttgatgtgggggcgctgctggaggacacagagaccaagaacgctgtgctggagcacatggaggaactgcaggagcaagtggcgctgctgacagagcggcttcgggacgcggagaacgaatccatggccaagattgcagaactggaaaaacagctaagccaggcgcgcaaggagttggagaccctgcgggagcgcttcagcgaatcgaccgccatggggccctccaggcgtcccccagagcctgagaaagcgcctcccgctgccccgacgcggccctcggccctggagctgaaggtggaggagctggaggagaaggggttaatccgtattctgcgggggccgggggatgctgtctccatcgagatcctccccgtcgctgtggcaactccgagcggcggtgatgctccgactccgggggtgccgaccggctcccccagcccagatctcgcacctgcagcagagccggctcccggagcagcgccaccgccgccgccgccgcctcccggaggtcctcctgatgccctaggaagacgcgactcagaattgggcccaggagtgaaggccaagaagcccatccagactaagttccgaatgccactcttgaactgggtggcactgaaacccagccagatcaccggcactgtcttcacagagctcaatgatgagaaggtgctgcaggagctagacatgagtgattttgaggaacagttcaagaccaagtcccaaggccccagcctggacctcagcgctctcaagagtaaggcagcccagaaggcccccagcaaggcgacactcattgaggccaaccgggccaagaacttggccatcaccctgcggaagggcaacctgggggccgagcgcatctgccaagccattgaggcgtacgacctgcaggctctgggcctggacttcctggagctgctgatgcgcttcctgcccacagagtatgagcgcagcctcatcacccgctttgagcgggagcagcggccaatggaggagctgtcagaggaggaccgcttcatgctatgcttcagccgcatcccgcgcctgccggagcgcatgaccacactcaccttcctgggcaacttcccggacacagcccagctgctcatgccgcaactgaatgccatcattgcagcctcaatgtccatcaagtcctctgacaaactccgccagatcctggagattgtcctggcctttggcaactacatgaacagtagcaagcgtggggcagcctatggcttccggctccagagcctggatgcgctgttggagatgaagtcgactgatcgcaagcagacgctgctgcactacctggtgaaggtcattgctgagaagtacccgcaactcacaggcttccacagcgacctgcacttcctggacaaggcgggctcagtgtccctggacagtgtcctggcggacgtgcgctccctgcagcgaggcctagagttgacacagagagagtttgtgcggcaggatgactgcatggtgctcaaggagttcctgagggccaactcgcccaccatggacaagctgctggcagacagcaagacggctcaggctgtgcccacaggaggcctttgagtctgtggtggagtacttcggagagaaccccaagaccacatccccaggcctgttcttctccctctttagccgcttcattaaggcctacaagaaagctgagcaggaggtggaacagtggaaaaaagaagccgctgcccaggaggcaggcgctgataccccgggcaaaggggagcccccagcacccaagtcaccgccaaaggcccggcggccacagatggacctcatctctgagctgaaacggaggcagcagaaggagccactcatttatgagagcgaccgtgatggggccattgaagacatcatcacagatctgcggaaccagccctacatccgcgcagacacaggccgccgcagtgcccgtcggcgtcccccgggccccccactgcaggtcacctccgacc

SEQ ID NO: 294628 - DNA, 1881 bp, Artificial Sequence
  derived and/or modified sequence
atgggcaacgccgccggcagcgccgagcagcccgccggccccgccgcccccccccccaagcagcacagattcgagaagctgatggagtacttcagaaacgaggacagcaacatcgacttcatggtggcctgcatgcagttcatcaacatcgtggtgcacagcgtggagaacatgaacttcagagtgttcctgcagtacgagttcacccacctgggcctggacctgtacctggagagactgagactgaccgagagcgacaagctgcaggtgcagatccaggcctacctggacaacatcttcgacgtgggcgccctgctggaggacaccgagaccaagaacgccgtgctggagcacatggaggagctgcaggagcaggtggccctgctgaccgagagactgagagacgccgagaacgagagcatggccaagatcgccgagctggagaagcagctgagccaggccagaaaggagctggagaccctgagagagagattcagcgagagcaccgccatgggccccagcagaagaccccccgagcccgagaaggccccccccgccgcccccaccagacccagcgccctggagctgaaggtggaggagctggaggagaagggcctgatcagaatcctgagaggccccggcgacgccgtgagcatcgagatcctgcccgtggccgtggccacccccagcggcggcgacgcccccacccccggcgtgcccaccggcagccccagccccgacctggcccccgccgccgagcccgcccccggcgccgccccccccccccccccccccccccccggcggcccccccgacgccctgggcagaagagacagcgagctgggccccggcgtgaaggccaagaagcccatccagaccaagttcagaatgcccctgctgaactgggtggccctgaagcccagccagatcaccggcaccgtgttcaccgagctgaacgacgagaaggtgctgcaggagctggacatgagcgacttcgaggagcagttcaagaccaagagccagggccccagcctggacctgagcgccctgaagagcaaggccgcccagaaggcccccagcaaggccaccctgatcgaggccaacagagccaagaacctggccatcaccctgagaaagggcaacctgggcgccgagagaatctgccaggccatcgaggcctacgacctgcaggccctgggcctggacttcctggagctgctgatgagattcctgcccaccgagtacgagagaagcctgatcaccagattcgagagagagcagagacccatggaggagctgagcgaggaggacagattcatgctgtgcttcagcagaatccccagactgcccgagagaatgaccaccctgaccttcctgggcaacttccccgacaccgcccagctgctgatgccccagctgaacgccatcatcgccgccagcatgagcatcaagagcagcgacaagctgagacagatcctggagatcgtgctggccttcggcaactacatgaacagcagcaagagaggcgccgcctacggcttcagactgcagagcctggacgccctgctggagatgaagagcaccgacagaaagcagaccctgctgcactacctggtgaaggtgatcgccgagaagtacccccagctgaccggcttccacagcgacctgcacttcctggacaaggccggcagcgtgagcctggacagcgtgctggccgacgtgagaagcctgcagagaggcctggagctgacccagagagagttcgtgagacaggacgactgcatggtgctgaaggagttcctgagagccaacagccccaccatggacaagctgctggccgacagcaagaccgcccaggccgtgcccaccggcggcctgtag

SEQ ID NO: 294629 - DNA, 1881 bp, Artificial Sequence
  derived and/or modified sequence
atgggaaacgccgcaggtagtgcagagcaaccagctggcccagccgctcctcccccaaaacagcaccgctttgagaagctcatggaatatttccgcaatgaggactccaacattgacttcatggttgcttgcatgcagttcattaatatcgtggtgcatagcgtagagaacatgaactttcgtgtcttcttgcagtatgagttcactcacctgggactggacctgtacctggagcggctgagacttacggagagtgacaaacttcaggtccaaattcaagcgtacttagacaatatttttgacgtaggggccttgcttgaggacactgaaaccaagaacgcagtgctggaacacatggaggagctacaagaacaggtcgcactgttgactgaacgcttgagagacgcagaaaatgagagcatggccaagattgctgaactggagaagcagctttcccaggcacgcaaagaattagaaacattgcgagagcgattctctgagtcaactgctatgggacccagcagacggccacctgaaccagagaaggccccacctgcagcccccacccgcccttctgcattggaactcaaggtggaggaactcgaagagaagggattaattagaattctccggggtcccggcgatgccgtgtcaatcgagatcctcccagtggcagtcgctaccccaagcgggggggacgcacctacccccggggtgcccacgggctccccctcccctgatcttgctcccgctgccgagcctgccccgggagccgcaccaccgccacctccgccccctcccggtggcccacctgatgctcttggcaggcgggacagtgaacttgggcccggggtgaaggctaaaaaaccaattcagacaaaatttaggatgcctctgctcaactgggtcgcccttaagccttctcagatcacaggcaccgttttcaccgagctgaatgatgaaaaggtcctccaggagctggacatgtctgatttcgaggagcagttcaagactaagtcgcagggccccagtctcgatctgtccgctctcaagtccaaagctgcacagaaagccccaagcaaagccacactgatcgaggctaaccgggcaaagaatctggcaataaccctcaggaagggcaatctgggggctgagcgaatctgccaggccatagaggcttatgacctacaggccctgggcttagactttttggagttattaatgcgcttcttgccaactgagtatgagcggtcactgataacccgttttgaacgggagcaaagacctatggaggagctcagcgaggaggaccggttcatgctgtgcttcagcagaatcccacggctccctgaacgtatgaccacgctgacgtttctggggaacttccccgatacagcccaactgctgatgcctcaactcaatgccatcatcgctgcctccatgtcgatcaagagtagcgacaagctgagacagatactggaaatcgtgttagccttcggtaactatatgaactcctcaaagcgcggcgccgcgtacggcttcagactgcagtccttagacgctctgctggagatgaagagtaccgaccgcaagcaaaccctccttcattatctggtgaaggtaatcgctgaaaagtacccacagctgactgggttccattctgatttgcattttttggacaaggcaggtagcgtgagtctggatagcgttctggccgatgtccgctcactgcagcgtggactggaactgacgcagcgcgagttcgtccgtcaggatgactgtatggtcctgaaggagttcttgagagccaattcacccaccatggacaaattgctcgccgactcaaaaacagcacaggctgtccccaccgggggcctgtag

SEQ ID NO: 294630 - DNA, 1881 bp, Artificial Sequence
  derived and/or modified sequence
atgggaaatgctgctggcagcgctgagcagcctgctggccctgctgcccccccacccaagcagcacagatttgagaagctgatggagtacttcagaaatgaagacagcaacatcgacttcatggtggcctgcatgcagttcatcaacatcgtggtgcacagcgtggagaacatgaacttccgggtcttcctgcagtatgagttcacccacctgggcctggacctgtacctggagcggctgcggctgacagaaagtgacaagctgcaggtgcagatccaggcctacctggacaacatctttgatgtgggcgccctgctggaggacacagagaccaagaatgctgtgctggagcacatggaggagctgcaggagcaggtggccctgctgacagagcggctgagagatgctgaaaatgaatccatggccaagattgctgagctggagaagcagctgagccaggccaggaaggagctggagaccctgcgggagcgcttcagcgagagcacagccatgggccccagcagaagacctcctgagcctgagaaggcccccccagctgcccccacccggcccagcgccctggagctgaaggtggaggagctggaggagaagggcctcatccgcatcctgcggggccctggagatgctgtgtccattgagatcctgcctgtggccgtggccacccccagcggaggagatgcccccaccccaggagtgcccaccggcagccccagcccagacctggccccagctgctgagcccgcccctggggccgcccctcctcctcctcctcctcctcctgggggccccccagatgccctgggccggcgggacagcgagctgggccctggggtgaaggccaagaagcccatccagaccaagttcaggatgcccctgctgaactgggtggccctgaagcccagccagatcactggaacagtgttcacagagctgaatgatgagaaggtgctgcaggagctggacatgtctgactttgaggagcagttcaagaccaagagccagggccccagcctggacctgagcgccctgaagagcaaggccgcccagaaggcccccagcaaggccaccctgattgaggccaacagagccaagaacctggccatcaccctgaggaaaggaaacctgggcgctgagcgcatctgccaggccatcgaggcctatgacctgcaggccctgggcctggacttcctggagctgctgatgaggttcctgcccacagaatatgaaagaagcctcatcaccaggtttgagcgggagcagaggcccatggaggagctgtctgaggaggaccgcttcatgctgtgcttcagccgcatcccccggctgcctgagaggatgaccaccctgaccttcctgggcaacttcccagacacagcccagctgctgatgccccagctgaatgccatcatcgccgcctccatgagcatcaagagcagtgacaagctgcggcagatcctggagatcgtgctggcctttggaaactacatgaacagcagcaagagaggagctgcctacggcttccggctgcagagcctggatgccctgctggagatgaagagcacagacaggaagcagaccctgctgcactacctggtgaaggtgattgctgagaagtacccccagctgaccggcttccacagcgacctgcacttcctggacaaggccggctctgtgtccctggacagcgtgctggctgatgtgcgcagcctgcagaggggcctggagctgacccagcgggagtttgtgcggcaggatgactgcatggtgctgaaggagttcctgcgggccaacagccccaccatggacaagctgctggccgacagcaagacagcccaggccgtgcccactggaggcctgtag

SEQ ID NO: 294631 - DNA, 1881 bp, Artificial Sequence
  derived and/or modified sequence
atgggcaacgccgccggcagcgccgagcagcccgccggccccgccgcacccccccctaagcagcaccggttcgaaaagctcatggagtactttcgcaacgaggattccaatattgacttcatggtggcctgcatgcagttcattaacatcgtggtgcactctgtggagaacatgaacttccgggtattcctgcagtatgagtttactcatctgggattggatttatacctcgaaagactcaggttaaccgagtccgacaagctccaggttcagattcaggcatatcttgacaatatctttgacgtaggggccctgttagaagacaccgaaactaagaacgccgttctggagcatatggaggagcttcaagagcaggtagcgctacttacagagcggctaagagacgcagagaacgagtcaatggccaaaattgccgaattggagaagcaattgagtcaggcacgtaaagagctggaaaccctccgggaacgcttctcagagtcaacggccatggggccatctaggcgacctccagagccggaaaaggctccaccggccgcaccaacacgtccatctgcgctggagttaaaagtggaagaacttgaagaaaaggggctgatacgcatcctgcggggccccggggacgctgtttcaatcgagattttgccagtggcggtggcaaccccttcgggtggggatgctcccacccccggcgtacccacagggtctccttccccagatcttgccccggctgctgaaccggcgcctggcgctgcaccacctccaccccctcctcctcccggtgggcccccggatgctcttgggaggagagactctgaactcggaccgggtgtgaaagccaagaagccaattcaaacaaagttccgaatgcctttgctgaactgggttgcactgaagccgtcacagatcaccggaacggtttttaccgagctaaacgacgaaaaagtcttgcaggaacttgatatgtccgacttcgaagagcaattcaagacgaagagccaaggaccgtccctcgacctgagcgcactgaaatcaaaggccgcgcagaaggctccgtctaaagccacactaatagaggcaaatagagccaaaaaccttgcaattaccctgcgaaaaggcaatttgggggccgagcggatctgccaggcaatcgaggcttacgacctacaggctcttggccttgactttttggaacttctgatgcgcttcctcccaacggaatatgagcggagtctgattacacgatttgaacgggagcaaagacctatggaggaactgtcagaggaggaccgctttatgctgtgcttcagccggatcccccgacttcccgagaggatgacaacgttgacctttctaggcaattttccggatactgctcagcttctgatgcctcaactgaatgccataatagccgcaagcatgagcattaagtccagtgataagcttagacaaatactcgagattgttttagccttcggcaactacatgaatagcagcaagaggggcgcagcttacggcttccgcctccagagcctggatgcccttcttgaaatgaaatccacagaccgaaaacaaacattactgcactatctggtaaaagtgatagcggagaagtaccctcagcttaccggatttcactctgacctacacttcctcgataaggcagggtctgtgtcactggactccgtcctcgccgacgtgaggagcctgcagagaggcctggagcttacccagagagagtttgtccgtcaggacgactgtatggtgctaaaagaattcctaagggccaatagtccaactatggataagttgttggccgactctaaaaccgctcaagcagtcccaaccggcggactgtag

SEQ ID NO: 294632 - DNA, 1881 bp, Artificial Sequence
  derived and/or modified sequence
atgggcaacgcggctggcagcgctgaacagcctgctgggccagctgcccctccacctaagcaacatcgctttgaaaaattaatggaatatttcaggaacgaggattctaacatagatttcatggttgcctgcatgcagttcattaacatcgtcgtgcattctgtcgaaaacatgaattttcgggtctttctgcagtacgagttcactcatctgggtttagatttgtacctggaacggctccgtttaaccgagtccgacaaactccaggtccaaattcaggcctacctggataatatattcgatgtcggcgctctgctcgaagataccgagacaaagaacgctgtgctggagcatatggaggaactgcaagaacaggtcgccttactgactgaaaggctacgggacgctgaaaacgaatctatggccaagattgccgagcttgagaaacagctgtcccaagcgcgaaaggaacttgaaaccctaagggagcgctttagtgaatccacggcaatgggaccatctcgcagacccccagagcccgagaaagcccctccagcagcaccaacaaggcctagtgccctcgagctcaaggtggaagaactggaggagaaggggctgattcggatcctcaggggcccaggcgacgcagtgagcatcgaaatccttccggtggccgtagctactcccagtggaggagatgctcctactcccggtgtgccgactggttctccttccccagatctcgcccctgccgctgagccagcacctggggcagctccccctccccctccccctcctccgggaggtccaccagatgccttaggacgtcgcgacagcgaactggggcctggagttaaagctaagaaacctatccagacaaagttccggatgcctctcctgaattgggtagccctcaagccatcccagataacaggaactgttttcaccgaattaaacgatgagaaagtgcttcaagaacttgatatgagcgacttcgaagaacaatttaaaactaaatcacaagggccttctctggacctctctgcccttaagagcaaagctgctcagaaagccccaagcaaggctacattgatcgaagcgaatcgcgctaagaatcttgcaattacacttcggaagggtaatctgggagccgagagaatctgccaggctatcgaggcctacgatctgcaggccttgggccttgattttctggaactgctgatgcggtttctgccaacggagtacgagcgatcacttattaccagattcgagagagagcagcggcctatggaagaactcagtgaggaagatcgcttcatgctctgtttctctcgcatccccagactccccgagagaatgaccacgttaacgtttcttggaaactttccagatactgcacagctgttgatgccgcaattgaacgcgattatcgctgcctctatgtcaatcaaatcaagtgacaagctgcgtcagattctcgagattgtgctggctttcgggaattacatgaatagtagtaagcggggtgccgcttatgggttccgcctacaatccctggatgcgctcctggaaatgaagtcaacagatagaaaacagactttactccactaccttgtgaaggtcatcgccgagaagtacccacagttaactgggttccactccgacctccacttcctcgacaaggccggttcggtatctctcgacagcgtgctagctgatgtgagatccttgcagagggggctggaactgacccagcgggagttcgtccggcaggatgattgtatggtgttgaaggaattccttagggccaattctccgactatggacaaactgctcgctgactcaaaaacagcgcaagccgtgccaacagggggattatag

SEQ ID NO: 294633 - protein, 1104 aa, Artificial Sequence
  derived and/or modified sequence
MGNAAGSAEQPAGPAAPPPKQPAPPKQPMPAAGELEERFNRALNCMNLPPDKVQLLSQYDNEKKWELICDQERFQVKNPPAAYIQKLKSYVDTGGVSRKVAADWMSNLGFKRRVQESTQVLRELETSLRTNHIGWVQEFLNEENRGLDVLLEYLAFAQCSVTYDMESTDNGASNSEKNKPLEQSVEDLSKGPPSSVPKSRHLTIKLTPAHSRKALRNSRIVSQKDDVHVCIMCLRAIMNYQSGFSLVMNHPACVNEIALSLNNKNPRTKALVLELLAAVCLVRGGHDIILAAFDNFKEVCGEQHRFEKLMEYFRNEDSNIDFMVACMQFINIVVHSVENMNFRVFLQYEFTHLGLDLYLERLRLTESDKLQVQIQAYLDNIFDVGALLEDTETKNAVLEHMEELQEQVALLTERLRDAENESMAKIAELEKQLSQARKELETLRERFSESTAMGPSRRPPEPEKAPPAAPTRPSALELKVEELEEKGLIRILRGPGDAVSIEILPVAVATPSGGDAPTPGVPTGSPSPDLAPAAEPAPGAAPPPPPPLPGLPSPQEAPPSAPPQAPPLPGSPEPPPAPPLPGDLPPPPPPPPPPPGTDGPVPPPPPPPPPPPGGPPDALGRRDSELGPGVKAKKPIQTKFRMPLLNWVALKPSQITGTVFTELNDEKVLQELDMSDFEEQFKTKSQGPSLDLSALKSKAAQKAPSKATLIEANRAKNLAITLRKGNLGAERICQAIEAYDLQALGLDFLELLMRFLPTEYERSLITRFEREQRPMEELSEEDRFMLCFSRIPRLPERMTTLTFLGNFPDTAQLLMPQLNAIIAASMSIKSSDKLRQILEIVLAFGNYMNSSKRGAAYGFRLQSLDALLEMKSTDRKQTLLHYLVKVIAEKYPQLTGFHSDLHFLDKAGSVSLDSVLADVRSLQRGLELTQREFVRQDDCMVLKEFLRANSPTMDKLLADSKTAQEAFESVVEYFGENPKTTSPGLFFSLFSRFIKAYKKAEQEVEQWKKEAAAQEAGADTPGKGEPPAPKSPPKARRPQMDLISELKRRQQKEPLIYESDRDGAIEDIITDLRNQPYIRADTGRRSARRRPPGPPLQVTSDLSL

SEQ ID NO: 294634 - protein, 251 aa, Artificial Sequence
  derived and/or modified sequence
MASPKLVTSDTAAGKIRDILHDLEEIQEKLQESVTWKEAPEAQMQGELLEAPSSSSCPLPDQSHPALRRASRFAQWAIHPTFNLKSLSCSLEVSKDSRTVTVSHRPQPYRWSCERFSTSQVLCSQALSSGKHYWEVDTRNCSHWAVGVASWEMSRDQVLGRTMDSCCVEWKGTSQLSAWHMVKETVLGSDRPGVVGIWLNLEEGKLAFYSVDNQEKLLYECTISASSPLYPAFWLYGLHPGNYLIIKQVKV

SEQ ID NO: 294635 - protein, 613 aa, Artificial Sequence
  derived and/or modified sequence
  misc_feature (1)..(1): Xaa can be any naturally occurring amino acid
XHSFITPPTTPQLRRHTKLKPPRTPPPPSRKVFQLLPSFPTLTRSKSHESQLGNRIDDVSSMRFDLSHGSPQMVRRDIGLSVTHRFSTKSWLSQVCHVCQKSMIFGVKCKHCRLKCHNKCTKEAPACRISFLPLTRLRRTESVPSDINNPVDRAAEPHFGTLPKALTKKEHPPAMNHLDSSSNPSSTTSSTPSSPAPFPTSSNPSSATTPPNPSPGQRDSRFNFPAAYFIHHRQQFIFPDISAFAHAAPLPEAADGTRLDDQPKADVLEAHEAEAEEPEAGKSEAEDDEDEVDDLPSSRRPWRGPISRKASQTSVYLQEWDIPFEQVELGEPIGQGRWGRVHRGRWHGEVAIRLLEMDGHNQDHLKLFKKEVMNYRQTRHENVVLFMGACMNPPHLAIITSFCKGRTLHSFVRDPKTSLDINKTRQIAQEIIKGMGYLHAKGIVHKDLKSKNVFYDNGKVVITDFGLFGISGVVREGRRENQLKLSHDWLCYLAPEIVREMTPGKDEDQLPFSKAADVYAFGTVWYELQARDWPLKNQAAEASIWQIGSGEGMKRVLTSVSLGKEVSEILSACWAFDLQERPSFSLLMDMLEKLPKLNRRLSHPGHFWKSAEL

SEQ ID NO: 294636 - protein, 877 aa, Artificial Sequence
  derived and/or modified sequence
MDRAALRAAAMGEKKEGGGGGDAAAAEGGAGAAASRALQQCGQLQKLIDISIGSLRGLRTKCAVSNDLTQQEIRTLEAKLVRYICKQRQCKLSVAPGERTPELNSYPRFSDWLYTFNVRPEVVQEIPRDLTLDALLEMNEAKVKETLRRCGASGDECGRLQYALTCLRKVTGLGGEHKEDSSWSSLDARRESGSGPSTDTLSAASLPWPPGSSQLGRAGNSAQGPRSISVSALPASDSPTPSFSEGLSDTCIPLHASGRLTPRALHSFITPPTTPQLRRHTKLKPPRTPPPPSRKVFQLLPSFPTLTRSKSHESQLGNRIDDVSSMRFDLSHGSPQMVRRDIGLSVTHRFSTKSWLSQVCHVCQKSMIFGVKCKHCRLKCHNKCTKEAPACRISFLPLTRLRRTESVPSDINNPVDRAAEPHFGTLPKALTKKEHPPAMNHLDSSSNPSSTTSSTPSSPAPFPTSSNPSSATTPPNPSPGQRDSRFNFPAAYFIHHRQQFIFPDISAFAHAAPLPEAADGTRLDDQPKADVLEAHEAEAEEPEAGKSEAEDDEDEVDDLPSSRRPWRGPISRKASQTSVYLQEWDIPFEQVELGEPIGQGRWGRVHRGRWHGEVAIRLLEMDGHNQDHLKLFKKEVMNYRQTRHENVVLFMGACMNPPHLAIITSFCKGRTLHSFVRDPKTSLDINKTRQIAQEIIKGMGYLHAKGIVHKDLKSKNVFYDNGKVVITDFGLFGISGVVREGRRENQLKLSHDWLCYLAPEIVREMTPGKDEDQLPFSKAADVYAFGTVWYELQARDWPLKNQAAEASIWQIGSGEGMKRVLTSVSLGKEVSEILSACWAFDLQERPSFSLLMDMLEKLPKLNRRLSHPGHFWKSAEL

SEQ ID NO: 294637 - DNA, 1842 bp, Artificial Sequence
  derived and/or modified sequence
tgacactcattcatcactccaccaaccacacctcaactcagacggcatactaagttaaagcctcccagaaccccaccacctccatccagaaaagtgttccagctgctaccatctttccctacgctgactaggtccaaatcacacgagagtcagctcgggaatagaattgacgacgtctcttctatgagattcgacctaagccacggctctccgcagatggtccggcgcgatatcggcctgtctgtgacacatagattttctaccaagtcctggttatcacaggtgtgtcacgtgtgtcagaaaagcatgatttttggagtcaagtgcaagcactgcagactgaagtgtcacaacaagtgtacaaaggaggcccctgcctgcagaatcagctttctgcctctgacacggctgcgtcggactgagtcagtccctagcgacataaacaacccagtggaccgagctgcagaaccccacttcggaacactaccaaaggcgctcaccaagaaggaacacccacctgccatgaatcatctggactctagcagtaatccctcatcaacaacttccagtaccccatcatccccggcacctttccccacctcttccaatcctagctcagccactactcctcctaacccatctcccgggcagcgtgacagcaggttcaactttcctgcagcttattttatccatcaccgtcagcagtttattttccccgatatctccgcctttgctcatgcggcccccctgcctgaagcagcagacggtaccagactggatgatcagcccaaggcggatgtcctcgaggcccacgaagccgaggccgaggaacccgaagcaggaaagtccgaagctgaggacgatgaggacgaggtggatgatttgccatccagcaggcggccctggcggggccctatttcgaggaaggcaagccagacctcagtataccttcaggagtgggatattccatttgagcaagtagaactgggagagcctatcgggcaaggcaggtggggccgggtgcatcgcggccgatggcacggtgaggtagccataaggttgctcgaaatggacggacataaccaggatcacctgaaactctttaagaaggaggtgatgaattatagacagacacgacatgagaacgtggtgttgttcatgggagcttgcatgaatccccctcatctagccatcatcacctcattctgtaagggaaggacattgcacagttttgtgcgcgatcccaagactagcctcgatatcaacaagaccagacagatagcccaagaaattataaagggtatgggttatctccatgctaaaggcatcgtgcataaagacctgaaaagtaaaaacgtcttctacgacaatggcaaagtagtgattactgattttggcttgtttgggatttctggagtggtgcgggaaggacgtcgcgaaaatcagctgaagctttcccacgactggctctgttatctggctcctgagatcgtgagggagatgacgccaggaaaagatgaggaccagctgccattctcgaaagcagccgacgtgtacgctttcggaacagtctggtatgagctgcaggcgagggactggcccttgaagaatcaggccgccgaggcctccatatggcagatcggcagcggggagggtatgaaaagagttttgacttcagtcagcctggggaaagaggtttccgagatccttagtgcatgctgggcttttgacctgcaggaacgtccctcttttagtctgctgatggatatgctagaaaagctgccgaagttaaacagacggttatcccatcccggacatttttggaagagtgccgaactgtag

SEQ ID NO: 294638 - DNA, 2634 bp, Artificial Sequence
  derived and/or modified sequence
atggatagggccgccctgagggctgccgcaatgggagaaaagaaggagggcgggggtggcggcgatgcagccgccgcggagggaggcgcaggggccgcagcgagtcgagccttgcaacagtgcggtcaattgcagaaactgattgacatcagcatcggatctctccgtggactacgtacaaagtgcgctgtctctaatgacctgacgcagcaggaaatacgcaccctcgaggcaaaactagttaggtacatttgtaagcaaaggcagtgcaaattgtccgtggctccaggagagcgtacaccagaattgaattcctaccctcgttttagcgactggctgtatacatttaacgtcagacctgaggtggtacaagaaattcctcgcgacctgaccctcgacgcattattggagatgaacgaagctaaagtaaaggagactttgcggaggtgcggagcttcaggagacgaatgcggcagattacaatacgctctgacctgccttcgtaaagtgactgggttgggaggggagcacaaggaggactcttcttggtcctcactggacgcccgtcgtgagagtgggagtggcccgtcaacagataccctctctgccgccagcctgccgtggccccccggctccagtcagctgggacgagccggaaactccgctcaaggtccccggtctattagtgtcagcgccttgcccgcctcagactcacctacacccagcttttccgagggcctttctgatacttgcatcccactacacgcgtcaggccggctgacaccaagggcactgcactctttcattacacctcccaccacccctcaactgaggcgacacacaaaactgaaacccccccggacccctcccccgccgagcagaaaggtatttcagctcctgccctctttcccaacacttacgcgttccaaatctcacgaatctcagctgggaaacaggatcgacgatgtctcgtccatgcggttcgatctcagtcatggctcccctcaaatggtccgccgcgatataggcctgtctgtcacccatcgctttagtacaaagtcctggctctcccaggtttgccacgtatgccagaagtcaatgatttttggggtcaagtgtaagcattgtagactcaagtgccataataaatgcactaaagaggccccggcttgtcgcatttcattcctcccactcacccgactgaggcggaccgagagcgtaccaagcgacatcaataatccagtggaccgcgcggccgagcctcatttcggcacgttgcctaaggccctaacaaaaaaggaacaccccccagctatgaatcacctcgactcctctagtaacccctctagcacaacatcaagtactccaagtagtcccgcccccttccccacgtcttcgaacccttcttccgcgaccactcccccgaacccgagtcccgggcagcgggatagtaggtttaacttccctgcagcatacttcattcaccatcgccagcagttcatttttcctgatatctccgccttcgcccacgccgcacctctccccgaagccgcagacggaacacgcctggatgatcagccaaaagccgacgtactcgaggcacatgaggccgaagctgaagagcctgaggctggcaaatccgaggcagaggatgatgaagacgaagtggatgacctacctagtagtaggcgcccatggcgcggtccgatttcacggaaggcatcacagacatccgtctacttgcaggagtgggacattccctttgaacaggtcgaattaggcgaacctattggtcagggccgctggggaagggttcaccggggcagatggcacggggaggtggctatacgcctgctggagatggacggacacaatcaggatcacttaaaactttttaaaaaggaagtcatgaactacaggcagacaagacacgagaatgtggtgctattcatgggtgcatgtatgaatcccccgcatcttgccataataacatctttctgtaagggacggacacttcactcattcgtgagggatcccaagacgtccctagacattaataaaacccgtcagatcgcacaggagattatcaaagggatgggatacctgcacgccaaggggatcgtgcacaaggatctgaagagtaagaacgtattttatgataatggtaaggtggtaatcacggacttcgggttgttcggaatcagtggtgtggtacgagaaggacgcagagagaaccaactaaagctgtcacacgactggctgtgctatttagcccccgagatcgtaagagaaatgacccccggcaaggacgaagatcaactgcccttctcaaaggcagcagacgtctacgcttttgggaccgtttggtatgaactgcaggctcgggactggccactcaagaaccaggctgccgaggccagcatttggcagatcggctctggtgaagggatgaaacgcgtgctgactagtgtgtcgttagggaaagaggtcagcgaaatcctaagcgcatgctgggcctttgaccttcaagaacgacccagcttctctctcctgatggacatgctggagaagcttcctaaattaaaccggcgcctttcacaccctggacacttctggaagtctgcagagttgtag

SEQ ID NO: 294639 - DNA, 6340 bp, Artificial Sequence
  derived and/or modified sequence
gcacagcttcatcaccccgcccaccacaccccagctgcgacggcacaccaagctgaagccaccacggacgccccccccacccagccgcaaggtcttccagctgctgcccagcttccccacactcacccggagcaagtcccatgagtctcagctggggaaccgcattgatgacgtctcctcgatgaggtttgatctctcgcatggatccccacagatggtacggagggatatcgggctgtcggtgacgcacaggttctccaccaagtcctggctgtcgcaggtctgccacgtgtgccagaagagcatgatatttggagtgaagtgcaagcattgcaggttgaagtgtcacaacaaatgtaccaaagaagcccctgcctgtagaatatccttcctgccactaactcggcttcggaggacagaatctgtcccctcggacatcaacaacccggtggacagagcagccgaaccccattttggaaccctccccaaagcactgacaaagaaggagcaccctccggccatgaatcacctggactccagcagcaacccttcctccaccacctcctccacaccctcctcaccggcgcccttcccgacatcatccaacccatccagcgccaccacgccccccaacccctcacctggccagcgggacagcaggttcaacttcccagctgcctacttcattcatcatagacagcagtttatctttccagacatttcagcctttgcacacgcagccccgctccctgaagctgccgacggtacccggctcgatgaccagccgaaagcagatgtgttggaagctcacgaagcggaggctgaggagccagaggctggcaagtcagaggcagaagacgatgaggacgaggtggacgacttgccgagctctcgccggccctggcggggccccatctctcgcaaggccagccagaccagcgtgtacctgcaggagtgggacatccccttcgagcaggtagagctgggcgagcccatcgggcagggccgctggggccgggtgcaccgcggccgctggcatggcgaggtggccattcgcctgctggagatggacggccacaaccaggaccacctgaagctcttcaagaaagaggtgatgaactaccggcagacgcggcatgagaacgtggtgctcttcatgggggcctgcatgaacccgccccacctggccattatcaccagcttctgcaaggggcggacgttgcactcgtttgtgagggaccccaagacgtctctggacatcaacaagacgaggcaaatcgctcaggagatcatcaagggcatgggatatcttcatgccaagggcatcgtacacaaagatctcaaatctaagaacgtcttctatgacaacggcaaggtggtcatcacagacttcgggctgtttgggatctcaggcgtggtccgagagggacggcgtgagaaccagctaaagctgtcccacgactggctgtgctatctggcccctgagattgtacgcgagatgacccccgggaaggacgaggatcagctgccattctccaaagctgctgatgtctatgcatttgggactgtttggtatgagctgcaagcaagagactggcccttgaagaaccaggctgcagaggcatccatctggcagattggaagcggggaaggaatgaagcgtgtcctgacttctgtcagcttggggaaggaagtcagtgagatcctgtcggcctgctgggctttcgacctgcaggagagacccagcttcagcctgctgatggacatgctggagaaacttcccaagctgaaccggcggctctcccaccctggacacttctggaagtcagctgagttgtaggcctggctgccttgcatgcaccaggggctttcttcctcctaatcaacaactcagcaccgtgacttctgctaaaatgcaaaatgagatgcgggcactaacccaggggatgccacctctgctgctccagtcgtctctctcgaggctacttcttttgctttgttttaaaaactggccctctgccctctccacgtggcctgcatatgcccaagtaactgctctcagaggatcccactaactgagctccctccaaggcagtctgggcagcttctaactaccttcctggacatgactgattgctcccgtgttcttctgagggctggtcttgtttttgtttgggtggctctgtctcactgctaacaccttagtgagatgccttccaccctcctgagcacaccagcctcccactgggtgtgtgcctagtgcggggcgggcggaggttgggagggtgttggcttggcttttaacctgtggggattttgtccaacaaggagtggaatgatttcagagctgccctgaggctggcaccctggtcacaggaaccctctgcgctggctcctgtctcagtcccctctgtagagttagatcagaagacacagaaagttctgtggccatgaaagataccagcttggaagggttgtgtcttcagtggcaccctcagaaaaattgtcttaaagcaaagaggtacctggctccagacaatttttctgatgaaaacaaagtctctgccccgtccccaccctgccaccctggcaaagttacttcctttacagctgcccagtgtaccatagaccagaccccaggtcagcatttgtcaagagcatggctgctgagtcccctgtggcagtcaatgcactgtttaccaaatgcaggtttctgttctccctccccagcaagacctgctgaacccagatctctggaatggggccctaggaatttgcatttcaacctgcttcccaggtggccctgatgcaccccagtattagagtttattgctaaaaggaacatgccctgtcactcctggtatcctgggagtcatgtttctcttctctctcagttctacttggagcaagagctttcctgggctgcaaatgagaaaacaattcctaggaacccacagcagtactgagcatgctgggagcttgggacttggagatgaatgagccaccgttgctgctccaagtaggactacttggagtgtagctgaggccttggacgcagtatgaccaggggcagctctgccagggctgttggccaatcagtcattttcatttcttgttggaggccaggtcctctgctgaactcatttcctagctagtgttaccctaattctgatgaagatcaatggggctataattcttgtttttgttcctctttgcagcattaacagcagcaaagttgtaccccggtttgaaaggtttggcttgggcgtcctggagtccagtaatccaaagatgtagccagccatatggtttttcgctgctgatctctttctttttaaaatgtgtttctgaaacatcccaacaaccaccacgacaaaaaaacactgcctgcccagcgctgcaaaccaggagcacacgtcctagattcagactgttggccataaaccccactcgggagatggagctgcacctgctatttcttaaaatgacaccaccaacaaccaaacctgtcatgacagacagcaaatgtttacacgtatatttctcctgagtgaacctgatgttttacaataggtaataataaaaacagtctgtgcagatgcactggcactgacggccaggatggcggaaatggccatcccctctgaggaccttgtaggcggtgagggacccatgctgggccagaaggaagacaaacatggtaattgcagctgttcttggggtagggcggggagcccagaaggtctgatctggcctctgctttttggcccaagactccatcagggaaatctatctagggctctccccttgtcctttcaaagggatactgccccttcctcgtcttgcagaggaaaccctggctaggaactgagctagtttatggagtctggaattcctggagagcttgggttcaccttctcacccctgtaatccaggctgctcctgctggaaaagtagaaacagaatccaaaaaaggtctggactcacccggtggttcccagccagggtttctgctgcaaggtgaggaaacatccatggcttgtacagatgtgagtctttgatgaagcccccaggcaggcaccaaggtgatgggactcagggccttggcttttagatacatcccagtccctgactgacatctgaccatgagggctggatgggtgggaacaaggaggagtagatggcaaaagtacctgagcccacttcccagccacagggtgaccctggcactgtaaaaaccctttgtcagtcatgccagaaggttctagaactgcccacctcttccatttcagtcctgctgaaaccccttagcctatttccgactcctctgtccatgctctgagttcagctgggcagtgtgtgggctatcacccctttcatttagacctacctagctggcccccatctgcagagccttccttagcaccattaggccttctacttgtgtccatttgaagcaggaggggctggatttggaaaagtctttgaagtgagagcaccacgcttgtcttcgttagaaactcttaactgcagaaaaaagttccagatggcaagggagcccttaagtggagattaggttgcattagactccaaaaccagaaaggaaaaagggtgatgggagtggagacgtgattggattcaggcccagaacctgtgaccatgctctgagctcagacttggggagggaggggtgtggctcccaccccttccagttaagacctgcctagcagagccccagtctccagccccttccctagcaccagagtctggtcaaaatgccacagaaaatgagctgctctgccagcaagctgtggagctgcctcctctccaggcctggcatcccttggtcagcccctcctgggagggcacagccgtattacagtgccagtgtgcctggccatcagcatcttcacccttcccagtctgtgtggggaggctgtaaaccccgtggattcagctccgtgtggagtttctgtgctatggtgggactgctcattttgccccatcatccctttggcctcccacacacctgccccttcccagggatcacgtgtgtctccagcctttcacctttctattgcaatggtggcctttgtccaggcaagagcaggcctgatggatgtactggtgagccccacagttggatgtcagctcagccgtccaactgggaggaacagtaggctcagttcctccctgacccctgacaccaggccgcagtgggcatgcacaggcccacagaaagtcagtctgggttttgcttttctcgtgagcatcacagttaaagaagcgctcattgagcaactacagtgcacttggtcttctgcaagtgctgggcacctagagataggaacagtcatggtccctgctcttaaggaactgatgacctggtggggccctgttgtcttcaaggaacccagaagccactgggccccaaaggtggaactgaaggactgggggcagctggctctcagcctgccacctctgcactgcctgcctttaaagaaccccaccccaccccatgatggccccctctgttccccttgtatttcagtgactgtgaattgaggttaggaaggcacacctgcccttctgtgtgctctctccacacgaaggatgacagatactgtgaattcagccctcacggccaactgtgaaggggatggagaaggctgggagggctcggggagagctcttaggggctgcggaagtccccacgggggtctgagagtggagcccaagctttggccctccaggcatccccagtttccagcctcacctctgaagccctgctgcctttaaccaccagagccgcagccccctgggtttctgtctaactcgaagtcttgaatcctagctagtttggggttgtgagcagtgtgtagcaaagttgatctctccatgtcaccaaatcaaaacaccctctgtcatcctacggcatttcctcttgaggtcacagagaggaatggcaagccctggaaacctgtgttattctgtgttgatttggtgtggggggagggtggagacgtaaatgtgaagccagttggagtttgtgctatgcagcagtgttagccaggatctcatcagcgtgcaaacctagcatcttctgtggccacaagccacacacttgctttttttgaatgtgatgtaaaatttgtacagtaaagtttttatattttctatcaactacatttgtcttccagacatgctattaatttaaattaaaatggttagtattaacaaacatgctgtatcgggtttttttgccactggcaagaacatgccctctgtgctaagccaggcctgggtgtctggagtttgtgaataaagttataccaaggtg

SEQ ID NO: 294640 - DNA, 2631 bp, Artificial Sequence
  derived and/or modified sequence
atggatagagcagcgctgcgcgcggcggcgatgggagagaagaaggagggcggtggcgggggggatgcggcggccgcggagggaggcgcaggggccgcggccagccgggcgctgcagcagtgcgggcagctccagaagctcatcgacatctccatcggcagcctgcgcgggctgcgcaccaagtgcgctgtgtccaacgacctcacccagcaggagatacggaccctggaggcgaagctggtccgttacatttgtaagcagaggcagtgcaagctgagcgtggctcccggtgagaggaccccagagctcaacagctacccccgcttcagcgactggctgtacactttcaacgtgaggccggaggtggtgcaggagatcccccgagacctcacgctggatgccctgctggagatgaatgaggccaaggtgaaggagacgctgcggcgctgtggggccagcggggatgagtgtggccgtctgcagtatgccctcacctgcctgcggaaggtgacaggcctgggaggggagcacaaggaggactccagttggagttcattggatgcgcggcgggaaagtggctcagggccttccacggacaccctctcagcagccagcctgccctggcccccagggagctcccagctgggcagagcaggcaacagcgcccagggcccacgctccatctccgtgtcagctctgcccgcctcagactcccccacccccagcttcagtgagggcctctcagacacctgtattcccctgcacgccagcggccggctgaccccccgtgccctgcacagcttcatcaccccgcccaccacaccccagctgcgacggcacaccaagctgaagccaccacggacgccccccccacccagccgcaaggtcttccagctgctgcccagcttccccacactcacccggagcaagtcccatgagtctcagctggggaaccgcattgatgacgtctcctcgatgaggtttgatctctcgcatggatccccacagatggtacggagggatatcgggctgtcggtgacgcacaggttctccaccaagtcctggctgtcgcaggtctgccacgtgtgccagaagagcatgatatttggagtgaagtgcaagcattgcaggttgaagtgtcacaacaaatgtaccaaagaagcccctgcctgtagaatatccttcctgccactaactcggcttcggaggacagaatctgtcccctcggacatcaacaacccggtggacagagcagccgaaccccattttggaaccctccccaaagcactgacaaagaaggagcaccctccggccatgaatcacctggactccagcagcaacccttcctccaccacctcctccacaccctcctcaccggcgcccttcccgacatcatccaacccatccagcgccaccacgccccccaacccctcacctggccagcgggacagcaggttcaacttcccagctgcctacttcattcatcatagacagcagtttatctttccagacatttcagcctttgcacacgcagccccgctccctgaagctgccgacggtacccggctcgatgaccagccgaaagcagatgtgttggaagctcacgaagcggaggctgaggagccagaggctggcaagtcagaggcagaagacgatgaggacgaggtggacgacttgccgagctctcgccggccctggcggggccccatctctcgcaaggccagccagaccagcgtgtacctgcaggagtgggacatccccttcgagcaggtagagctgggcgagcccatcgggcagggccgctggggccgggtgcaccgcggccgctggcatggcgaggtggccattcgcctgctggagatggacggccacaaccaggaccacctgaagctcttcaagaaagaggtgatgaactaccggcagacgcggcatgagaacgtggtgctcttcatgggggcctgcatgaacccgccccacctggccattatcaccagcttctgcaaggggcggacgttgcactcgtttgtgagggaccccaagacgtctctggacatcaacaagacgaggcaaatcgctcaggagatcatcaagggcatgggatatcttcatgccaagggcatcgtacacaaagatctcaaatctaagaacgtcttctatgacaacggcaaggtggtcatcacagacttcgggctgtttgggatctcaggcgtggtccgagagggacggcgtgagaaccagctaaagctgtcccacgactggctgtgctatctggcccctgagattgtacgcgagatgacccccgggaaggacgaggatcagctgccattctccaaagctgctgatgtctatgcatttgggactgtttggtatgagctgcaagcaagagactggcccttgaagaaccaggctgcagaggcatccatctggcagattggaagcggggaaggaatgaagcgtgtcctgacttctgtcagcttggggaaggaagtcagtgagatcctgtcggcctgctgggctttcgacctgcaggagagacccagcttcagcctgctgatggacatgctggagaaacttcccaagctgaaccggcggctctcccaccctggacacttctggaagtcagctgagctg

SEQ ID NO: 294641 - DNA, 1842 bp, Artificial Sequence
  derived and/or modified sequence
tgacattccttcatcaccccacccaccaccccccagctgcggcggcacaccaagctgaagccacccaggaccccacctccacccagcaggaaggtgttccagctgctgcccagcttccccaccctgaccaggagcaagagccatgagagccagctgggcaacagaattgatgatgtgtcctccatgagatttgacctgagccacggcagcccccagatggtgagaagagacatcggcctgtctgtgacccaccgcttcagcaccaagtcctggctgagccaggtgtgccacgtgtgccagaagtccatgatctttggagtgaagtgcaagcactgccgcctgaagtgccacaacaagtgcaccaaggaggccccagcctgccgcatctccttcctgcccctgacccggctgcggaggacagagagcgtgcccagcgacatcaacaaccctgtggacagagctgctgagccccacttcggcaccctgcccaaggccctgaccaagaaggagcaccccccagccatgaaccacctggacagcagcagcaaccccagcagcaccaccagcagcacccccagcagccctgcccccttccccaccagcagcaaccccagcagcgccaccaccccacccaaccccagccctggccagagggacagccgcttcaacttccctgctgcctacttcatccaccaccggcagcagttcatcttcccagacatcagcgcctttgcccatgctgcccccctgcctgaggccgcagatggcacccggctggatgaccagcccaaggcagatgtgctggaggcccatgaagctgaggccgaggagcctgaggccggcaagtctgaggccgaggatgatgaagatgaggtggatgacctgcccagcagcagaagaccctggaggggccccatcagcaggaaggccagccagacctctgtgtacctgcaggagtgggacatcccctttgagcaggtggagctgggggagcccatcggccagggccgctggggccgggtgcaccggggccgctggcatggagaggtggccatccggctgctggagatggatggccacaaccaggaccacctgaagctgttcaagaaggaggtgatgaactaccggcagaccaggcatgaaaatgtggtgctcttcatgggcgcctgcatgaaccccccccacctggccatcatcaccagcttctgcaagggccgcaccctgcacagctttgtgcgggaccccaagaccagcctggacatcaacaagacccggcagatcgcccaggagatcatcaagggcatgggctacctgcacgccaagggcatcgtgcacaaggacctgaagagcaagaatgtgttctatgacaatggcaaggtggtgatcacagactttggcctgtttggcatctctggagtggtgcgggagggccggcgggagaaccagctgaagctgagccatgactggctgtgctacctggcccctgagatcgtgcgggagatgaccccaggcaaggatgaggaccagctgcccttcagcaaggccgcagatgtgtatgcctttggaacagtgtggtatgagctgcaggcccgggactggcccctgaagaaccaggccgctgaggccagcatctggcagatcggcagcggggagggcatgaagagggtgctgacctctgtgtccctgggcaaggaggtgtctgagatcctgagcgcctgctgggcctttgacctgcaggagcggcccagcttcagcctgctgatggacatgctggagaagctgcccaagctgaacagaaggctgagccaccctggccacttctggaagtctgctgagctgtag

SEQ ID NO: 294642 - DNA, 2634 bp, Artificial Sequence
  derived and/or modified sequence
atggaccgggccgccctgcgggctgctgccatgggagagaagaaggagggcggcggcggcggagatgctgctgctgctgagggcggggccggggctgctgccagccgggccctgcagcagtgtggccagctgcagaagctgattgacatcagcatcggcagcctgcggggcctgcggaccaagtgtgctgtgtccaatgacctgacccagcaggagatccgcaccctggaggccaagctggtgcgctacatctgcaagcagaggcagtgcaagctgtctgtggcccctggagagaggaccccagagctgaacagctacccccgcttcagtgactggctgtacaccttcaacgtgcggcctgaggtggtgcaggagatcccccgggacctgaccctggatgccctgctggagatgaatgaggccaaggtgaaggagaccctgcggcgctgtggggccagcggagatgaatgtggccgcctgcagtatgccctgacctgcctgaggaaggtgacaggcctgggcggggagcacaaggaggacagctcctggagcagcctggatgcccggcgggagagcggcagcggccccagcacagacaccctgtctgctgccagcctgccctggcccccaggcagcagccagctgggccgggccggcaacagcgcccagggccccaggagcatctctgtgtctgccctgcctgccagtgacagccccacccccagcttcagcgagggcctgagtgacacctgcatccccctgcacgccagcggccgcctgaccccccgggccctgcacagcttcatcaccccacccaccaccccccagctgcggcggcacaccaagctgaagccacccaggaccccacctccacccagcaggaaggtgttccagctgctgcccagcttccccaccctgaccaggagcaagagccatgagagccagctgggcaacagaattgatgatgtgtcctccatgagatttgacctgagccacggcagcccccagatggtgagaagagacatcggcctgtctgtgacccaccgcttcagcaccaagtcctggctgagccaggtgtgccacgtgtgccagaagtccatgatctttggagtgaagtgcaagcactgccgcctgaagtgccacaacaagtgcaccaaggaggccccagcctgccgcatctccttcctgcccctgacccggctgcggaggacagagagcgtgcccagcgacatcaacaaccctgtggacagagctgctgagccccacttcggcaccctgcccaaggccctgaccaagaaggagcaccccccagccatgaaccacctggacagcagcagcaaccccagcagcaccaccagcagcacccccagcagccctgcccccttccccaccagcagcaaccccagcagcgccaccaccccacccaaccccagccctggccagagggacagccgcttcaacttccctgctgcctacttcatccaccaccggcagcagttcatcttcccagacatcagcgcctttgcccatgctgcccccctgcctgaggccgcagatggcacccggctggatgaccagcccaaggcagatgtgctggaggcccatgaagctgaggccgaggagcctgaggccggcaagtctgaggccgaggatgatgaagatgaggtggatgacctgcccagcagcagaagaccctggaggggccccatcagcaggaaggccagccagacctctgtgtacctgcaggagtgggacatcccctttgagcaggtggagctgggggagcccatcggccagggccgctggggccgggtgcaccggggccgctggcatggagaggtggccatccggctgctggagatggatggccacaaccaggaccacctgaagctgttcaagaaggaggtgatgaactaccggcagaccaggcatgaaaatgtggtgctcttcatgggcgcctgcatgaaccccccccacctggccatcatcaccagcttctgcaagggccgcaccctgcacagctttgtgcgggaccccaagaccagcctggacatcaacaagacccggcagatcgcccaggagatcatcaagggcatgggctacctgcacgccaagggcatcgtgcacaaggacctgaagagcaagaatgtgttctatgacaatggcaaggtggtgatcacagactttggcctgtttggcatctctggagtggtgcgggagggccggcgggagaaccagctgaagctgagccatgactggctgtgctacctggcccctgagatcgtgcgggagatgaccccaggcaaggatgaggaccagctgcccttcagcaaggccgcagatgtgtatgcctttggaacagtgtggtatgagctgcaggcccgggactggcccctgaagaaccaggccgctgaggccagcatctggcagatcggcagcggggagggcatgaagagggtgctgacctctgtgtccctgggcaaggaggtgtctgagatcctgagcgcctgctgggcctttgacctgcaggagcggcccagcttcagcctgctgatggacatgctggagaagctgcccaagctgaacagaaggctgagccaccctggccacttctggaagtctgctgagctgtag

SEQ ID NO: 294643 - DNA, 1842 bp, Artificial Sequence
  derived and/or modified sequence
tgacacagcttcatcaccccccccaccaccccccagctgcggcggcacactaaactgaagcctccacgcacacccccccccccatcacggaaagtgtttcagctcctgccctcttttcccaccctgacccgcagtaagagtcatgaatctcagctgggcaatcggatcgatgatgtcagtagtatgaggtttgacttgtcacacgggagcccccagatggttaggagggatatcgggctgtcagtaactcataggtttagcaccaagtcttggctgtcccaggtctgccatgtgtgccagaagtccatgatttttggagttaaatgtaaacattgccggctgaaatgccacaacaagtgcacgaaggaggcaccagcgtgtcgtattagtttcctgcctctgacgcgccttaggaggactgagagcgttccatccgacattaataatccagtggatcgcgctgcagaaccccactttggaactctgcctaaggccctaacaaagaaagagcatcctccagcaatgaaccatctggacagcagcagtaacccaagttctaccactagctcaaccccctcttcccctgcgccttttcccacctcctctaacccttcttcagccacaacaccccctaacccttcgcctggccagagggacagccgcttcaattttcctgctgcttattttatccaccatcgacagcagtttatattcccagacatttccgctttcgcgcatgccgcccctctgcctgaagccgctgatggcacaaggctggatgaccagcccaaagctgacgttctggaagcacacgaggcggaggcggaagagcctgaagcaggcaagtctgaggccgaagacgatgaggacgaagtcgacgacctgccatccagtaggaggccgtggcgagggcccatcagtaggaaggcatcacagacctcagtgtacttgcaagaatgggatataccttttgaacaggtggagcttggcgagcccattggccagggccgatggggtcgtgtacaccgggggcggtggcacggagaagtggctatccgactgctcgaaatggacgggcacaatcaggaccacctcaagctgtttaagaaagaggtcatgaattacagacaaacccggcatgagaatgtggtcttgtttatgggagcctgcatgaaccctccccacttggctatcatcactagcttctgcaaaggacgaactctgcatagcttcgtccgggatccgaagacttcgttggatatcaataagactagacagatagcccaagaaattataaaaggaatgggatatctgcacgcgaaaggtattgttcacaaagacctcaagtccaagaatgtattttacgataatggaaaagtcgtgattactgactttggactgttcggtatctctggcgtggttcgggaaggcagaagggaaaatcagctgaagctttcacatgactggttatgctaccttgctccagaaattgtacgagagatgacgccagggaaagacgaggatcagctgcccttcagcaaagccgccgacgtgtacgcatttggaacagtgtggtatgagctgcaagcacgggattggcctctgaagaaccaggccgcagaagcatccatttggcagatcggatccggtgaggggatgaaacgagtgctcacgagcgtgagcctcggtaaagaggtcagcgagattttatctgcctgctgggcttttgacctccaggagagacccagtttctcattgctgatggacatgctcgaaaaactgcctaagctcaatcgtcgactgtctcatccaggccacttttggaaatctgccgagctgtag

SEQ ID NO: 294644 - DNA, 2634 bp, Artificial Sequence
  derived and/or modified sequence
atggaccgggccgccctgcgggccgccgccatgggcgagaagaaggaaggcggtggagggggcgacgctgccgccgctgaagggggggctggtgccgcagcaagtcgcgcccttcagcagtgtgggcagctgcagaagctaatcgacatcagcatcgggtctttaagaggtctccggacaaaatgtgccgtgagcaatgacctgacgcagcaggaaatccgaaccctcgaagctaagctagtaagatacatctgcaagcaacgtcagtgtaagttatccgtggctcctggagaaagaacacccgagctgaacagctacccccggttcagcgactggctgtacacttttaatgtgcggcccgaagtggtccaagagatcccgcgcgacctgacattggacgcacttttagaaatgaacgaagcaaaagtgaaggaaacactgaggaggtgcggggcgtccggcgatgaatgtgggcgcctgcagtatgctctgacttgcctacgcaaggtgacaggacttggaggagaacacaaagaagatagttcatggagttcgctggacgctagaagagagtcaggaagcggcccctcaactgacactctgtcagctgcttcattgccctggcctcctggcagttcacagcttggcagagctggcaattctgcccaagggccccgatcaatctccgtctctgccctgcccgccagtgattctcctacgccgagtttctctgaagggctgagcgatacctgtattcccctacatgctagtgggcgattgaccccccgtgctctacatagtttcatcactccgccaacaactccccagcttagacggcacaccaagcttaagccccctagaactccaccccccccttcacgaaaagtctttcagctgctgccatcttttccaacactcacacgctctaaatcacacgagtcccagctaggaaaccgaatcgatgacgttagctccatgcgtttcgatctgtcccacggatcaccccaaatggtgcgacgggacatcggattatccgtgacccaccggttctctaccaagagttggctgagccaagtctgccacgtttgtcaaaagtccatgattttcggcgtgaagtgcaaacattgccggctcaaatgccataataagtgcactaaagaggctcctgcctgtagaatatccttcttgccactgacaaggttaaggcgaaccgaaagtgtaccttcagatattaataacccagtggaccgcgcagccgagccccacttcggtaccttacctaaagccctgacgaagaaggaacatccaccagcaatgaatcacctggacagctcaagtaacccgtcctcaacaacatccagcacgccctcatcccccgccccattcccaacatccagcaatcctagcagtgcaacgacaccacccaacccctccccaggccagcgcgacagcagattcaactttccggccgcctattttatacatcatagacaacaattcatcttcccggatatcagcgcctttgcacacgccgcaccactgccagaggccgcagatggaacccgtctggatgaccagcccaaggctgatgtgctggaagcacacgaggccgaggccgaagaaccagaagccgggaaaagcgaggctgaggatgatgaggatgaagtagacgacctgccttcctctcgacgcccttggcggggaccaattagcagaaaggcgtcacaaaccagcgtgtatttgcaggaatgggatatcccttttgagcaggtggaactaggcgagcccatcggccagggccgctggggcagggtccacagggggcggtggcacggggaggtcgcaatcaggctgctggaaatggatggccataaccaagaccatctgaaactgtttaagaaggaggtcatgaactataggcagacccgccacgaaaacgtcgtgttgtttatgggcgcatgtatgaaccctcctcacctggcgataatcacttctttttgtaagggcagaactctgcacagtttcgtgcgagatcccaagacaagcctagacatcaataaaacacgacagattgcacaagagatcatcaaaggtatgggataccttcacgcaaaaggtatcgttcacaaagacttgaaatcaaagaacgtgttttacgacaacggaaaagtggtgataaccgacttcggactgttcggtattagcggagtagtgagagaggggaggagggagaaccagctgaaactctcccacgactggctgtgctacctggccccggagatcgtacgcgaaatgacccccggcaaagacgaggaccagctgcccttctcgaaggctgccgacgtctacgcattcggaaccgtttggtacgagctgcaggcccgagactggcccctgaaaaatcaggccgctgaggcaagcatttggcagatcggatccggggaagggatgaaaagagtcctgaccagcgtttccctgggaaaagaggtttccgaaatcctcagcgcttgttgggcttttgacttgcaagagaggcccagcttttctctcctcatggatatgctagagaagctgccgaagttgaaccgccgactgtcccaccctggccacttctggaaatctgccgaactctag

SEQ ID NO: 294645 - DNA, 1842 bp, Artificial Sequence
  derived and/or modified sequence
tgacacagtttcattacgcccccaacaaccccacagctgagaaggcatactaagttaaaacctcctcgaacccctcctcctccctctcgcaaagtgtttcaactgctgcctagctttcccaccctgacacgaagtaaatctcatgagtcccagttggggaaccgaatagatgatgtgtcctctatgcggttcgatctctcacacggctccccccaaatggtgcggagagacattggcctttctgtgacccaccggttctcaacaaaatcatggcttagccaggtttgccacgtttgtcagaaatcaatgatctttggcgtgaaatgcaagcactgtaggctgaaatgtcacaataagtgcactaaggaagccccagcatgccgaattagtttcttacccttgaccaggctccgcagaaccgaatctgtgccaagtgatatcaataaccccgtcgacagggctgccgagccacatttcggaacactgcccaaggcgcttactaaaaaggaacacccacctgccatgaaccacctggactcgtctagtaatcctagctctacgaccagctctaccccatcaagcccagcaccctttccgaccagtagcaatccctcatcagccacgactccccctaatcccagcccaggccagcgcgattctaggttcaacttcccagccgcttactttatccaccacagacaacaattcatcttccctgacatttccgcctttgcccacgccgcaccactgccggaagccgctgatggcacgagactggacgaccagccaaaggccgatgtgcttgaagcccacgaggccgaggccgaggagcctgaggcaggaaaatctgaagctgaagacgacgaggacgaagtggatgatctgccttctagcagaaggccatggaggggacctatatcccgcaaggcctcccagaccagtgtctacctccaggagtgggacatccctttcgagcaggtggagcttggcgagccaattggccaaggcaggtgggggcgagtccatcgaggacggtggcacggggaggtcgcgattaggctgctggaaatggatggacataatcaggatcatttgaagcttttcaaaaaagaagttatgaattacaggcagaccagacacgagaacgtagttctatttatgggagcttgcatgaatccccctcatctggcaattattacatctttttgcaaaggtaggaccctccattctttcgtacgcgaccccaagacgagtctcgatattaacaagacacggcagatcgcccaggagataatcaaagggatgggctacctgcacgctaaggggattgttcacaaagacctgaagagcaagaacgttttctacgataatggtaaggtggttatcacagatttcggcctgttcggcatcagtggtgttgtccgcgaaggtaggcgtgagaatcagctcaaactgtcgcacgattggctctgttatctagcccctgagattgtgagggaaatgactcccggaaaagatgaagatcaactgccattctctaaggctgctgacgtgtatgcttttggtaccgtgtggtatgagctccaggctcgggactggccacttaaaaaccaggccgctgaggctagtatatggcaaatcggatccggggaagggatgaagagagtgttgacctctgtgagtttggggaaggaggtctctgaaattctgtccgcctgctgggccttcgatctccaagagcgaccctcttttagtctgctgatggacatgctggagaagcttcccaaacttaataggcgtcttagccatcccggacatttctggaaaagcgcggagctgtag

SEQ ID NO: 294646 - DNA, 2634 bp, Artificial Sequence
  derived and/or modified sequence
atggaccgggctgccctgcgcgctgccgcaatgggagagaaaaaggaaggaggcggaggcggagatgcagccgcagccgagggcggtgccggagccgctgcaagccgcgctctccagcagtgtggtcagctccagaagctgatcgacatcagcattggaagtctgcggggtctgagaacaaagtgcgctgtttccaacgatctcactcaacaggagatacgtacactggaggctaagctcgtgaggtacatctgtaaacagcgccagtgcaagttgagtgtcgctcctggcgaacgaacccccgagctcaacagctaccccagattcagcgattggctgtacacctttaacgtgcgtcctgaggtggtacaggaaatccctagagacctcacgttggacgcactactagaaatgaatgaggccaaagttaaggaaacactgcgccgttgcggtgcctctggcgatgagtgcgggaggctgcagtacgcacttacctgtctgcgtaaagtgacaggcctgggcggagaacacaaggaggattccagctggtcatctcttgatgccaggagggaaagcggatccggccctagcaccgacactctgtctgctgccagcctgccttggcccccaggctctagccagctgggcagggccggaaactctgctcaagggcctagatcaatatcagtgtctgcccttcctgcaagcgacagccctactcctagcttttcggagggtttgtctgatacctgcatacccttgcacgcttccgggcgtctgaccccaagagccctccactctttcattacacctccaactaccccgcaacttcggaggcacacgaaattgaaacctcctaggacaccgcctccaccatctcgcaaagtcttccagctcctgccttcttttcctactctgactagatccaagtcacatgaatcccagctcggtaaccgtatagatgatgtcagttccatgagatttgatctgtcacatggaagcccacaaatggtcaggagagatatcggccttagtgttacgcatcggttcagtaccaagagctggcttagccaggtgtgtcacgtctgccagaagtccatgatattcggagtcaaatgtaagcattgtcgtctcaaatgccacaataaatgtactaaggaggcacccgcatgcagaatctctttcttgccattgacccgattgcgccgaacggagtccgtcccttcagatatcaataacccagtggatagagctgctgaaccccactttggaaccctccctaaggctttgactaagaaagagcatccacccgctatgaaccacctggattcttccagtaacccgagctccaccacgagctctacgccctctagcccagctccctttcctacttcctcaaaccccagtagcgccacaaccccacctaacccctcccccggtcaacgagactcaaggtttaattttcctgcagcatacttcattcatcatcgtcagcagtttatctttcctgatatcagtgcgtttgcccacgctgccccactacccgaggcagctgatggaacccggctagatgaccagcccaaagctgacgttttggaagcgcacgaagcagaggccgaagaaccagaggccggaaagagcgaagccgaggatgacgaggatgaggtagacgacctaccctcctcacgcagaccctggcggggtcctatctcaagaaaggcaagccagactagtgtgtacctgcaggaatgggacatcccattcgaacaagtggaactgggcgagccaatcggccaaggacgttgggggcgagttcaccgcggtaggtggcatggcgaggtggcgatccgactgctggagatggacggccacaatcaggatcatctgaaactgtttaagaaagaggtaatgaactacaggcagacaagacatgagaacgttgtgctctttatgggggcatgcatgaatccaccccacctcgctattatcacaagcttttgcaaaggaaggacactgcacagcttcgtcagggatccgaagacaagtttggacatcaataagacgaggcagatcgcccaggagataatcaagggaatgggatacctccacgccaaaggcatcgttcacaaagacctgaagtcaaaaaacgtgttttatgacaacgggaaggtggtcatcactgatttcgggctgtttggcattagtggggtcgtacgcgagggtagacgagagaaccaactgaaactgtcccacgattggctgtgttatctggctcctgaaatagtccgcgaaatgacacctggtaaggacgaagatcagctcccattctctaaggccgctgacgtgtacgcctttggcaccgtgtggtatgagctgcaggctcgtgattggcccttaaaaaaccaagccgctgaggccagcatatggcaaataggcagtggagagggtatgaagcgagtgctgacctccgtgagtctggggaaggaagtctcagagatactgtctgcttgttgggccttcgatctgcaggagcgcccatcatttagtctattgatggatatgctggagaagcttcctaaactgaacagaagactgagtcatcccggacacttctggaagtctgctgagctgtag

SEQ ID NO: 294647 - DNA, 1842 bp, Artificial Sequence
  derived and/or modified sequence
tgacacagcttcatcaccccccccaccaccccccagctgagaagacacaccaagctgaagccccccagaaccccccccccccccagcagaaaggtgttccagctgctgcccagcttccccaccctgaccagaagcaagagccacgagagccagctgggcaacagaatcgacgacgtgagcagcatgagattcgacctgagccacggcagcccccagatggtgagaagagacatcggcctgagcgtgacccacagattcagcaccaagagctggctgagccaggtgtgccacgtgtgccagaagagcatgatcttcggcgtgaagtgcaagcactgcagactgaagtgccacaacaagtgcaccaaggaggcccccgcctgcagaatcagcttcctgcccctgaccagactgagaagaaccgagagcgtgcccagcgacatcaacaaccccgtggacagagccgccgagccccacttcggcaccctgcccaaggccctgaccaagaaggagcacccccccgccatgaaccacctggacagcagcagcaaccccagcagcaccaccagcagcacccccagcagccccgcccccttccccaccagcagcaaccccagcagcgccaccaccccccccaaccccagccccggccagagagacagcagattcaacttccccgccgcctacttcatccaccacagacagcagttcatcttccccgacatcagcgccttcgcccacgccgcccccctgcccgaggccgccgacggcaccagactggacgaccagcccaaggccgacgtgctggaggcccacgaggccgaggccgaggagcccgaggccggcaagagcgaggccgaggacgacgaggacgaggtggacgacctgcccagcagcagaagaccctggagaggccccatcagcagaaaggccagccagaccagcgtgtacctgcaggagtgggacatccccttcgagcaggtggagctgggcgagcccatcggccagggcagatggggcagagtgcacagaggcagatggcacggcgaggtggccatcagactgctggagatggacggccacaaccaggaccacctgaagctgttcaagaaggaggtgatgaactacagacagaccagacacgagaacgtggtgctgttcatgggcgcctgcatgaaccccccccacctggccatcatcaccagcttctgcaagggcagaaccctgcacagcttcgtgagagaccccaagaccagcctggacatcaacaagaccagacagatcgcccaggagatcatcaagggcatgggctacctgcacgccaagggcatcgtgcacaaggacctgaagagcaagaacgtgttctacgacaacggcaaggtggtgatcaccgacttcggcctgttcggcatcagcggcgtggtgagagagggcagaagagagaaccagctgaagctgagccacgactggctgtgctacctggcccccgagatcgtgagagagatgacccccggcaaggacgaggaccagctgcccttcagcaaggccgccgacgtgtacgccttcggcaccgtgtggtacgagctgcaggccagagactggcccctgaagaaccaggccgccgaggccagcatctggcagatcggcagcggcgagggcatgaagagagtgctgaccagcgtgagcctgggcaaggaggtgagcgagatcctgagcgcctgctgggccttcgacctgcaggagagacccagcttcagcctgctgatggacatgctggagaagctgcccaagctgaacagaagactgagccaccccggccacttctggaagagcgccgagctgtag

SEQ ID NO: 294648 - DNA, 2634 bp, Artificial Sequence
  derived and/or modified sequence
atggacagagccgccctgagagccgccgccatgggcgagaagaaggagggcggcggcggcggcgacgccgccgccgccgagggcggcgccggcgccgccgccagcagagccctgcagcagtgcggccagctgcagaagctgatcgacatcagcatcggcagcctgagaggcctgagaaccaagtgcgccgtgagcaacgacctgacccagcaggagatcagaaccctggaggccaagctggtgagatacatctgcaagcagagacagtgcaagctgagcgtggcccccggcgagagaacccccgagctgaacagctaccccagattcagcgactggctgtacaccttcaacgtgagacccgaggtggtgcaggagatccccagagacctgaccctggacgccctgctggagatgaacgaggccaaggtgaaggagaccctgagaagatgcggcgccagcggcgacgagtgcggcagactgcagtacgccctgacctgcctgagaaaggtgaccggcctgggcggcgagcacaaggaggacagcagctggagcagcctggacgccagaagagagagcggcagcggccccagcaccgacaccctgagcgccgccagcctgccctggccccccggcagcagccagctgggcagagccggcaacagcgcccagggccccagaagcatcagcgtgagcgccctgcccgccagcgacagccccacccccagcttcagcgagggcctgagcgacacctgcatccccctgcacgccagcggcagactgacccccagagccctgcacagcttcatcaccccccccaccaccccccagctgagaagacacaccaagctgaagccccccagaaccccccccccccccagcagaaaggtgttccagctgctgcccagcttccccaccctgaccagaagcaagagccacgagagccagctgggcaacagaatcgacgacgtgagcagcatgagattcgacctgagccacggcagcccccagatggtgagaagagacatcggcctgagcgtgacccacagattcagcaccaagagctggctgagccaggtgtgccacgtgtgccagaagagcatgatcttcggcgtgaagtgcaagcactgcagactgaagtgccacaacaagtgcaccaaggaggcccccgcctgcagaatcagcttcctgcccctgaccagactgagaagaaccgagagcgtgcccagcgacatcaacaaccccgtggacagagccgccgagccccacttcggcaccctgcccaaggccctgaccaagaaggagcacccccccgccatgaaccacctggacagcagcagcaaccccagcagcaccaccagcagcacccccagcagccccgcccccttccccaccagcagcaaccccagcagcgccaccaccccccccaaccccagccccggccagagagacagcagattcaacttccccgccgcctacttcatccaccacagacagcagttcatcttccccgacatcagcgccttcgcccacgccgcccccctgcccgaggccgccgacggcaccagactggacgaccagcccaaggccgacgtgctggaggcccacgaggccgaggccgaggagcccgaggccggcaagagcgaggccgaggacgacgaggacgaggtggacgacctgcccagcagcagaagaccctggagaggccccatcagcagaaaggccagccagaccagcgtgtacctgcaggagtgggacatccccttcgagcaggtggagctgggcgagcccatcggccagggcagatggggcagagtgcacagaggcagatggcacggcgaggtggccatcagactgctggagatggacggccacaaccaggaccacctgaagctgttcaagaaggaggtgatgaactacagacagaccagacacgagaacgtggtgctgttcatgggcgcctgcatgaaccccccccacctggccatcatcaccagcttctgcaagggcagaaccctgcacagcttcgtgagagaccccaagaccagcctggacatcaacaagaccagacagatcgcccaggagatcatcaagggcatgggctacctgcacgccaagggcatcgtgcacaaggacctgaagagcaagaacgtgttctacgacaacggcaaggtggtgatcaccgacttcggcctgttcggcatcagcggcgtggtgagagagggcagaagagagaaccagctgaagctgagccacgactggctgtgctacctggcccccgagatcgtgagagagatgacccccggcaaggacgaggaccagctgcccttcagcaaggccgccgacgtgtacgccttcggcaccgtgtggtacgagctgcaggccagagactggcccctgaagaaccaggccgccgaggccagcatctggcagatcggcagcggcgagggcatgaagagagtgctgaccagcgtgagcctgggcaaggaggtgagcgagatcctgagcgcctgctgggccttcgacctgcaggagagacccagcttcagcctgctgatggacatgctggagaagctgcccaagctgaacagaagactgagccaccccggccacttctggaagagcgccgagctgtag

SEQ ID NO: 294649 - protein, 344 aa, Artificial Sequence
  derived and/or modified sequence
MALFWCTEALPLAVTALFPLILFPMMGIVDASEVAVEYLKDSNLLFFGGLLVAIAVEHWNLHKRIALRVLLIVGVRPAPLILGFMLVTAFLSMWISNTATSAMMVPIAHAVLDQLHSSQASSNVEEGSNNPTFELQEPSPQKEVTKLDNGQALPVTSASSEGRAHLSQKHLHLTQCMSLCVCYSASIGGIATLTGTAPNLVLQGQINSLFPQNGNVVNFASWFSFAFPTMVILLLLAWLWLQILFLGFNFRKNFGIGEKMQEQQQAAYCVIQTEHRLLGPMTFAEKAISILFVILVLLWFTREPGFFWLGQFGFSQCQGGEVRVAGVGRRTHLGLTCSGRREGY

SEQ ID NO: 294650 - DNA, 1035 bp, Artificial Sequence
  derived and/or modified sequence
atggccctgttttggtgcactgaggcactgcctctggcggtgactgcactctttcccctgatcctattcccaatgatgggaatagtcgacgcaagtgaagtcgccgtcgagtacctcaaggattccaacctgctttttttcggggggctgctagtcgcgatcgccgtcgagcattggaacttgcacaaaagaattgcgttgcgggtcctactgatcgtcggcgtgcgaccagccccactgatcctggggttcatgctggtgacggccttcctcagcatgtggatctctaatactgcgacatctgcaatgatggtccctatcgcgcacgcggtgctcgatcagctgcattccagtcaggcttctagcaatgtggaggagggctcaaataatcccaccttcgagttgcaggagcctagcccacagaaggaagtgaccaagcttgacaacggccaggcactgccagtgacttctgcctcttccgagggcagagcccacctttcccagaaacacctccacctgacacagtgcatgtctctgtgtgtctgctattcggcatccatagggggaattgcaactctaaccgggactgccccaaaccttgtgctgcagggacagataaatagcctgtttccgcaaaatggcaatgtggtgaactttgcgagctggttttcctttgcctttcctacgatggtaattctgctcctcttggcctggctttggctacagatcctattcctgggattcaattttagaaaaaactttggtatcggagagaagatgcaggagcaacagcaggctgcctattgcgtgatccagaccgagcaccgcttgctcgggcccatgacctttgccgagaaagctatttcaatcctgtttgtgattctggttttgctgtggtttactagggaaccggggttcttctggcttgggcaatttgggttctcccaatgccaaggcggggaagtcagggtcgctggggtgggccgacggactcacctgggcttgacctgctcgggccggagagagggttattag

SEQ ID NO: 294651 - DNA, 1035 bp, Artificial Sequence
  derived and/or modified sequence
atggccctcttctggtgcacagaggccctgcccctggccgtgacagccctcttccccctcatcctcttccccatgatgggcatcgtggatgccagcgaggtggccgtggagtacctgaaggacagcaacctgctcttctttggaggcctgctggtggccatcgctgtggagcactggaacctgcacaagagaattgccctgcgggtgctgctgattgtgggcgtgcggcctgcccccctcatcctgggcttcatgctggtgacagccttcctgtccatgtggatcagcaacacagccaccagcgccatgatggtgcccatcgcccatgctgtgctggaccagctgcacagcagccaggccagcagcaatgtggaggagggcagcaacaaccccacctttgagctgcaggagcccagcccccagaaggaggtgaccaagctggacaatggccaggccctgcctgtgaccagcgccagcagcgagggccgggcccacctgagccagaagcacctgcacctgacccagtgcatgagcctgtgtgtgtgctacagcgccagcattggaggcatcgccaccctgaccggcacagcccccaacctggtgctgcagggccagatcaacagcctcttcccccagaatggaaatgtggtgaactttgcctcctggttctcctttgccttccccaccatggtgatcctgctgctgctggcctggctgtggctgcagatcctcttcctgggcttcaacttcaggaagaactttggcatcggggagaagatgcaggagcagcagcaggccgcctactgtgtgatccagacagagcaccggctgctgggccccatgacctttgctgagaaggccatcagcatcctcttcgtcatcctggtgctgctgtggttcacccgggagcccggcttcttctggctgggccagtttggcttcagccagtgccagggcggggaggtgcgggtggccggcgtgggccgccgcacccacctgggcctgacctgcagcggccggcgggagggctactag

SEQ ID NO: 294652 - DNA, 1035 bp, Artificial Sequence
  derived and/or modified sequence
atggccctgttctggtgcaccgaggccctgcccctggccgtgaccgcacttttccccctgatcttattcccaatgatggggatagttgacgcctcggaagtggccgttgaataccttaaagacagcaatctgctcttttttggaggactgctcgtggcaatcgcagttgagcactggaacctgcataaacggatagcccttcgagtgttactgattgtcggcgtgcgcccagcgcccctgattctgggatttatgctggtcacagcatttctttcaatgtggatttcaaatactgccactagcgcaatgatggtcccaattgctcatgcggtgttggatcagctgcactcctctcaagcttctagcaacgtcgaagaggggagcaacaatccaacatttgagctgcaggaacccagtccccagaaggaagtcaccaaactagacaatggtcaggcactccccgtcacaagtgcctcttccgaagggcgcgcccacttgagccagaaacacctgcaccttacccagtgcatgtccctgtgcgtttgttattctgcaagcatcggcggaatcgccactcttaccgggaccgcccctaacctggttctgcaggggcagatcaactcactctttccccagaatggtaacgttgttaatttcgcctcgtggttcagttttgcgtttcccaccatggtaattttgttgttgctggcttggctatggctgcagattctgttccttggcttcaatttcaggaagaactttggcattggagagaaaatgcaggagcagcaacaggccgcatactgtgtcatccagactgagcacaggttactgggaccaatgacatttgccgaaaaggcgatttccatattgttcgttatcttagtactgctgtggttcaccagggaaccaggattcttctggctgggtcagtttggattctcacaatgtcaaggcggagaagtgagagtggctggggtcggaagacgaacgcatttgggcctcacgtgttcagggaggagagaaggctattag

SEQ ID NO: 294653 - DNA, 1035 bp, Artificial Sequence
  derived and/or modified sequence
atggcactcttttggtgtacagaagctctccctctggcagtgactgccttgttccctctgatcctgtttcctatgatgggcatcgtagacgccagcgaggtcgctgtcgagtatctcaaggatagcaaccttctgtttttcggtgggcttttggtcgccatagcagtggaacattggaacctgcacaagcgtatcgccctacgagtgctgctgatcgtgggggtcaggcccgctccattgatcctgggattcatgctggtcacagcgtttctgtctatgtggattagcaataccgccacaagcgctatgatggtcccaatagcccacgcagtgctggaccagctgcattcatctcaagcatcttcaaacgtggaagaaggctctaataatccgacatttgaactgcaagagccctcccctcagaaggaggttacgaaactcgataacggacaggccctccctgtaacctcagccagcagcgaaggcagggcccacctttctcagaagcacctgcatctgacacagtgtatgagcctgtgcgtgtgctattccgcgtccattggtgggatagctacgttaactggcacggcacctaacctcgtgcttcaagggcagatcaattctctattcccccaaaatggtaatgtggttaactttgcatcctggttttcatttgcttttccaacaatggtgattctcctcctactggcctggctgtggctacagattctctttcttggatttaattttaggaaaaacttcggtatcggcgaaaaaatgcaggagcaacagcaggccgcttactgcgtgattcagaccgagcacaggctgctgggccctatgacatttgctgaaaaagccattagcatccttttcgtgattttagtgcttctatggttcacccgtgagcccggtttcttctggctcggccaatttggattctctcagtgccaaggaggggaagttcgagtggcaggcgtcggaagacgcacccatctcggcctgacttgcagcgggcgtagagaggggtactag

SEQ ID NO: 294654 - DNA, 1035 bp, Artificial Sequence
  derived and/or modified sequence
atggccctgttctggtgcaccgaggccctgcccctggccgtgaccgccctgttccccctgatcctgttccccatgatgggcatcgtggacgccagcgaggtggccgtggagtacctgaaggacagcaacctgctgttcttcggcggcctgctggtggccatcgccgtggagcactggaacctgcacaagagaatcgccctgagagtgctgctgatcgtgggcgtgagacccgcccccctgatcctgggcttcatgctggtgaccgccttcctgagcatgtggatcagcaacaccgccaccagcgccatgatggtgcccatcgcccacgccgtgctggaccagctgcacagcagccaggccagcagcaacgtggaggagggcagcaacaaccccaccttcgagctgcaggagcccagcccccagaaggaggtgaccaagctggacaacggccaggccctgcccgtgaccagcgccagcagcgagggcagagcccacctgagccagaagcacctgcacctgacccagtgcatgagcctgtgcgtgtgctacagcgccagcatcggcggcatcgccaccctgaccggcaccgcccccaacctggtgctgcagggccagatcaacagcctgttcccccagaacggcaacgtggtgaacttcgccagctggttcagcttcgccttccccaccatggtgatcctgctgctgctggcctggctgtggctgcagatcctgttcctgggcttcaacttcagaaagaacttcggcatcggcgagaagatgcaggagcagcagcaggccgcctactgcgtgatccagaccgagcacagactgctgggccccatgaccttcgccgagaaggccatcagcatcctgttcgtgatcctggtgctgctgtggttcaccagagagcccggcttcttctggctgggccagttcggcttcagccagtgccagggcggcgaggtgagagtggccggcgtgggcagaagaacccacctgggcctgacctgcagcggcagaagagagggctactag

SEQ ID NO: 294655 - DNA, 3588 bp, Artificial Sequence
  derived and/or modified sequence
atgggcgaagagggccccccttcgctggaatatatccaagctaaagaccttttcccccctaaggagctcgtgaaggaggaagagaatctgcaagtgccctttaccgtcctccagggagagggagtcgaatttctcggtcgcgccgcggacgcgctcatcgcgatttccaattaccgactgcatatcaaattcaaggactcagtcataaacgtgccattgcggatgatcgatagtgtagaatctcgagacatgtttcagctacatatttcctgcaaggatagcaaggtggttaggtgccactttagcacttttaagcagtgccaggagtggctatctcgcctaagccgcgccactgcccgaccagccaagccagaagatttgtttgcttttgcctaccatgcatggtgtctggggctgactgaagaagaccagcatactcatctctgccaacccggcgagcatatcaggtgtagacaagaagcagagttggcacgcatgggattcgacctgcagaatgtctggcgggtttcccacatcaattcaaattataaactttgccctagctatccacagaagctgctcgtccctgtgtggatcaccgataaggagctggaaaacgtggcttcctttagatcctggaaacggatcccagtggttgtctaccgccacttgaggaatggggctgctatcgccagatgtagtcaacctgagatttcatggtggggctggcggaatgctgacgacgagtatcttgtgacgtcaatcgccaaggcctgcgccctggaccctggcactagagcaacaggaggatccttgtctacaggaaataatgatactagcgaggcttgtgacgctgactttgactcctctttgacagcgtgttctggcgtggagtcgacagcagcacctcagaaactcctcatcctcgatgctcgctcttacaccgcagcggtggccaatcgggccaagggcggcggatgcgagtgtgaagagtactatccaaattgtgaagttgtattcatggggatggcgaatatccacgccattcgcaacagttttcagtacctccgggcagtgtgctcacagatgcccgacccatctaactggctttccgcgttggaatcaaccaagtggctgcagcacctctcagtgatgctgaaggccgctgtgcttgttgccaacaccgtcgatcgggagggccgcccggtactggttcactgctccgacgggtgggaccgcaccccgcagattgttgccctggcaaagatcctactggacccatactacagaacactggaaggtttccaggtcctggtggaaagcgactggctggatttcggccacaaattcggtgaccgctgtggtcatcaggagaacgtggaggatcagaacgaacagtgtcccgtctttttgcagtggttggactctgttcaccagctgctgaagcaatttccttgcctctttgagtttaatgaggctttcctagtgaagcttgtccagcatacttactcatgcctgtacgggacctttctcgccaacaacccctgcgagcgcgaaaagagaaacatatataaacgcacttgctccgtgtgggctcttctgagggctgggaacaaaaatttccacaattttctctacaccccttcttctgacatggtcctccatccagtgtgccatgtcagagcactccacctgtggactgccgtgtatttacctgcatcttccccatgcacacttggtgaggagaatatggatttatatctgtctcccgtggcccagtcccaggaattcagcggccggagcctcgatcggctccccaaaacgcgctccatggacgatctattgtctgcctgcgacacaagcagtcctttaactcgaacctcgagcgacccaaatttaaataaccattgccaagaggtccgggtcggcctcgagccctggcacagtaaccctgagggatctgaaaccagtttcgtcgattcgggcgtgggcgggcctcagcaaactgtaggggaagtaggactcccgccccctctgccttcatcacagaaggactacctaagcaataagcccttcaagtcacacaaatcttgctctcccagctacaagctgctgaatacggcagtgccccgcgagatgaagtctaatacttccgatcctgagatcaaggtcctcgaggagacaaaaggccccgctccagacccatctgcacaagatgaactgggacgaaccctcgatggcatcggggagccaccagaacactgcccagagacagaagctgtcagcgcacttagcaaggtgatcagcaataagtgcgacggagtttgcaattttcccgaaagctcgcagaacagtcccacaggaacacctcagcaggcgcagccggactctatgctcggagtgccgtcaaaatgcgttctggatcactctttgtcgactgtttgcaatccccccagcgcagcttgtcagaccccccttgatcctagtactgatttcctcaaccaggacccatcaggctctgtcgcatctatctctcaccaggagcagctgtcctccgtcccagatctgacccacggtgaggaggacattggaaagcgggggaacaataggaatggacagctattggagaatcccaggtttggcaagatgcctttggaattagtgcgaaaacctatttcccagtcccaaataagtgaatttagctttctcggaagcaactgggacagcttccagggtatggtcacttcattccccagcggggaggccactccaagaaggctgctgtcctatggctgttgttctaaacgcccgaatagcaaacagatgagagccaccggcccttgtttcggcgggcagtgggcccagcgagagggagtgaagtcacctgtatgcagttcacacagtaatgggcattgtacaggtcccgggggtaagaaccagatgtggttaagctctcaccctaagcaggtgagtagcacaaagcccgtgcctttgaattgcccctcgcctgtccctccactgtatctggacgatgatggactgccctttccaacagacgtcattcaacataggctgcgtcagatcgaagccggctataagcaggaggttgagcaactgcggcggcaagtgcgcgagctgcagatgagactcgacatccgccattgttgtgcccccccagctgagccccccatggattatgaggatgattttacatgtctgaaggagagtgatggtagcgatactgaggatttcggcagcgatcactcggaagactgtctgtcagaagccagctgggaaccagtcgacaaaaaagagacagaagtgacacgatgggtcccagaccatatggctagccattgctacaactgtgactgcgaattttggctggccaagcggcggcaccattgccggaactgtggtaacgtattttgtgctggctgttgccatttaaaactccctatccccgatcagcagttgtacgatcctgtcttggtttgtaattcctgttacgagcacatccaggtgagcagggctcgcgagttgatgtcccagcagctcaagaaaccaatcgcaacggcaagttcatag

SEQ ID NO: 294656 - DNA, 3588 bp, Artificial Sequence
  derived and/or modified sequence
atgggagaggagggcccccccagcctggagtacatccaggccaaggacctcttcccccccaaggagctggtgaaggaggaggagaacctgcaggtgcccttcaccgtgctgcagggcgagggcgtggagttcctgggccgggctgctgatgccctgattgccatcagcaactaccgcctgcacatcaagttcaaggacagcgtcatcaacgtgcccctgaggatgattgacagcgtggagagccgggacatgttccagctgcacatcagctgcaaggacagcaaggtggtgcgctgccacttcagcaccttcaagcagtgccaggagtggctgagccggctgagccgggccacagcccggcctgccaagccagaggacctgtttgcctttgcctaccacgcctggtgcctgggcctgacagaggaggaccagcacacccacctgtgccagcctggagagcacatccgctgccggcaggaggccgagctggccaggatgggctttgacctgcagaatgtgtggagggtgagccacatcaacagcaactacaagctgtgccccagctacccccagaagctgctggtgcctgtgtggatcacagacaaggagctggagaatgtggccagcttccgctcctggaagagaattcctgtggtggtgtaccgccacctgagaaatggagctgccatcgcccgctgcagccagcctgagatctcctggtggggctggagaaatgctgatgatgagtacctggtgaccagcatcgccaaggcctgtgccctggaccccggcacccgggccaccggcggcagcctgagcacaggcaacaatgacaccagcgaggcctgtgatgctgactttgacagcagcctgacagcctgcagcggcgtggagagcacagctgccccccagaagctgctgatcctggatgcccggagctacacagctgctgtggccaacagagccaagggcggcggctgtgaatgtgaggagtactaccccaactgtgaggtggtgttcatgggcatggccaacatccacgccatccggaacagcttccagtacctgcgggctgtgtgcagccagatgccagaccccagcaactggctgagcgccctggagagcaccaagtggctgcagcacctgtctgtgatgctgaaggctgctgtgctggtggccaacacagtggaccgggagggccggcctgtgctggtgcactgcagtgatggctgggacaggaccccccagatcgtggccctggccaagatcctgctggacccctactaccgcaccctggagggcttccaggtgctggtggagagtgactggctggactttggccacaagtttggagacagatgtggccaccaggagaatgtggaggaccagaatgagcagtgccctgtgttcctgcagtggctggacagcgtgcaccagctgctgaagcagttcccctgcctgtttgagttcaatgaggccttcctggtgaagctggtgcagcacacctacagctgcctgtatggcaccttcctggccaacaacccctgtgagcgggagaagaggaacatctacaagaggacctgcagcgtgtgggccctgctgcgggccggcaacaagaacttccacaacttcctgtacacccccagcagtgacatggtgctgcaccctgtgtgccacgtgcgggccctgcacctgtggacagctgtgtacctgcctgccagcagcccctgcaccctgggggaggagaacatggacctgtacctgagccctgtggcccagagccaggagttcagcggccgcagcctggaccggctgcccaagaccaggtccatggatgacctgctgagcgcctgtgacaccagcagccccctgaccaggaccagcagtgaccccaacctgaacaaccactgccaggaggtgcgggtgggcctggagccctggcacagcaaccctgagggcagcgagaccagctttgtggacagcggcgtgggcggcccccagcagacagtgggggaggtgggcctgcccccacccctgcccagcagccagaaggactacctgagcaacaagcccttcaagagccacaagagctgcagccccagctacaagctgctgaacacagctgtgccccgggagatgaagagcaacaccagtgaccctgagatcaaggtgctggaggagaccaagggccctgccccagaccccagcgcccaggatgagctgggccgcaccctggatggcatcggggagcccccagagcactgcccagagacagaggccgtgtctgccctgagcaaggtgatcagcaacaagtgtgatggagtgtgcaacttccctgagagcagccagaacagccccaccggcaccccccagcaggcccagcctgacagcatgctgggcgtgcccagcaaatgtgtgctggaccacagcctgagcacagtgtgcaaccccccatctgctgcctgccagacccccctggaccccagcacagacttcctgaaccaggaccccagcggctctgtggccagcatcagccaccaggagcagctgagctctgtgcctgacctgacccacggggaggaggacatcggcaagaggggcaacaacagaaatggccagctgctggagaaccccaggtttgggaagatgcccctggagctggtgaggaagcccatcagccagagccagatcagcgagttctccttcctgggcagcaactgggacagcttccagggcatggtgaccagcttccccagcggggaggccaccccccggcggctgctgtcctatggctgctgcagcaagaggcccaacagcaagcagatgagggccaccggcccctgctttggaggccagtgggcccagcgggagggcgtgaagagccctgtgtgcagcagccacagcaatggccactgcaccggccctgggggcaagaaccagatgtggctgagcagccaccccaagcaggtgagcagcaccaagcctgtgcccctgaactgccccagccctgtgccccccctgtacctggatgatgatggcctgcccttccccacagatgtgatccagcaccggctgcggcagatcgaggccggctacaagcaggaggtggagcagctgcggcggcaggtgcgggagctgcagatgaggctggacatccgccactgctgtgcccccccagctgagccccccatggactatgaagatgacttcacctgcctgaaggagagtgatggcagtgacacagaggactttggaagtgaccacagcgaggactgcctgtctgaggcctcctgggagcctgtggacaagaaggagacagaggtgacccgctgggtgcctgaccacatggccagccactgctacaactgtgactgtgagttctggctggccaagaggaggcaccactgcaggaactgtggaaatgtgttctgtgccggctgctgccacctgaagctgcccatcccagaccagcagctgtatgaccctgtgctggtgtgcaacagctgctatgagcacatccaggtgtcccgggcccgggagctgatgagccagcagctgaagaagcccatcgccacagccagcagctag

SEQ ID NO: 294657 - DNA, 5829 bp, Artificial Sequence
  derived and/or modified sequence
gcgcggcctcagcagctgcgggagacggaagtggcaagagcgcggcctcagagggtcgggcggacgccgcctggtgagaagcaggcagccagtacccttgccacggtagaatgggtgaggaggggccccccagcctggagtacatccaagccaaggatctgttcccccccaaggaactagtgaaggaggaagagaatcttcaggtccccttcacagtgctgcagggtgagggagtagagttcctgggccgggcagccgatgccctcattgccatctctaactaccggctgcatatcaaattcaaggactctgtcatcaacgtccccctccggatgattgacagtgtggagagccgtgatatgttccagttgcacatttcctgcaaggactccaaagtggtgaggtgccacttctccacttttaagcagtgccaagagtggctctcacggctaagccgagccacagcaagacctgccaagcctgaagacctctttgcctttgcctaccatgcctggtgcctggggctgaccgaggaggaccagcacactcacctatgtcagccaggtgagcacatacgttgtcgacaggaggcggagcttgcaaggatgggctttgacctgcagaacgtctggagagtctcacacatcaacagcaactacaaattgtgccccagttacccccagaagctgctggttcctgtgtggatcactgacaaagagctggagaacgtggcttccttccgctcctggaagcggattcccgtggttgtgtatagacacttgcgcaatggggctgccatcgcccgctgcagccagccagagatcagctggtggggctggcgcaatgctgatgatgagtacctggtcacgtccattgctaaagcctgtgccctggacccggggacaagggccactgggggctccctcagcaccgggaataatgataccagcgaggcgtgtgatgctgactttgattcttctctgactgcgtgctctggagtggagagcacagcagctcctcaaaagctgctgatcctggatgcgcgatcctacacggcagcagtggccaaccgggccaagggtggaggctgtgaatgtgaagagtactatcccaactgtgaggtcgtgttcatgggaatggccaacatccatgccatccggaacagctttcagtacctccgggctgtgtgtagccagatgccggatcctagcaactggttgtcggcactggagagtaccaaatggctgcagcacttgtcggtgatgctaaaagcagctgtgctggtggctaatacagtagaccgggaaggccggcctgtgctggtacactgctcagatggctgggaccgcacaccgcagatcgtagccctggccaaaatattactggacccatattacaggacgttggagggcttccaagtgttagtggagtctgactggctggattttgggcacaagtttggagatcgctgtggccaccaagagaatgtggaggaccaaaacgaacaatgccctgtgttcctccagtggcttgattctgttcatcagttgcttaagcagttcccctgcctgtttgaatttaatgaagcattcctggtaaaactggtgcaacacacatactcctgcctctacggcaccttcctggccaacaacccctgtgagcgagagaagcgcaacatctacaagcggacctgctctgtgtgggcgctccttcgagctggcaataaaaactttcataacttcctctacacacccagctcagacatggtcctgcatcctgtttgtcatgtccgggccctgcacctctggacagctgtttatctgccagcatcatctccatgcacacttggggaagaaaacatggatctttacctttccccagtggcccagagccaggagttctctggccgctctctggacagattacctaaaaccagatccatggatgatcttctttctgcctgtgacacaagcagccccctgactcgtacatccagtgaccctaacctgaataaccactgtcaggaggtcagggtaggcctggagccctggcacagcaatcctgagggatcagagacaagctttgtggactctggggtaggagggcctcagcaaactgtaggagaagtgggtcttcctcctcctctgcccagcagccagaaagactacttgagcaataaacctttcaagagtcacaaaagctgttctccaagttacaaactgcttaataccgcagtgcctcgggaaatgaagagcaacacctctgatcctgagatcaaagtcctagaagagactaagggaccagctccagacccttctgcccaggatgagctgggtaggactttagatggcataggggagccacctgaacattgtcctgaaacagaagctgtcagtgcactctccaaggtcatttctaacaagtgtgatggagtttgtaattttcctgagtcttcccagaactctcctacaggtacgccccaacaggcccagccagactccatgctaggtgtgccctccaagtgtgttcttgatcacagcctcagcaccgtttgcaacccaccgagtgctgcctgccaaactcctctagacccaagcactgacttcctcaaccaagatccctcagggtctgtggcaagtatctcccaccaggaacaactgagttctgtgccggatctgacccatggggaggaagacattggtaaaagaggaaataataggaatgggcagttattggaaaatcctcgctttgggaaaatgccattggaattggtccggaagccaatttctcagagccagatcagtgagttctcttttctagggtccaactgggacagcttccaagggatggtgacttcattcccaagtggggaggccacccctcggcggctgctttcctatggctgttgtagcaagaggccaaacagtaagcagatgcgggccacagggccctgctttgggggccagtgggctcagagagaaggtgtgaagtcacctgtctgttctagtcattccaatggacattgtactggcccaggaggaaagaaccagatgtggttgtccagtcatccaaagcaagtctctagcacaaagcccgttccactgaactgcccttctccagtgcctcctctgtatttggatgatgatggactcccctttcccacggatgtgatccagcataggttacggcaaatcgaagcagggtacaaacaagaggtggagcagctacgtcgacaggtgcgtgagcttcagatgaggctggacatccgtcactgctgtgcccctccagcagagccccccatggactatgaggatgattttacatgtttgaaggagtcagatggcagtgatactgaggattttggctctgatcacagtgaagactgcctttcagaagcaagctgggaacctgttgataagaaagagactgaggtgactcgctgggttccagaccatatggcatcacactgctataactgtgactgtgaattctggttggccaaacgaagacaccattgcagaaattgtgggaatgtattttgtgctggatgctgccacctgaagctgcccattcctgatcagcaactctatgacccagttctcgtctgtaactcatgttacgaacacattcaagtctctcgtgccagggaactcatgagccaacagctgaagaaacccattgctacagcttccagttgaatgccggggagaaacctgtccaattttagcaggtttgaagggaggatcttcttcagttgtagtttggaaggttccttggtgtggctcatgaaatcacagagctcagagataccatcttgagaaatcctccttggtatcatgaaactggagcagaggaattgcaatttagcaggaggtcctctactggtgataccctcaccttggggtaatggtcctaacccagacccagggtctggaagcttaatgttgagttggtgactccagcctctttctcctggaggtcacaagatgatgattgcgtagatgttgcctggtgcaaagtgccccaaacagcaatagaaaggcatatgtataaccaaactccaagtgataaccagacccatctctcctccaccttgacaaaagcagattatagtatacaaggtaggaattcctgtcctatttgagatgaactatatcctgtacctctgtgctctgtgtctgcatgaaggctcagcctttagaggcactccttctagttgcattagtactgtctttctgtggagtttggtttgaagactggctcagcaagtggaggtttcaatgtatttttcagttggctcatcagccagcattggtgaatattcagtttaggggaacagttctagggagtgagacatttttgggagcagaggaaaactctgctgatgttcggtcctggcaaacattgagttattttgagctgtgaaggcagtcgtctctgttacacagtggcagctcttgagttatgcactgtgaagaatgagaagggaaaagcaaaaattatccttgtgaaatatctgctgattgtgccctactctttgcacctgacttttcctagttgtcctggtgctaacacaggagctacaccttgatcctctcctggcatgaaaataaaacaaaggttttcgttgttgttgttccattgcccatttcccccatgttgtctttcccttggctgatgcctcctctgggtcacattgcttcttatcctgaacacttgacaccttgagggtagaatttagcgtttggtttttacctcctagcatatgctgtttggtatgtgagggtttcagtacaaatgctgctgtctatttctgtgcacttaacaatggaacccaaacagaagagaataaagccttgataccaaaattgggaaagaacatgtgtccatttggaccaaacgttgttggtttttaaaaaattttattttgtttttttgtttttgtttttgttttttttcatcttaatatgtaccagtggcacttaaccaaaagatacagtgatatagccatgtactgtgggtgggacagatacagtctccttggcctataatgaaaccactaggactttatacagttttccttaatttgttgacatataaatggtaaattatatttaggcttatcctgttttgaaatgatggtagtcatctttcttactgctactttcatgttgctttctagaaaacagcatttcattccaaaataactaggatctgcatttagaacaagaatcattatttgtcctgaccttttcagtcctacagagacgcatctgtggttcttttgtacttgccatagatgtaacctaaaaagttttggcatatttaggtcagcctagcggaactttttttttcatttaaatggagctgaataatggagattttgtgtctgcaaaattcctgagatcattgaaaaagtaacaagctgttccttgtttctgatacataaaattattttaagcattttatcaatcattaaaatttactgccagttgtgagtggctttttaattaacttgtctttcattgcacttcactctgcctgttttcaaggggagtaagattggtaacatttggggagactgtatctgtctacttagcgtggctgttttgagggactgtcccatcagtgaacaaactgcatggccttggagagagactctgggctcttggctcagatgtgttcatcaaatactcctttcagagctgttgtgggtgtaagtgacatgatgtggccaaaaatccaaactgtgcagttgcgttgtgacaaacatgcaatgtgctgtaaaaattcaatacagtttaaataaaatctctatattagtgctgc

SEQ ID NO: 294658 - DNA, 3588 bp, Artificial Sequence
  derived and/or modified sequence
atgggcgaggagggcccccccagcctggagtacatccaggccaaggaccttttcccacctaaagagctggtcaaggaggaggagaacctgcaggttcccttcactgtccttcagggggaaggggttgagttcctcgggcgtgccgctgacgcactgattgccatcagcaattatagattgcatatcaaattcaaggattcggttataaacgtcccgttgaggatgatcgattccgtggagtcgcgggatatgtttcagctgcatatctcttgcaaagacagcaaggtggtccggtgtcatttcagtacctttaaacagtgccaagaatggttgagtcgtcttagtcgagcgacagccagacccgcaaagcctgaggacctgtttgcttttgcctaccatgcatggtgtcttggccttacagaggaggaccaacacactcacctgtgccagccaggtgagcacatccggtgccggcaagaggccgaactggcgcgcatgggatttgatctccagaatgtgtggcgagtctcccacattaacagcaactacaaactgtgcccgtcttatccacagaaattactggtcccagtctggattactgataaggaactggaaaatgtggcaagctttaggagttggaagcgtatcccggttgtggtgtacagacacctacgtaatggcgctgccattgcacgatgttcccaaccagagatcagctggtggggctggaggaatgccgatgatgagtatctggtgacctctatcgccaaagcctgcgctctggaccccggcacccgtgcaaccggcggttccctctccaccggcaataatgatacctccgaggcctgcgatgcggattttgatagctcactgaccgcctgctccggtgtggaaagcactgctgcaccccagaagcttctgatcctggatgcaaggagttacaccgcggctgtcgctaaccgagctaaagggggagggtgcgagtgcgaggaatattatcctaattgtgaagtcgtttttatgggaatggctaacatccacgcgattcgcaatagctttcagtacttacgggccgtgtgctcgcagatgcctgacccatcaaactggcttagtgccctagaatccaccaaatggctgcagcacttatcagtaatgctgaaagctgccgttcttgtcgcaaacacagtggatagggaagggaggcccgtgctggtgcattgtagcgacggctgggacagaaccccccagattgtggctttggccaagatcctgctggacccttattatagaactctggaaggctttcaggtgttggtagagtccgactggctggatttcggccataagtttggagacagatgcggtcaccaggaaaatgttgaggatcagaatgagcagtgtcccgtatttctgcagtggctggattccgtccaccagctactaaaacaattcccatgcctattcgagtttaatgaagcttttctggtaaagctcgtgcagcatacttatagctgtctctacggcacctttctggctaataacccatgcgagcgcgagaaaagaaacatttataagcgcacctgttctgtgtgggccctgctccgagccggaaataagaattttcataatttcctatatacaccttcatctgacatggttctgcatcctgtttgtcatgttcgggccttacacctgtggactgcagtgtacctgcccgcttctagtccctgcacacttggggaagagaatatggatctgtacctttcacctgtcgctcaaagtcaggagttcagcggtcgcagtctggacaggctacctaagacccgctccatggacgacctgctgtctgcctgcgatacatccagcccattgacaaggacatcatcagaccccaatcttaacaaccactgccaggaggttagggtgggccttgaaccatggcattctaaccccgagggaagcgagacctcgttcgtggactctggcgttggcgggccccaacagacggtgggagaagttggtctcccacctcccctcccatcatcacaaaaggactacctgtcgaacaaacccttcaagagccacaaaagttgtagcccaagctataaactgctgaatacggccgtccctcgggagatgaaatcgaatactagcgacccggaaatcaaagtgcttgaggagactaaggggcctgccccagacccaagtgcacaagacgagttgggacggactcttgacggtatcggcgagcctcctgaacactgtccagagacggaagccgtgagtgccctgtcgaaagtcatcagcaacaaatgcgatggtgtttgtaactttccagaaagctcccagaattctccaacaggaacacctcagcaggcccaaccggacagtatgctgggagtgcctagcaaatgtgtcttagaccactcattgtcaaccgtgtgcaacccgccaagcgcagcctgccagacgccgctggatcccagtaccgactttctcaatcaggacccctccggtagtgtggcaagtatctcacaccaagagcagctgagctccgttccagaccttacacacggagaagaagacataggaaagcgcggcaataatcgaaatggccagctcctggaaaatccgaggtttggcaagatgcccttggagctcgtaaggaagcctatctctcagtcacagatcagtgagttttcctttctcggcagcaattgggacagcttccaggggatggtcacatctttccctagtggtgaggccaccccaaggagactcctgtcgtacggatgttgcagtaagcgacctaatagtaaacagatgagggccactggaccatgctttggggggcagtgggcccaacgggaaggcgtcaagtccccagtgtgctcttctcattccaatgggcactgcaccggtccaggcggcaagaatcagatgtggctgagctctcaccctaagcaggtatcttctaccaagccggtccctctgaactgtccctctcccgttcctcctctttatctggatgacgacgggcttcccttcccaacagatgtgatccagcacagactcagacagattgaggccggctacaaacaggaggtggaacagctgcgtagacaggtccgcgagctccaaatgaggcttgacataaggcattgttgtgctccaccagctgagccacccatggactacgaggacgactttacatgtctgaaagagtctgacggatcagacaccgaggattttggctctgatcactccgaagattgtctctccgaggcatcatgggagcccgtagataagaaggaaactgaagtcacccgctgggttcctgaccacatggcctcccactgttataactgtgattgcgaattttggctggctaaaagacggcaccattgcagaaattgcggcaacgtgttttgcgctggttgctgtcatctgaaactgcctataccggatcagcagctctacgaccccgtgctcgtctgtaactcttgctacgagcatatccaggtaagccgagccagagagctgatgtcccaacagctgaagaaacctatcgcaactgccagctcctag

SEQ ID NO: 294659 - DNA, 3588 bp, Artificial Sequence
  derived and/or modified sequence
atgggcgaagaaggccctcctagtctagaatatatccaagccaaggacctttttccaccaaaggagctggtgaaggaggaagagaatttacaggtaccgtttaccgttctccagggcgaaggggtggaattcctgggtcgcgcagcagatgctctcattgcgatctccaattatcggcttcacattaaatttaaagactccgtcatcaatgtgccgctgcgtatgatcgactctgtggagtcaagggatatgttccagctgcacatctcttgcaaggatagcaaggtggtgaggtgccatttctcgacattcaagcaatgccaagagtggctctcccggctgagtcgggctacagccagacctgccaaaccagaggacttattcgcttttgcctaccacgcatggtgtctcggcttaacagaggaagaccagcacacccacctatgtcagccgggtgagcatattaggtgccgccaggaagcagagctcgcacgcatgggctttgacctccagaacgtgtggagagtttcacatatcaattccaactataaactgtgcccaagctatccacagaaactgttggtgcccgtgtggattacagacaaggaactggagaacgtcgctagctttcggagttggaagcggatccctgtggtcgtatatagacacctacgcaacggcgcagctatcgcaaggtgctcgcagcccgaaatcagctggtggggatggcggaacgcagatgacgagtacctggttacaagtatcgccaaagcttgcgcactggatcctggcaccagggccaccggcggtagtctcagtaccggaaataatgacacaagtgaagcctgcgatgcggattttgattcctctcttacagcctgttcaggggtagaaagcaccgccgctccgcaaaagctcctgatcctcgacgctaggagttacacggctgcagtagcaaacagagcaaagggagggggttgcgagtgtgaggaatattaccctaactgcgaggtggtgtttatgggcatggccaatatacacgcgattagaaatagttttcaatacttaagggcggtatgttctcaaatgcccgacccaagtaactggctgtctgcccttgagagcaccaagtggctacagcatctgtctgtgatgctgaaagctgccgtgctggtagccaacacagttgaccgggaaggcagaccagtattggtccactgttctgacggatgggatcggactcctcagatagttgccctggctaagattctgttggacccctattatagaactctcgaggggttccaagtgctcgtggaatcagactggttggatttcggccacaaattcggggatcgttgtggacaccaggaaaatgtggaggaccagaacgaacagtgtcccgtgttcctccagtggctcgatagcgtgcatcagttactgaagcagtttccgtgtctgtttgaattcaacgaggcgtttctggtgaaactcgttcaacatacttactcctgtctttacgggacttttttagctaataacccttgcgaaagagaaaaacgaaatatttacaagagaacctgtagtgtatgggctctgctcagagccggaaacaagaacttccataactttctttataccccatcaagtgacatggtcctacacccagtctgccatgtgcgggcactccacctatggacagctgtgtacctgcccgcaagcagtccctgtactcttggcgaggagaacatggacctgtatctgtcccctgttgcccagtcacaggaattctctggtagatccttagatagactcccaaagacccgatcgatggatgatctactgtccgcctgcgatacttcatctcccctcacccgaacgagctccgatccaaatttgaacaatcattgtcaggaggtgcgcgtggggctggaaccttggcatagcaatccggagggcagcgagacctcattcgtcgattccggcgtgggcggtcctcaacagaccgtgggcgaggtgggattgcctcctcccctgccctcttcacagaaagactacctgtctaacaagccatttaagtcccacaagtcctgcagcccgagttacaaactgctgaatactgcagtgccccgagaaatgaagtctaatacaagcgaccctgagatcaaggtgctggaagagactaaaggaccagccccagacccctcagcccaagatgaacttggtagaactctggatggcatcggcgagccaccggagcattgtccagagaccgaagccgtatctgcgttgtctaaagttatctcaaacaagtgcgatggcgtctgcaactttcctgagtcgagccagaacagccctacaggcactccccaacaggcccagccggactccatgctaggagtgcctagtaagtgtgtgctcgatcattccttgagtacagtgtgtaatcccccatctgcggcatgtcagacacctctcgatccatcaaccgatttcttgaaccaagatcccagcggctctgtggcatctatttctcaccaggagcagctatcttcggtgcccgatcttacccatggtgaggaggatatcggaaagcgtgggaacaaccggaatggccaactgctggaaaacccacggtttggaaagatgccgctggagctcgtccgcaagccgatctcccagtctcaaatcagtgagttcagcttcctcggttccaactgggactccttccagggaatggtcacatccttcccaagcggcgaggccaccccaagaagattattgagttatggctgctgctcgaaacggccaaattctaagcagatgagggccacggggccatgcttcggcggtcagtgggcgcagcgggaaggagtgaagagtcccgtgtgcagctcccatagcaacgggcactgtacaggccctggcggtaaaaatcagatgtggctctccagtcaccctaagcaggtctcttccaccaagcctgttcccctgaattgtccttcaccagtgccaccactgtacctcgatgatgacgggttgccttttcccacagacgttatacagcaccggttgcgccagatcgaagccggatataagcaagaggtggagcagctgcgacgtcaggtgagggaactacagatgaggctggatataagacactgttgcgcaccgcctgccgaaccccctatggactacgaagatgatttcacttgtctcaaagaatccgacggctcagataccgaggatttcgggagcgaccactctgaagattgcctgagtgaagcctcctgggagcctgtcgataaaaaggaaaccgaggtaactagatgggtgccggaccacatggcctcacattgctacaactgtgattgcgagttctggctggctaagaggcggcaccactgtcggaactgcggcaacgtgttttgcgctggctgctgtcatctgaagctaccaatccccgaccagcagctgtacgaccctgtgctcgtgtgcaatagctgctacgaacatatccaggtgagtcgggctcgggaactcatgtcgcagcagttaaagaagcctattgctactgcatcttcctag

SEQ ID NO: 294660 - DNA, 3588 bp, Artificial Sequence
  derived and/or modified sequence
atgggcgaggagggcccccccagcctggagtacatccaggccaaggacctgttcccccccaaggagctggtgaaggaggaggagaacctgcaggtgcccttcaccgtgctgcagggcgagggcgtggagttcctgggcagagccgccgacgccctgatcgccatcagcaactacagactgcacatcaagttcaaggacagcgtgatcaacgtgcccctgagaatgatcgacagcgtggagagcagagacatgttccagctgcacatcagctgcaaggacagcaaggtggtgagatgccacttcagcaccttcaagcagtgccaggagtggctgagcagactgagcagagccaccgccagacccgccaagcccgaggacctgttcgccttcgcctaccacgcctggtgcctgggcctgaccgaggaggaccagcacacccacctgtgccagcccggcgagcacatcagatgcagacaggaggccgagctggccagaatgggcttcgacctgcagaacgtgtggagagtgagccacatcaacagcaactacaagctgtgccccagctacccccagaagctgctggtgcccgtgtggatcaccgacaaggagctggagaacgtggccagcttcagaagctggaagagaatccccgtggtggtgtacagacacctgagaaacggcgccgccatcgccagatgcagccagcccgagatcagctggtggggctggagaaacgccgacgacgagtacctggtgaccagcatcgccaaggcctgcgccctggaccccggcaccagagccaccggcggcagcctgagcaccggcaacaacgacaccagcgaggcctgcgacgccgacttcgacagcagcctgaccgcctgcagcggcgtggagagcaccgccgccccccagaagctgctgatcctggacgccagaagctacaccgccgccgtggccaacagagccaagggcggcggctgcgagtgcgaggagtactaccccaactgcgaggtggtgttcatgggcatggccaacatccacgccatcagaaacagcttccagtacctgagagccgtgtgcagccagatgcccgaccccagcaactggctgagcgccctggagagcaccaagtggctgcagcacctgagcgtgatgctgaaggccgccgtgctggtggccaacaccgtggacagagagggcagacccgtgctggtgcactgcagcgacggctgggacagaaccccccagatcgtggccctggccaagatcctgctggacccctactacagaaccctggagggcttccaggtgctggtggagagcgactggctggacttcggccacaagttcggcgacagatgcggccaccaggagaacgtggaggaccagaacgagcagtgccccgtgttcctgcagtggctggacagcgtgcaccagctgctgaagcagttcccctgcctgttcgagttcaacgaggccttcctggtgaagctggtgcagcacacctacagctgcctgtacggcaccttcctggccaacaacccctgcgagagagagaagagaaacatctacaagagaacctgcagcgtgtgggccctgctgagagccggcaacaagaacttccacaacttcctgtacacccccagcagcgacatggtgctgcaccccgtgtgccacgtgagagccctgcacctgtggaccgccgtgtacctgcccgccagcagcccctgcaccctgggcgaggagaacatggacctgtacctgagccccgtggcccagagccaggagttcagcggcagaagcctggacagactgcccaagaccagaagcatggacgacctgctgagcgcctgcgacaccagcagccccctgaccagaaccagcagcgaccccaacctgaacaaccactgccaggaggtgagagtgggcctggagccctggcacagcaaccccgagggcagcgagaccagcttcgtggacagcggcgtgggcggcccccagcagaccgtgggcgaggtgggcctgcccccccccctgcccagcagccagaaggactacctgagcaacaagcccttcaagagccacaagagctgcagccccagctacaagctgctgaacaccgccgtgcccagagagatgaagagcaacaccagcgaccccgagatcaaggtgctggaggagaccaagggccccgcccccgaccccagcgcccaggacgagctgggcagaaccctggacggcatcggcgagccccccgagcactgccccgagaccgaggccgtgagcgccctgagcaaggtgatcagcaacaagtgcgacggcgtgtgcaacttccccgagagcagccagaacagccccaccggcaccccccagcaggcccagcccgacagcatgctgggcgtgcccagcaagtgcgtgctggaccacagcctgagcaccgtgtgcaacccccccagcgccgcctgccagacccccctggaccccagcaccgacttcctgaaccaggaccccagcggcagcgtggccagcatcagccaccaggagcagctgagcagcgtgcccgacctgacccacggcgaggaggacatcggcaagagaggcaacaacagaaacggccagctgctggagaaccccagattcggcaagatgcccctggagctggtgagaaagcccatcagccagagccagatcagcgagttcagcttcctgggcagcaactgggacagcttccagggcatggtgaccagcttccccagcggcgaggccacccccagaagactgctgagctacggctgctgcagcaagagacccaacagcaagcagatgagagccaccggcccctgcttcggcggccagtgggcccagagagagggcgtgaagagccccgtgtgcagcagccacagcaacggccactgcaccggccccggcggcaagaaccagatgtggctgagcagccaccccaagcaggtgagcagcaccaagcccgtgcccctgaactgccccagccccgtgccccccctgtacctggacgacgacggcctgcccttccccaccgacgtgatccagcacagactgagacagatcgaggccggctacaagcaggaggtggagcagctgagaagacaggtgagagagctgcagatgagactggacatcagacactgctgcgccccccccgccgagccccccatggactacgaggacgacttcacctgcctgaaggagagcgacggcagcgacaccgaggacttcggcagcgaccacagcgaggactgcctgagcgaggccagctgggagcccgtggacaagaaggagaccgaggtgaccagatgggtgcccgaccacatggccagccactgctacaactgcgactgcgagttctggctggccaagagaagacaccactgcagaaactgcggcaacgtgttctgcgccggctgctgccacctgaagctgcccatccccgaccagcagctgtacgaccccgtgctggtgtgcaacagctgctacgagcacatccaggtgagcagagccagagagctgatgagccagcagctgaagaagcccatcgccaccgccagcagctag

SEQ ID NO: 294661 - protein, 1907 aa, Artificial Sequence
  derived and/or modified sequence
MEQLTTLPRPGDPGAMEPWALPTWHSWTPGRGGEPSSAAPSIADTPPAALQLQELRSEESSKPKGDGSSRPVGGTDPEGAEACLPSLGQQASSSGPACQRPEDEEVEAFLKAKLNMSFGDRPNLELLRALGELRQRCAILKEENQMLRKSSFPETEEKVRRLKRKNAELAVIAKRLEERARKLQETNLRVVSAPLPRPGTSLELCRKALARQRARDLSETASALLAKDKQIAALQRECRELQARLTLVGKEGPQWLHVRDFDRLLRESQREVLRLQRQIALRNQRETLPLPPSWPPGPALQARAGAPAPGAPGEATPQEDADNLPVILGEPEKEQRVQQLESELSKKRKKCESLEQEARKKQRRCEELELQLRQAQNENARLVEENSRLSGRATEKEQVEWENAELRGQLLGVTQERDSALRKSQGLQSKLESLEQVLKHMREVAQRRQQLEVEHEQARLSLREKQEEVRRLQQAQAEAQREHEGAVQLLESTLDSMQARVRELEEQCRSQTEQFSLLAQELQAFRLHPGPLDLLTSALDCGSLGDCPPPPCCCSIPQPCRGSGPKDLDLPPGSPGRCTPKSSEPAPATLTGVPRRTAKKAESLSNSSHSESIHNSPKSCPTPEVDTASEVEELEADSVSLLPAAPEGSRGGARIQVFLARYSYNPFEGPNENPEAELPLTAGEYIYIYGNMDEDGFFEGELMDGRRGLVPSNFVERVSDDDLLTSLPPELADLSHSSGPELSFLSVGGGGSSSGGQSSVGRSQPRPEEEDAGDELSLSPSPEGLGEPPAVPYPRRLVVLKQLAHSVVLAWEPPPEQVELHGFHICVNGELRQALGPGAPPKAVLENLDLWAGPLHISVQALTSRGSSDPLRCCLAVGARAGVVPSQLRVHRLTATSAEITWVPGNSNLAHAIYLNGEECPPASPSTYWATFCHLRPGTPYQAQVEAQLPPQGPWEPGWERLEQRAATLQFTTLPAGPPDAPLDVQIEPGPSPGILIISWLPVTIDAAGTSNGVRVTGYAIYADGQKIMEVASPTAGSVLVELSQLQLLQVCREVVVRTMSPHGESADSIPAPITPALAPASLPARVSCPSPHPSPEARAPLASASPGPGDPSSPLQHPAPLGTQEPPGAPPASPSREMAKGSHEDPPAPCSQEEAGAAVLGTSEERTASTSTLGEKDPGPAAPSLAKQEAEWTAGEACPASSSTQGARAQQAPNTEMCQGGDPGSGLRPRAEKEDTAELGVHLVNSLVDHGRNSDLSDIQEEEEEEEEEEEEELGSRTCSFQKQVAGNSIRENGAKSQPDPFCETDSDEEILEQILELPLQQFCSKKLFSIPEEEEEEEEDEEEEKSGAGCSSRDPGPPEPALLGLGCDSGQPRRPGQCPLSPESSRAGDCLEDMPGLVGGSSRRRGGGSPEKPPSRRRPPDPREHCSRLLSNNGPQASGRLGPTRERGGLPVIEGPRTGLEASGRGRLGPSRRCSRGRALEPGLASCLSPKCLEISIEYDSEDEQEAGSGGISITSSCYPGDGEAWGTATVGRPRGPPKANSGPKPYPRLPAWEKGEPERRGRSATGRAKEPLSRATETGEARGQDGSGRRGPQKRGVRVLRPSTAELVPARSPSETLAYQHLPVRIFVALFDYDPVSMSPNPDAGEEELPFREGQILKVFGDKDADGFYQGEGGGRTGYIPCNMVAEVAVDSPAGRQQLLQRGYLSPDILLEGSGNGPFVYSTAHTTGPPPKPRRSKKAESEGPAQPCPGPPKLVPSADLKAPHSMVAAFDYNPQESSPNMDVEAELPFRAGDVITVFGGMDDDGFYYGELNGQRGLVPSNFLEGPGPEAGGLDREPRTPQAESQDWGCTTQGSPGPPGGPCTPSSGSAPRIERGEPQGRSEKVWGFFSKGKQLLRRLGSGKKE

SEQ ID NO: 294662 - DNA, 555 bp, Artificial Sequence
  derived and/or modified sequence
tcattggagcttcccggaccgtgtgctcgacggtgccctaggtgccgtggggccacacgcgagtctgataagcaccctcccccggaatcatgcggtgctgtgaggcctagcgaagatgaagatagaatgcaaggtagaaagtgctggatacctttagaaagctgcaggactggtgcgatgggagttgagacgtaagaacctgcccgtccgtagggctctggatgctgctgaggcccgaggcccctatggcagatttgaaaattcacccttgtagagtcattcctgcctttgagcggactcccttttaagcagatctcaagagagcgttcggtggaggccctgggtctgcacagctcacctccctgggaactgctcgcccgagcgtcggagccggcgctggccccctgcagccggaaggttgcagccgcaggagccccggaggcccaggacacaggggaaggaacagaagagtgtcgtctcctagaaatctagcactggagaaacgaggaaaattcttccagcgatggtctcccactcagagctgaggaagctttt

SEQ ID NO: 294663 - DNA, 5724 bp, Artificial Sequence
  derived and/or modified sequence
atggagcaattgaccactttgcctcggcccggcgaccccggggccatggagccctgggccctgcctacctggcactcctggaccccaggtaggggaggggagcctagctctgcagctccttcaatcgccgacacacctcccgcagccctgcaattgcaggaactgagatctgaggagtcaagtaagccgaagggcgatgggtcatccaggccagtcggaggaacggacccagagggggcagaggcttgcctgccaagcctcggacagcaggcttcaagctcaggaccagcctgtcagagacctgaggacgaggaggtggaagcattcctaaaggcaaaactcaacatgtcgttcggggatcgccctaatctcgagctccttcgagcactgggggagcttagacaacgctgtgctatactcaaggaggagaatcagatgctgcggaagagttcatttcccgagaccgaggagaaagttagaagattgaaaaggaaaaacgcagagttagccgtgatcgccaaacggctggaagaaagggctcggaaattgcaggagacaaacctacgggttgtgtccgctccgctgcctagacccggcacgtcacttgaactctgccgtaaggcactggcaaggcagcgcgcccgggacctgtctgagaccgccagcgccctgttggccaaagataagcagatcgctgccctacagcgcgagtgtcgcgagttacaggcaagactgacccttgtggggaaggaggggccccagtggctccacgtccgagactttgataggctgctgcgcgagtctcaaagagaggtccttagactgcagcgtcagatcgcccttaggaatcagagagaaaccttgcccctgcccccctcatggccacccggcccagcactgcaggcacgcgcaggagctcccgcaccaggagctcctggcgaggccacacctcaggaagacgcagataatttgcccgtgatcctgggcgaacccgagaaagagcagagggttcaacagctcgaatcagaactgtccaagaagagaaagaaatgcgaatcactggaacaggaagcccggaaaaaacagaggagatgtgaagagctcgagttacagctgcgccaggcccaaaatgaaaacgcccgtctggtggaggagaactccaggctgtccggcagagctacagaaaaagaacaggtagaatgggaaaacgccgaactgcggggacagttgctgggggtgactcaggagcgagactccgccctacgcaagagccaaggtctacaatccaaacttgaatcgctcgaacaggtgctgaaacacatgcgcgaagtggctcagagaagacaacagctcgaggtcgaacacgaacaagccaggctctcgctacgagagaagcaagaggaggtgaggcgtctgcagcaggcacaggcggaggcacaacgggagcatgaaggcgcggtgcagttattggagagtaccctggactctatgcaggctcgagtccgggaactcgaagagcaatgtaggtctcagactgagcaattctccctgttggcacaggagctacaagcattccggctccaccccgggcccctggaccttttgacctctgctctcgactgtggatccctgggggattgcccacctcctccctgctgttgttccatcccacagccatgtaggggcagcggtccgaaggatctggacctgcccccggggtccccaggaagatgcactcctaagtctagtgagcctgcccccgcgactctcaccggcgtgccgcgcagaactgccaagaaagccgaaagcttatcaaactcatcccacagcgaatccatacacaactcccccaaatcgtgtcccacgcctgaagtagataccgctagcgaagtggaggaactggaagcggatagcgtgtctctgctgcctgctgcccccgagggctcccgagggggggcgaggattcaggtctttctcgcccggtactcctataaccctttcgagggtccaaacgaaaaccctgaagcagagcttcctctgactgcaggagaatacatctacatctacgggaacatggatgaggacggatttttcgaaggagaattgatggacggccggcggggtctggtaccatctaattttgttgaaagggtctccgacgacgacctgcttactagcctccctcctgaacttgcagatctgagccatagttctggccccgaactgagctttctgtcggtcggcggagggggcagtagttcagggggacagagctctgtcggccggtctcaacctcgaccggaagaagaggacgctggcgatgaactgtctctgagcccctcaccagagggattgggagaaccaccggccgtcccataccccagacggctggtggtgcttaaacagttggcgcattccgtcgtgctggcttgggaacccccccccgaacaggtcgagctgcacggcttccatatctgtgtgaatggtgaattaaggcaggccctgggtcccggggcacctccaaaggccgtgctggaaaatttagatttatgggcagggccactgcacattagcgtgcaagcactaacgtctcgcggctcttctgaccctctgaggtgctgtcttgcggttggcgcaagggccggagtcgtcccaagccagctgcgcgtacaccggcttactgctacatccgccgagatcacgtgggttcccggaaatagtaacctcgctcacgcaatctacttgaatggggaggagtgtccaccagcctcaccttcgacatattgggccacattttgccacctgcggcccggcaccccctaccaagcacaagtggaagcccagctgccccctcagggcccgtgggagcctggctgggaaaggctagagcagagagcagccaccttgcaatttaccaccctgcccgcaggcccaccagatgcgcctctggacgtccagatcgaacctggaccatcacccggaatcctaattatttcttggttgcccgtcacaatcgacgccgctgggaccagcaacggcgtgcgcgtaaccggctacgccatctacgccgacggacagaagatcatggaggtagccagcccaacagcaggttctgtgctggttgagttaagccagcttcagttactccaagtctgccgcgaggttgtcgtccgcacaatgagtccccatggggaaagcgcggactcgatcccagcccctatcaccccagccctggcacctgcatccctgcctgccagggtgagttgcccgagcccccatccctctccagaagctcgagcccccttggcctcagcaagcccagggcctggcgaccccagcagccctctacagcacccagctccattggggacccaggagccgcctggagctccaccggcatcccccagcagagagatggcaaagggatcccacgaagatccgcctgctccctgtagccaggaagaggctggcgcagccgttctgggcacctcagaggagcgaacggcctcaacatcaactctgggggagaaagatcctgggccagctgctccttcactggctaagcaggaagctgagtggactgctggggaggcttgcccagccagttcaagcacccagggagccagggcacaacaagccccaaataccgagatgtgccaaggcggagaccccggatcaggactcagacccagggctgaaaaagaagatactgcagagttgggggtgcacctggtgaattcactggtggaccatggcaggaactctgacctgtccgatatccaggaggaagaggaggaagaggaggaagaagaggaagaagagctcggctcaagaacctgctctttccagaaacaggtggccggcaactcaatccgagagaatggtgctaagagccagccagacccattctgtgagaccgacagtgatgaagagatcctcgagcagattctggaactgccattgcaacaattttgctccaagaagctcttttccattcctgaggaagaagaagaggaggaggaagatgaagaggaggaaaaatcgggtgccggatgtagcagccgggacccaggaccccccgaaccggcccttttagggctcggctgcgatagcgggcaaccacgccgccccggtcagtgccccctgtcacctgaatcctccagggcaggcgactgcctcgaggatatgccggggcttgtgggggggtcctctagaagacgcggtgggggctctccagaaaagccacccagtaggcggcgccccccagatccgcgggagcactgctctcgcctgttgagcaataacggccctcaggcgagcggacgactgggcccgacacgggaacggggcggactgccggtgatcgaaggccctagaaccggccttgaggcctcaggcaggggccggctgggtccctcaagacgatgcagtaggggtcgcgcactggagcccggcctggccagctgcttgtcccccaagtgcctggaaatctcaatcgaatacgactcagaggatgaacaggaagccggttcagggggaatctcaattacctcatcatgctacccaggggatggagaggcatggggcacagccactgttggtagaccccggggccccccgaaggctaacagcggaccaaaaccctatcctcggttgccagcttgggaaaagggggaacctgagaggcgcggacgctccgcaacaggaagagccaaggaacccctcagcagagcaaccgagacaggagaggctcgggggcaggatggaagtgggaggcgcggccctcagaagcggggagttagggtactccgcccctctaccgccgagctggtgcctgcccgctcgccttctgagacactggcttaccaacacctgcctgtgcggatatttgtggccctcttcgattacgatcccgtcagcatgtcaccaaatcccgacgctggcgaggaggaacttccatttcgggaaggccaaattctgaaggtatttggcgacaaggacgccgacgggttttatcaaggggaaggtggtgggcgaacaggctacatcccatgtaatatggtggcggaagtcgccgtggactcccccgcggggcgccagcagctcctacagcgtggatatctgtctccggatattctattggagggctccggcaatggaccttttgtttactccaccgctcatactaccggcccccctcccaagccgcgaaggtctaaaaaggccgagtctgaaggtcctgctcagccctgccccggaccacccaagctggtgccatcggccgacttaaaagcaccccatagcatggtggcagccttcgattataatcctcaggagtcttctcccaacatggacgtcgaggcagagctgccatttagggccggagatgtcatcaccgtgttcggcggcatggacgacgacggcttctactacggagagctaaatggtcagagaggactggtccccagtaactttctcgaaggcccaggtcccgaggcaggaggccttgatagggagccccgaactccacaggcggagtcacaggattggggctgcacaacacaagggtcacccggaccacccggaggcccatgcaccccatcatctgggagcgctcctcggatagagaggggtgagccccagggtcggagcgagaaagtttggggattttttagtaagggcaagcagttattgcgccggttggggtctggtaaaaaagagtag

SEQ ID NO: 294664 - DNA, 5724 bp, Artificial Sequence
  derived and/or modified sequence
atggagcagctgaccaccctgcccaggcctggggaccccggggccatggagccctgggccctgcccacctggcacagctggaccccaggccggggcggggagcccagcagcgctgcccccagcattgctgacaccccacctgctgccctgcagctgcaggagctgcggtctgaggagagcagcaagcccaagggagatggcagcagcaggcctgtgggcggcacagatcctgagggcgctgaggcctgcctgcccagcctgggccagcaggccagcagcagcggccctgcctgccagaggccagaagatgaggaggtggaggccttcctgaaggccaagctgaacatgagctttggagaccggcccaacctggagctgctgcgggccctgggggagctgcggcagagatgtgccatcctgaaggaggagaaccagatgctgaggaagagcagcttccctgagacagaggagaaggtgcggcggctgaagaggaagaatgctgagctggccgtcatcgccaagaggctggaggagcgggccaggaagctgcaggagaccaacctgcgggtggtgtctgcccccctgccccggcccggcaccagcctggagctgtgcaggaaggccctggcccggcagagggcccgggacctgtctgaaacagccagcgccctgctggccaaggacaagcagattgctgccctgcagagagaatgtcgggagctgcaggcccggctgaccctggtgggcaaggagggcccccagtggctgcacgtgcgggactttgaccggctgctgcgggagagccagcgggaggtgctgcggctgcagaggcagatcgccctgaggaaccagcgggagaccctgcccctgcccccatcctggcccccaggccctgccctgcaggcccgggccggggccccagcccctggggcccctggagaggccaccccccaggaggatgctgacaacctgcctgtgatcctgggggagcctgagaaggagcagagggtgcagcagctggagagcgagctgagcaagaagaggaagaagtgtgagagcctggagcaggaggccaggaagaagcagaggcgctgtgaggagctggagctgcagctgcggcaggcccagaatgaaaatgcccggctggtggaggagaacagccggctgagcggccgggccacagagaaggagcaggtggagtgggagaatgctgagctgcggggccagctgctgggcgtgacccaggagcgggacagcgccctgaggaagagccagggcctgcagagcaagctggagagcctggagcaggtgctgaagcacatgagggaggtggcccagaggcggcagcagctggaggtggagcacgagcaggcccggctgagcctgcgggagaagcaggaggaggtgcggcggctgcagcaggcccaggccgaggcccagcgggagcatgaaggagctgtgcagctgctggagagcaccctggacagcatgcaggcccgggtgcgggagctggaggagcagtgccgcagccagacagagcagttcagcctgctggcccaggagctgcaggccttccggctgcaccctggccccctggacctgctgaccagcgccctggactgtggcagcctgggggactgccccccaccaccctgctgctgcagcatcccccagccctgccggggcagcggccccaaggacctggacctgcccccaggcagccctggccgctgcacccccaagagcagcgagcccgccccagccaccctgactggagtgcccaggagaacagccaagaaggccgagagcctgagcaacagcagccacagcgagagcatccacaacagccccaagagctgccccaccccagaggtggacacagccagcgaggtggaggagctggaggccgacagcgtgtccctgctgcctgctgcccctgagggcagcagaggaggagcccgcatccaggtgttcctggcccgctacagctacaacccctttgagggccccaatgaaaatcctgaggccgagctgcccctgacagctggggagtacatctacatctacggcaacatggatgaagatggcttctttgaaggagagctgatggatggccggcggggcctggtgcccagcaactttgtggagcgggtgtctgatgatgacctgctgaccagcctgcccccagagctggccgacctgagccacagcagcggccctgagctgtccttcctgtctgtgggcggcggcggcagcagcagcggcggccagagctctgtgggccgcagccagcccaggcctgaggaggaggatgctggagatgagctgagcctgagccccagccctgagggcctgggggagcccccagctgtgccctacccccggcggctggtggtgctgaagcagctggcccacagcgtggtgctggcctgggagcccccacctgagcaggtggagctgcacggcttccacatctgtgtgaatggagagctgcggcaggccctgggccctggggccccacccaaggctgtgctggagaacctggacctgtgggccggccccctgcacatctctgtgcaggccctgaccagccggggcagcagtgaccccctgcgctgctgcctggccgtgggcgcccgggccggcgtggtgcccagccagctgcgggtgcaccggctgacagccaccagcgctgagatcacctgggtgcccggcaacagcaacctggcccacgccatctacctgaatggagaagaatgtcctccagccagccccagcacctactgggccaccttctgccacctgcggcccggcaccccctaccaggcccaggtggaggcccagctgcccccccagggcccctgggagcccggctgggagcggctggagcagagagctgccaccctgcagttcaccaccctgcctgctggccccccagatgcccccctggatgtgcagatcgagcccggccccagccctggcatcctgatcatctcctggctgcctgtgaccattgatgctgctggcaccagcaatggagtgcgggtgacaggctacgccatctatgcagatggccagaagatcatggaggtggccagccccacagctggctctgtgctggtggagctgagccagctgcagctgctgcaggtgtgccgggaggtggtggtgaggaccatgagcccccatggagagagcgctgacagcatcccagcccccatcaccccagccctggccccagccagcctgcctgcccgggtgtcctgccccagcccccaccccagccctgaggcccgggcccccctggccagcgccagccctggccctggggaccccagcagccccctgcagcacccagcccccctgggcacccaggagcccccaggggcccccccagccagccccagccgggagatggccaagggcagccatgaagatcctccagccccctgcagccaggaggaggccggggctgctgtgctgggcaccagcgaggagaggacagccagcaccagcaccctgggggagaaggaccccggccctgctgcccccagcctggccaagcaggaggccgagtggacagctggggaggcctgcccagccagcagcagcacccagggcgcccgggcccagcaggcccccaacacagagatgtgccagggcggggaccccggcagcggcctgcggcccagggctgagaaggaggacacagctgagctgggcgtgcacctggtgaacagcctggtggaccatggaagaaacagcgacctgagtgacatccaggaggaggaggaggaggaggaggaggaggaggaggaggagctgggcagcaggacctgcagcttccagaagcaggtggccggcaacagcatcagagaaaatggagccaagagccagcctgaccccttctgtgaaacagacagtgatgaggagatcctggagcagatcctggagctgcccctgcagcagttctgcagcaagaagctgttcagcatccctgaggaggaggaggaggaggaggaggatgaggaggaggagaagagcggggccggctgcagcagccgggaccccggccccccagagcccgccctgctgggcctgggctgtgacagcggccagcccaggaggcctggccagtgccccctgagccctgagagcagcagagctggggactgcctggaggacatgcctggcctggtgggcggcagcagcagaagaagaggaggcggcagccctgagaagccacccagcagaagaagacctccagacccccgggagcactgcagccggctgctgagcaacaacggcccccaggccagcggccgcctgggccccacccgggagcggggcggcctgcctgtgattgagggccccaggacaggcctggaggccagcggccggggccgcctgggccccagccgccgctgcagccggggccgggccctggagcccggcctggccagctgcctgagccccaagtgcctggagatcagcattgaatatgattctgaagatgagcaggaggccggcagcggcggcatcagcatcaccagcagctgctacccaggagatggagaggcctggggcacagccaccgtgggccggccccggggcccccccaaggccaacagcggccccaagccctacccccggctgcctgcctgggagaagggggagcctgagcggcggggccgcagcgccaccggccgggccaaggagcccctgagccgggccacagaaacaggagaggcccggggccaggacggcagcggccggcggggcccccagaagaggggcgtgcgggtgctgcggcccagcacagctgagctggtgcctgcccggagccccagcgagaccctggcctaccagcacctgcctgtgcgcatctttgtggccctgtttgattatgaccctgtgtccatgagccccaacccagatgctggggaggaggagctgcccttccgggagggccagatcctgaaggtgtttggagacaaggatgctgatggcttctaccagggcgagggcggcggccgcacaggctacatcccctgcaacatggtggccgaggtggccgtggacagccctgctggccggcagcagctgctgcagaggggctacctgagcccagacatcctgctggagggcagcggaaatggcccctttgtgtacagcacagcccacaccaccggccccccacccaagcccaggaggagcaagaaggccgagagcgagggccctgcccagccctgccccggcccccccaagctggtgcccagcgctgacctgaaggccccccacagcatggtggccgcctttgactacaacccccaggagagcagccccaacatggatgtggaggccgagctgcccttccgggctggagatgtgatcaccgtgtttggaggcatggatgatgatggcttctactatggagagctgaatggccagaggggcctggtgcccagcaacttcctggagggccctggccctgaggccggcggcctggaccgggagcccaggaccccccaggccgagagccaggactggggctgcaccacccagggcagccctggccccccaggcggcccctgcacccccagcagcggcagcgcccccagaattgagcggggggagccccagggccgctctgagaaggtgtggggcttcttcagcaagggcaagcagctgctgcggcggctgggcagcggcaagaaggagtag

SEQ ID NO: 294665 - DNA, 5724 bp, Artificial Sequence
  derived and/or modified sequence
atggagcagctgaccaccctgccccggcccggcgaccccggcgccatggagccctgggcccttcctacctggcattcatggactcctggcagagggggcgaaccatcgtcagccgcaccgagcatcgcagacacaccacccgctgctttacaactgcaggagctcagatctgaagaaagctctaagccaaagggggatggctccagcagacctgtaggtgggaccgacccggaaggtgcagaggcatgtctgccttccttggggcagcaggcttcatcctcagggcctgcctgtcagcgcccggaggacgaagaggttgaggctttcctgaaagcgaagctgaatatgtcgtttggtgaccgcccgaacctggagctcctgagagcgctgggggaactgcgccagcggtgcgccattctgaaagaggagaatcagatgctgcgcaaaagctccttcccagagacagaggagaaagtccggcgcttaaagagaaaaaacgcagagctggccgtaattgccaaacggttagaagagagagctcgcaagctacaggagaccaacttgagggtggtgtcggccccacttcctcgtcccggcacttcgctggagttgtgtcgtaaagctcttgcccggcagcgggcacgagacctgagcgagactgcatcagccctactggcgaaagacaagcagatcgcagcactgcagcgcgaatgtcgcgagttgcaggctcggttgactcttgtgggcaaagaaggcccccaatggctgcacgttcgggacttcgatcgattattgcgcgaatcccaacgggaagttctcaggctgcagcggcagatcgccctgcgcaatcaaagagaaactttgcctctgcccccaagttggcctccgggcccagcactgcaggcacgggctggcgcacctgcacctggagctccaggggaagcaactccacaggaggacgctgacaatttaccggttatattgggagaacctgaaaaggaacaacgtgtacagcagctcgaatcagagttaagcaagaagaggaagaagtgcgaatcgctggagcaggaggccaggaaaaagcagcgtcggtgcgaggaactcgagctgcaactacggcaggcgcaaaacgaaaatgccaggctggtggaggagaactcacggctttcgggacgggctacagagaaggagcaggtggaatgggagaatgcggaacttcgcggtcagcttctgggtgttacccaggagcgggattctgctctcagaaaatctcaggggctgcagtcaaagctggagtctcttgagcaagtactcaagcacatgagggaggttgctcagaggcgccagcagcttgaggtagagcacgaacaggcacggctgtccttgagggagaagcaggaggaagtgaggcggctacagcaagcccaagcggaggcccagcgggagcacgaaggggctgtccagctcctcgagtccacccttgacagcatgcaggcacgtgtcagagaattagaggagcaatgccggtcacaaactgaacagttttctctgttggcccaggagctgcaggccttccggctccacccagggccgcttgatctactgactagtgcactggactgcggctctctgggcgattgcccccctcctccgtgctgttgctctattccacagccttgtagggggtccggcccaaaagatcttgaccttccacctgggtctcctggccgatgtacccctaaatccagtgagccagcgcccgccaccctgacaggtgtgcctcgccgaactgcaaagaaagctgagtctctatctaactcgtctcactctgagtcaatccacaactctccgaagtcctgtcctactcctgaggtcgacacagcgtccgaggtggaggagctggaggcggacagtgtctctttgttgccagccgctccagaaggatccagggggggcgcaagaatacaggtgttcctggcaaggtactcatacaacccgtttgaggggccaaacgaaaaccccgaagcggagcttcccctgactgctggagaatatatttacatttatggcaacatggacgaggatgggttctttgagggtgaacttatggacgggcggaggggtctggtgccctccaacttcgttgagcgggttagcgacgacgacctgctgacttcccttcccccagaactggccgacctgagccacagctccggccctgaactttcatttctttcggtcggtggtgggggaagcagttcaggaggacagagtagcgttgggagatcgcaaccccggcctgaagaggaggacgcaggtgacgagctgagcctttcaccatcgcctgagggcctcggcgaacctcccgccgtgccctatccccgccgactagtcgtgctgaagcagcttgctcacagtgtagtgctggcttgggagcctcctccagaacaagtcgagcttcatggatttcatatctgcgtcaatggagagttgcgccaggcattaggcccgggggccccccccaaagccgtgctggagaatctggacctgtgggccggcccgctgcatatttctgtacaggccctcacgtcccgaggttcttccgaccccttgcgctgctgcctcgctgtaggcgcccgtgcaggagtggtgccttctcagctccgcgtgcacagattgaccgctacctcggctgagattacctgggtgccagggaactcaaacctcgcacatgccatttatctaaacggcgaagagtgtccacccgcctccccctccacatactgggctactttttgccatttgcgacctggtactccttaccaggcgcaggtagaggcccagttgcctccacaggggccatgggagcccggttgggagcggctggagcagagagcggcaacccttcagtttacaaccctcccagccgggcccccagacgcaccactagacgtgcagattgagcctgggccaagccccggaatcctgattatctcttggttgccggtgacaattgacgccgccggcactagcaatggcgtacgggttactgggtatgctatttacgcggacggacagaagattatggaagttgcttcacccactgccggaagtgttcttgtggagctgagtcaattgcagctccttcaggtgtgcagagaggtcgtcgtccgcacaatgagtccacacggggaatctgcagattcgattccggccccgatcacgcctgctctggcccctgcaagtctgccagctagagtgtcatgtccttcccctcacccatccccagaggccagagcccctctcgctagcgcgagtccgggacctggtgatccttcttctccgcttcagcatcctgcccctttggggacacaggagccgcctggcgccccacctgcctcgccttcccgggaaatggccaagggctcccacgaggacccccccgcaccttgttcccaggaggaagcaggagccgctgtgttggggacttccgaagagcgtacggccagcacttctacactaggcgagaaggaccctggtcctgcagccccttcgcttgctaaacaggaagccgaatggaccgctggggaagcatgcccagctagctcctctacacagggggcccgggcgcaacaggcccctaacactgaaatgtgtcagggcggcgatccaggctcaggcttgagacctagggctgaaaaagaggacacagccgagctgggagtacatctggttaatagcctggtcgaccacggacggaatagcgatcttagtgatatccaggaggaggaggaagaagaggaggaggaggaggaagaggagttgggatcccggacctgtagctttcagaaacaggtcgctggcaactcaatacgtgaaaacggtgccaagtcacaaccggatcccttttgcgagacggatagcgacgaggagattctggagcagattcttgaattgcctctacagcagttctgttctaaaaaactattcagtattcccgaagaagaggaggaggaggaagaggacgaagaagaagagaaatctggagcaggttgcagctcccgcgaccctggtccccccgagcctgccttgctcggactcggctgcgattcgggtcagcctcgcaggcccggtcagtgtccactttcaccggagagctccagagccggtgactgtctggaagacatgccgggtttagtggggggatcttctcgcagaagaggcggaggtagccctgagaaacccccatcacgcaggcgtccccctgaccctcgggagcactgttcacggctcttaagcaacaatgggccccaagcctccggacggttaggccccacgagggagaggggaggactgccagtgatcgaagggccacgaacaggccttgaggcctcaggtcgaggccggctgggacctagcaggcgatgcagcagaggcagagccctggagccaggacttgcttcctgtctgagccctaaatgcttagaaatttctattgaatacgattcagaggatgagcaggaggcaggttcaggggggatctccataacatcttcttgctacccaggtgacggcgaggcttggggcaccgctacggtgggccgtcctcgaggacctcccaaggccaacagtggccctaagccttacccccgcttgcctgcatgggagaagggcgaaccggagcggcgcggccgatccgctaccggtagggcaaaagagcccctctcccgcgccactgagacaggggaggctcgtggtcaggatgggtcaggccggcgagggcctcagaagcgcggagtcagagtgctaaggccctccactgccgagctggtgccagctagatccccctcggaaacgctggcctaccagcatctgcctgtccgcatttttgtggccttattcgactacgatccagtttccatgtctccaaatcctgatgccggtgaggaagaattaccattccgtgaagggcaaattctgaaggtatttggggataaagatgcagacggcttctaccagggagaaggcggcggacggacaggatatataccttgcaacatggtcgctgaggtcgccgtggacagtccagcgggcaggcagcagctcctgcagaggggctacttgtcacccgatatccttctggaagggtcaggtaacggcccttttgtgtactccacagctcatactaccggacctccacccaaacctagacgtagcaaaaaagccgagtccgagggtcccgcacaaccttgccctggaccccctaagctggtcccctctgctgatcttaaagcccctcatagcatggttgcggcatttgattataatccccaggaatcttcccccaatatggatgtggaggctgagttgccctttcgggctggcgatgtcatcacggtttttggaggtatggatgatgacggattctactacggcgagctcaatggccagagggggctagtaccctctaacttcctcgaggggcccggtcctgaagcgggaggactggaccgagagcccagaaccccacaggcggaatctcaggactggggatgtacaacacagggttctcccggcccaccaggtgggccatgtaccccatcaagtgggagtgcgccacgaattgagcgcggggagccccaggggcgcagtgaaaaagtgtgggggttcttctcaaaaggaaagcaacttttacggcgcctcgggtccggtaagaaagagtag

SEQ ID NO: 294666 - DNA, 5723 bp, Artificial Sequence
  derived and/or modified sequence
atggaacagctgacaacactcccccgacctggcgatcccggagcaatggaaccttgggccttgccgacgtggcattcatggacacctggcagaggcggtgaacccagctccgcagccccatcaatcgctgataccccgccagctgctctccaactacaggaactacggtcagaagagtcctcgaaacccaaaggagacggcagctcccggccagttggcggtacagatccggaaggcgctgaggcatgccttccatcactcgggcagcaagcatcgtcgagtggtcccgcatgtcagcggccagaggatgaagaagtggaggcattcttaaaagcaaaactgaatatgtcctttggggaccgcccaaatctggagttgttgagagccctcggggaactgaggcagaggtgtgccatcctaaaggaggaaaatcagatgctcagaaagagcagcttcccagaaactgaggagaaagtccgacgcctcaagaggaagaatgccgagctggccgtgatcgctaagaggctcgaagagcgggctaggaagctgcaagaaaccaacctgcgagtcgtgtctgctcccctcccaagacccggtacctccctggagctctgtagaaaggccctggcccgacaacgcgctagggatctgagtgagacagccagcgctctcctcgctaaggacaaacagatagcagcactccagcgggaatgcagagaattgcaggctcgactgacacttgtaggcaaagaaggaccccagtggctccacgtgcgcgattttgatagactattaagagagagccagcgggaggtactcaggcttcagcggcagatcgcactacgaaaccagagggagacactacccctgcccccatcctggccaccgggtccagcgttgcaggctagagccggagccccagctcccggagcgccaggggaggcaacaccacaagaagacgctgacaatctgcccgtcatacttggagagccagaaaaagaacagagagttcagcagctcgagtccgaactcagtaagaagaggaaaaagtgtgaatctctcgaacaagaagctcgcaagaagcagagaagatgtgaagaactggagctgcagctgcgtcaggcacagaacgaaaacgcccgactcgttgaagaaaatagccggctgtccggcagggccaccgagaaggagcaggtcgagtgggaaaacgctgagctgaggggacaactgctcggtgtaacccaggagcgagactcggccttgcgcaaaagccaaggcttgcaatctaaattagaaagcctggaacaagttctgaagcacatgcgggaggtcgcgcagagaaggcaacagctggaggtagaacacgagcaggcgcgattgtcactccgagagaaacaggaagaggtgcggaggttgcagcaggcgcaagccgaagctcagagggaacatgagggcgctgttcagctgctggagagtacattggattcaatgcaggccagggtgcgggaactcgaagagcagtgccggtcccaaaccgagcagttcagtctcttggcacaagaattacaggcgtttcgcttgcaccccggaccgctcgacctgttgacgagcgccctcgactgcgggtctctcggcgactgcccaccccctccgtgttgttgcagcattccccagccctgccgcggttcagggccaaaagatctggacttgccgcctggtagtccaggtagatgcacaccaaaaagcagcgaacccgctcctgcgactctgactggtgttcctcggagaaccgctaaaaaggctgagtccctttcaaactccagtcactctgagagcatacataattcccccaagtcctgtcccactccagaagtggatacagcctccgaagtggaagaactggaggctgactcggtttctctgctccccgctgctcccgagggaagccgcggtggagcacgcatccaagttttcctcgcaaggtattcctataatcccttcgagggccctaacgaaaatcccgaagccgaactacctctgactgcgggagagtatatctacatatacggcaacatggacgaggacggtttctttgaaggcgagctgatggacgggaggcggggactggtgcctagcaacttcgtggagcgcgtctcagatgatgatctactcacttccctcccgccagagctggcggacctctcacatagttccggccctgaactctcgtttctctctgtcggaggaggtgggtcatcctctggcggacaaagctctgtcgggaggtctcagccacgccctgaggaggaggacgcgggagacgagctgtctctctctccatccccagagggactcggtgaacctcctgccgtaccttacccgagaaggctggtcgtcctgaaacaactcgcccactctgttgttttagcctgggagcctccaccggaacaggtggagctgcacggctttcatatttgcgtcaacggagaactgcgccaggccctggggccaggcgcaccccctaaagccgtgcttgaaaatctcgacttgtgggccggtccccttcatatctctgtgcaggcccttacgtcgcggggtagcagcgaccccctaaggtgctgtctggccgtaggggctagggccggagtggtgccatcccagctgcgcgtacatcgattaacagccacaagcgctgagatcacatgggtgcccggaaacagcaatttagcccatgccatttacctcaatggggaagagtgtcccccagcgtcccccagcacttactgggctacattctgccatctgcgcccaggcaccccatatcaagctcaggtcgaggctcaactccctcctcagggtccatgggaacccggatgggagagactggagcagagggcggctacactccaattcaccacacttcctgcgggaccacccgatgcccctctggacgtacagatagagcccggtccttccccaggtattctgattatctcttggctgcccgtgaccattgatgctgcaggaacaagcaatggtgtccgggtgaccggatatgcaatatacgccgatggccaaaagataatggaggttgcaagcccaactgcaggaagtgtgctggtggagctgagtcagcttcagcttctacaagtgtgtcgagaggtggtagtccggaccatgtccccacacggtgagagcgctgactccattccagcaccaataaccccagctctcgcacccgcaagcttgccagcgagggtgtcctgcccctctccacatcccagcccggaggctcgggctccattggcaagtgcctctcctggcccaggagatccgtcctctcctctccaacatcctgcccctttgggcacacaggaacctccaggcgcaccaccggctagcccctcccgagaaatggctaaagggtcccacgaggatccacctgcaccatgctcacaggaggaagccggtgctgctgtgctgggtacttccgaagaacgaacggccagcacatcaactctgggggagaaggacccgggtcccgcagctcccagcctggctaagcaggaagcagagtggaccgcaggtgaggcctgtccggcttcatcttccacccagggagcgagagcacagcaagccccaaacacggaaatgtgccaggggggagatccaggcagcggcctgagaccaagggctgaaaaagaagacaccgccgagctcggcgttcacctggtcaattccctcgtggatcacggccgaaatagtgacctgtctgacattcaggaggaggaggaggaggaggaggaagaggaagaagaagagctcggatcacggacttgttcttttcagaagcaagtggcaggcaacagcattagggagaatggagctaagagccagcctgaccccttctgcgagactgattccgacgaggagatactcgagcagatcttagagctacctttgcaacagttttgttccaagaaactatttagcattccagaggaggaagaggaggaagaggaggacgaggaggaggagaagtccggggctggctgctcttctcgtgatcccggaccccctgaacccgcactattgggacttggctgcgacagtggacagccgaggagacccggacagtgtcccctgagccccgaaagctcaagagcaggggactgcctggaagacatgcccggtctcgtagggggatcaagccggaggaggggaggcggttcccccgagaagccgccaagccgcaggagaccgccagaccccagggaacactgtagcaggctccttagcaataacggacctcaggcatcaggccgtcttggacccacccgtgaacgcggaggtcttccagtcatagaaggaccacgtactggcctggaggcgtcgggtagaggaagactaggcccaagtcgcagatgctcacgcggtagagcgttagagcccggtctcgctagttgcctgagccctaaatgcctggaaatcagtatcgaatacgactcagaggacgaacaagaagccggtagtggagggatttctattactagttcatgttaccccggagatggagaagcatggggaacggcaactgtcggacggcctagaggacctcctaaagccaatagcggaccgaagccttatccgaggctccccgcatgggagaagggggagcccgagcgcagagggagaagcgccacggggagggctaaagagccgttgtcccgagccaccgaaaccggcgaagcccgtgggcaggacggcagcgggagaagaggccctcagaagagaggggtacgggtgctgcgcccttccactgctgaactcgtccctgctagatccccaagcgagacgcttgcatatcagcatctgccggtgcgaatttttgtggccctgttcgactatgaccccgtctcaatgagccccaatccagacgctggggaagaagagttaccttttagggaagggcagatcctgaaagttttcggagataaggacgcggacggtttttaccagggcgagggcggaggccgaactggctatataccatgtaacatggtcgcagaggtcgccgttgacagtccagctgggcgacagcagttgcttcagcgtggttacctgtccccggacattctgttggagggttccgggaatgggccatttgtctacagcaccgctcataccacaggcccaccaccaaaacctagaagaagcaaaaaggctgagagcgaggggccagcgcagccctgccccggaccccctaagctcgtcccctccgcagatctgaaggctccgcacagcatggtcgctgctttcgactataacccgcaagagtcctcccctaacatggacgtggaggcagagcttccctttcgagccggtgacgtcattacagtgtttgggggaatggacgacgacggcttctattatggtgagctgaatggtcagagagggctggtgccatccaacttcctggaaggtccaggacctgaggcgggtggccttgatagggagcccagaacaccccaggcagagtctcaggattggggctgtacaacgcagggcagcccgggaccacctggagggccttgtacaccctcctcagggtcagcgccacgtatcgagcgaggcgagccacaggggaggtccgaaaaagtttgggggttttttagcaagggtaaacagttgttacggcgtttaggaagcgggaaaaaggagta

SEQ ID NO: 294667 - DNA, 7626 bp, Artificial Sequence
  derived and/or modified sequence
ctgaggctcagccctcctcggagcccaccatctcgaggctcctggactgtaagggacccctgcagtccccagagcagaggccagcaggggctgagactatgaggcaagcagcccatcgacccaggcctccttaggaccagcccagccacccagcaagcgaaagagcagcagcagagagcagagccggagataaaggaccacagcggaccactggggatcacccccagcagctcctgaagcctctggccgggctgaggggttgcgacagacggccagacccacagacactgacagacacacaacgacaccgatgcacacagctgcacgacactgacacactcagatacaaccagggacagcatcacatactgccacagccctgcaatacagacacccacacacacacacacaaacaactggcaactctgaaatgggcagacagtgacacacagcaccacccccctcaacacacagaagtgggggcacccatcttcccaacacatgagacagcattgacctgcacggacagacctggagacacacacacgcaccctcacccaggcgcagctgtcggtggcctctgcacatcctccctacccccacagggacaccctcgctcctccacatactcgcgcacacacacagctaccagcaaacatagctcacatacccctggctccagctccagcagccctggcgccttctgcagcctcctttgtgggtggggaagagctcagccaaccttggatggagcgtcggtgaagcaagagctcagaggggagaggggctggcctggcatgaccctcgccagtccccccacctggctgggtgatgtcccccggcccgggttctggggccccttggcagtaccatggagcaactgacaaccctcccacggcctggggaccctggagccatggagccatgggcactgcccacctggcatagctggactccaggtcgagggggtgaacctagcagtgcagccccaagcatcgctgatactcctccggcagctctgcagcttcaagaactgaggtctgaggagagttccaagcccaaaggagacgggagctccaggcccgtggggggaactgaccctgaaggagcagaggcttgtctgcccagcctgggccagcaagcatccagctctggacccgcctgccagaggccagaggatgaggaagtggaggctttcctgaaggccaagctgaatatgagctttggggacaggcccaatctggagctgctgagggccctgggggagctgcggcagcgctgtgccatccttaaggaggaaaaccagatgctgaggaagagcagcttccctgagacagaagagaaggtgcggaggctgaagaggaagaacgccgagctggcggtcattgccaagcgcctggaggagagggcccgaaagctgcaggaaacgaacctgagggtggtgagtgcccccttgccccggccggggaccagcttggagttgtgtcggaaggccctagcccgccagcgagcccgggacctcagtgagacagccagtgcactgctggccaaggacaagcagattgctgccttgcagcgggagtgcagggagctgcaggccaggctcactctggtgggcaaggagggtccccagtggctccacgtgcgggacttcgatcggctgctgcgcgagtcccagcgggaggtgctgcggctgcagaggcagatcgcgctgcgcaaccagcgggagacgctcccgctcccgccgtcctggcccccgggccctgctctccaggccagagcaggggcgcctgctcccggggccccgggagaggccacgccccaggaggatgcggacaacctacccgtgattctaggggagccagagaaagagcagagggtgcagcagctggaatcggagctcagcaagaagcggaagaaatgcgagagcctggagcaggaagcccggaaaaagcagaggcgatgtgaggagctggaactgcagctgagacaagcgcagaatgagaatgcccgcctggtggaggagaactcccggctcagtgggagagccacagagaaggagcaggtggagtgggagaatgcggagctgaggggccagctcctgggggtgacacaggagagggactcagcccttcgcaagagccagggcctgcagagcaagctggagagcctggagcaagtgctgaagcacatgcgggaggtggcccagcggcggcagcagctggaggtggagcatgaacaggctcggctcagcctacgggagaagcaggaggaggtccggagactgcagcaggcccaggctgaagcccagagggaacatgaaggagccgtgcagctgctggagtctaccttggattccatgcaggcccgggttcgagagctcgaagaacagtgccgcagccaaaccgagcagttcagcctcctggcacaggaactccaggctttccgcctgcacccgggccccttggatctgctcacatctgccctggactgtgggagccttggagactgcccaccacccccctgctgctgctccattccccagccttgccgggggtctggccccaaagaccttgacctcccgccgggctcccctgggcgctgcaccccaaagtcttccgagcctgcccctgccactctcactggggtccctcgaaggacagccaagaaggcagagtctctctccaactcctcccactccgagtccatccacaacagccccaagtcatgccctacacctgaggtggacacagccagtgaggtagaggagctggaggcagacagtgtctccctgctcccagctgcgccagagggcagccggggaggagccaggatccaggtcttcctagcacgttatagctacaacccctttgagggtcccaatgagaatccagaagcagagcttccgctgacagctggcgagtacatctacatctatggcaacatggatgaggatggcttttttgaaggagagctcatggatggccgaaggggcctggtcccttccaattttgtagagcgtgtgtcggatgatgacctcctgacctccctccctccagagctggccgatttgtcccacagctcaggccctgaactcagtttcctgagtgtaggtgggggtggcagcagtagcgggggccaaagcagtgtgggaaggagccagcccagacctgaggaggaggatgcaggggacgagctcagtctgagcccatcaccggagggcctgggcgagcctcctgccgtgccttacccccgccgtctggtggtcctcaagcagctggcccacagcgtggtgctggcctgggagccgcctcctgagcaagtggagctacacggcttccatatctgtgtgaatggggagctgcgacaggccctggggcctggggcgccacccaaggccgtgctggagaacctggacctgtgggccgggccccttcacatttctgtccaggccctgactagccggggcagctctgacccactgcgctgttgcttggcggtgggtgcccgggccggagtggtgcccagccagctgcgggtccatcggttgacagccacatctgctgagatcacctgggtgcccggcaatagcaacttggcccatgccatctacctcaatggggaagagtgcccacctgccagccccagtacctactgggccaccttctgccacttacggcctggcacaccctatcaggcccaagtggaggctcagctcccaccccaagggccctgggaaccaggctgggagaggctggagcagcgggctgccaccctgcagttcaccacactcccagcaggcccacctgatgcccctctggatgtgcagatcgagcctgggccctcccctgggatcttgatcatcagttggctcccagtcaccatcgatgctgctggcacatccaacggtgtccgggtcacaggctatgccatctacgctgatgggcagaagatcatggaggtggcctcacccacggcaggcagtgtactggtggagttgtcccagctgcagctgctgcaggtgtgtcgtgaggtggtcgtgcgcaccatgtcgccccacggggagtcggcggactccatcccggctcctatcactcccgccctggctccggccagcctgccagcccgagtctcctgcccctcaccgcacccaagcccagaggccagagcgccccttgcttcagcctccccagggcctggagaccccagctctcctctccagcaccctgctccccttggaactcaagagcctccaggagcaccccctgcaagcccttccagagagatggcaaaagggtcccacgaggaccctccagcaccttgctcccaggaggaggctggggcagcagtgctgggcacctcagaggagaggacagccagcacatctaccctgggtgagaaggaccctggccccgcagctccctcactggccaagcaggaggccgagtggactgcaggagaggcctgtccggcctccagctccacccagggagcacgggcccagcaggcgccaaataccgagatgtgccaaggaggagacccagggtctgggctgaggcccagggctgagaaggaggacacagcagagcttggggttcatctggtgaactccctcgtggaccacggccgcaactcagacctgtcagacatccaggaggaagaggaagaggaggaggaggaggaggaagaggagctgggttccaggacttgctccttccagaagcaggttgctggcaacagcatcagggagaatggggccaagtcccagcccgaccccttttgtgagactgacagcgatgaggagatcttggagcagatcctggagctgcccctccagcagttctgtagcaagaagctctttagcatcccggaggaggaggaagaggaagaggaggacgaggaggaggagaagtcaggggcaggctgttcttcccgagaccctggcccgcctgaacctgcattgctggggctgggctgtgacagtggtcagccccgaagacctggccagtgtcccttgtctcctgagtcctccagggctggagactgcctggaagacatgcctggattagttggtggaagcagccggaggagaggagggggctcccctgagaagcccccaagccgcaggcggcctccagatccccgagaacactgcagccgacttctcagcaacaatgggccccaggcctctggacgactgggccccacacgggagaggggtggcctccccgtaattgagggccccaggactggactagaggctagcgggagaggccggctgggcccttcccggaggtgctcccgtggccgggcgctggagcctggcctggccagctgcctttcccccaagtgcttggaaatcagcattgaatatgattcggaggatgagcaggaggcgggcagcgggggcatcagcatcaccagctcctgctaccctggagatggggaggcctggggcacagcaactgtaggaaggcccagggggcctccgaaggccaattcaggccccaagccctacccacgcctcccagcctgggagaaaggggaaccagagcggagaggccgcagtgcgacgggcagagccaaggagccactctcccgggcaacagagaccggagaggccagagggcaggacggctctgggcggaggggcccccagaagagaggtgtccgagtcctcaggccaagcactgcagagctagtccctgcgaggagcccctcagaaacactggcttaccagcacctacccgtcaggatctttgtggctctgtttgactatgaccccgtgtcaatgtcgcccaatcctgatgctggagaagaagagcttcccttccgagagggtcagatcctgaaggtgtttggggacaaggatgccgatggcttctaccagggcgaaggtgggggccggacaggctacattccctgcaacatggtggctgaggtggctgtggacagccctgctgggagacagcaactgctccagcggggttatttgtccccagatattctccttgagggctcagggaatggtccgtttgtgtactccacagcccacacaactgggcctcctcccaagccccgccgctccaagaaagctgagtcggaaggccctgcccagccctgtccaggcccccctaagctggtcccctctgctgacctgaaagctccccactccatggtggctgcatttgactacaacccccaggagagttcccccaatatggacgtggaggcagagctgcccttccgggcaggggatgtcattactgtgtttgggggcatggacgatgacggtttctactatggggaattaaatggacaaaggggcctggttccatccaacttcctggagggccctgggcctgaggcaggcggcctggacagggaacccaggacaccccaggctgagagtcaggactggggctgcaccacacaagggtccccagggcccccaggtgggccttgtacccccagctctggcagcgcccccaggattgaacgtggggagccccagggcagaagcgagaaggtgtggggtttcttctccaaggggaagcagctcctcaggaggctgggctctgggaagaaggagtgaagctgtggcccatcctgcaggcagaagaggccctgagaggcccccagatcactgtctctgctgagcagggaaggctcagactgggcccagagcccccgttcttctgcgttaacactgtggcattcagagggaatcaaagagccttggtgaaggtcagagctaaatggctccttaaggatgaactctctagagaagcaccttcctcctacaggaggggaaactgagcccacagtgagtatgtaacttgaccaaggtcactgagccaggactggacccaggaccctcgcgtcctggtccacccacctcgtctactagtgtcccacagtgctgcgctagtcccttctgccacccttcccagtcccaggacgggccctggagggagaaaggagcctgtgccccctgatggctctggctgtcctgatcctgtcttccctcccctgaaggaaagtttgcactggattttattggagccccatctccccagcgggcaggcgggcggagcctgtatatatgtatatactcagtgcctcagttcagcttcctccacctcgcttccactgcacaggcccaggaaggagaaaggccaagccaaagtgggccccaccctgcccccgtcgtgctccatccttccctgccggggcctgctggcccctgtaaggtcccgcccccaaagaccctggggccagcggggccgaaagcggagttgggtttgccttattttgctcattggattcaagttcttttgcatagttttcttctaacccctgttggagtccaggggctggagaaaaggacagatttatgcagctattttcatacattccctgttcagagtggggtaggggttctccgccgttacccgatccactccatcccccaccctctgaggggtgagtgtgtctttgcatgtttcctttgctgtggtgggagatagtttgactgaacccccaccttgaccttggtctccaggggtgtggaatggtgggggaatttgtttaaaaagacattttattataataaagtctattttc

SEQ ID NO: 294668 - DNA, 5724 bp, Artificial Sequence
  derived and/or modified sequence
atggagcagctgaccaccctgcccagacccggcgaccccggcgccatggagccctgggccctgcccacctggcacagctggacccccggcagaggcggcgagcccagcagcgccgcccccagcatcgccgacaccccccccgccgccctgcagctgcaggagctgagaagcgaggagagcagcaagcccaagggcgacggcagcagcagacccgtgggcggcaccgaccccgagggcgccgaggcctgcctgcccagcctgggccagcaggccagcagcagcggccccgcctgccagagacccgaggacgaggaggtggaggccttcctgaaggccaagctgaacatgagcttcggcgacagacccaacctggagctgctgagagccctgggcgagctgagacagagatgcgccatcctgaaggaggagaaccagatgctgagaaagagcagcttccccgagaccgaggagaaggtgagaagactgaagagaaagaacgccgagctggccgtgatcgccaagagactggaggagagagccagaaagctgcaggagaccaacctgagagtggtgagcgcccccctgcccagacccggcaccagcctggagctgtgcagaaaggccctggccagacagagagccagagacctgagcgagaccgccagcgccctgctggccaaggacaagcagatcgccgccctgcagagagagtgcagagagctgcaggccagactgaccctggtgggcaaggagggcccccagtggctgcacgtgagagacttcgacagactgctgagagagagccagagagaggtgctgagactgcagagacagatcgccctgagaaaccagagagagaccctgcccctgccccccagctggccccccggccccgccctgcaggccagagccggcgcccccgcccccggcgcccccggcgaggccaccccccaggaggacgccgacaacctgcccgtgatcctgggcgagcccgagaaggagcagagagtgcagcagctggagagcgagctgagcaagaagagaaagaagtgcgagagcctggagcaggaggccagaaagaagcagagaagatgcgaggagctggagctgcagctgagacaggcccagaacgagaacgccagactggtggaggagaacagcagactgagcggcagagccaccgagaaggagcaggtggagtgggagaacgccgagctgagaggccagctgctgggcgtgacccaggagagagacagcgccctgagaaagagccagggcctgcagagcaagctggagagcctggagcaggtgctgaagcacatgagagaggtggcccagagaagacagcagctggaggtggagcacgagcaggccagactgagcctgagagagaagcaggaggaggtgagaagactgcagcaggcccaggccgaggcccagagagagcacgagggcgccgtgcagctgctggagagcaccctggacagcatgcaggccagagtgagagagctggaggagcagtgcagaagccagaccgagcagttcagcctgctggcccaggagctgcaggccttcagactgcaccccggccccctggacctgctgaccagcgccctggactgcggcagcctgggcgactgccccccccccccctgctgctgcagcatcccccagccctgcagaggcagcggccccaaggacctggacctgccccccggcagccccggcagatgcacccccaagagcagcgagcccgcccccgccaccctgaccggcgtgcccagaagaaccgccaagaaggccgagagcctgagcaacagcagccacagcgagagcatccacaacagccccaagagctgccccacccccgaggtggacaccgccagcgaggtggaggagctggaggccgacagcgtgagcctgctgcccgccgcccccgagggcagcagaggcggcgccagaatccaggtgttcctggccagatacagctacaaccccttcgagggccccaacgagaaccccgaggccgagctgcccctgaccgccggcgagtacatctacatctacggcaacatggacgaggacggcttcttcgagggcgagctgatggacggcagaagaggcctggtgcccagcaacttcgtggagagagtgagcgacgacgacctgctgaccagcctgccccccgagctggccgacctgagccacagcagcggccccgagctgagcttcctgagcgtgggcggcggcggcagcagcagcggcggccagagcagcgtgggcagaagccagcccagacccgaggaggaggacgccggcgacgagctgagcctgagccccagccccgagggcctgggcgagccccccgccgtgccctaccccagaagactggtggtgctgaagcagctggcccacagcgtggtgctggcctgggagcccccccccgagcaggtggagctgcacggcttccacatctgcgtgaacggcgagctgagacaggccctgggccccggcgccccccccaaggccgtgctggagaacctggacctgtgggccggccccctgcacatcagcgtgcaggccctgaccagcagaggcagcagcgaccccctgagatgctgcctggccgtgggcgccagagccggcgtggtgcccagccagctgagagtgcacagactgaccgccaccagcgccgagatcacctgggtgcccggcaacagcaacctggcccacgccatctacctgaacggcgaggagtgcccccccgccagccccagcacctactgggccaccttctgccacctgagacccggcaccccctaccaggcccaggtggaggcccagctgcccccccagggcccctgggagcccggctgggagagactggagcagagagccgccaccctgcagttcaccaccctgcccgccggcccccccgacgcccccctggacgtgcagatcgagcccggccccagccccggcatcctgatcatcagctggctgcccgtgaccatcgacgccgccggcaccagcaacggcgtgagagtgaccggctacgccatctacgccgacggccagaagatcatggaggtggccagccccaccgccggcagcgtgctggtggagctgagccagctgcagctgctgcaggtgtgcagagaggtggtggtgagaaccatgagcccccacggcgagagcgccgacagcatccccgcccccatcacccccgccctggcccccgccagcctgcccgccagagtgagctgccccagcccccaccccagccccgaggccagagcccccctggccagcgccagccccggccccggcgaccccagcagccccctgcagcaccccgcccccctgggcacccaggagccccccggcgccccccccgccagccccagcagagagatggccaagggcagccacgaggacccccccgccccctgcagccaggaggaggccggcgccgccgtgctgggcaccagcgaggagagaaccgccagcaccagcaccctgggcgagaaggaccccggccccgccgcccccagcctggccaagcaggaggccgagtggaccgccggcgaggcctgccccgccagcagcagcacccagggcgccagagcccagcaggcccccaacaccgagatgtgccagggcggcgaccccggcagcggcctgagacccagagccgagaaggaggacaccgccgagctgggcgtgcacctggtgaacagcctggtggaccacggcagaaacagcgacctgagcgacatccaggaggaggaggaggaggaggaggaggaggaggaggaggagctgggcagcagaacctgcagcttccagaagcaggtggccggcaacagcatcagagagaacggcgccaagagccagcccgaccccttctgcgagaccgacagcgacgaggagatcctggagcagatcctggagctgcccctgcagcagttctgcagcaagaagctgttcagcatccccgaggaggaggaggaggaggaggaggacgaggaggaggagaagagcggcgccggctgcagcagcagagaccccggcccccccgagcccgccctgctgggcctgggctgcgacagcggccagcccagaagacccggccagtgccccctgagccccgagagcagcagagccggcgactgcctggaggacatgcccggcctggtgggcggcagcagcagaagaagaggcggcggcagccccgagaagccccccagcagaagaagaccccccgaccccagagagcactgcagcagactgctgagcaacaacggcccccaggccagcggcagactgggccccaccagagagagaggcggcctgcccgtgatcgagggccccagaaccggcctggaggccagcggcagaggcagactgggccccagcagaagatgcagcagaggcagagccctggagcccggcctggccagctgcctgagccccaagtgcctggagatcagcatcgagtacgacagcgaggacgagcaggaggccggcagcggcggcatcagcatcaccagcagctgctaccccggcgacggcgaggcctggggcaccgccaccgtgggcagacccagaggcccccccaaggccaacagcggccccaagccctaccccagactgcccgcctgggagaagggcgagcccgagagaagaggcagaagcgccaccggcagagccaaggagcccctgagcagagccaccgagaccggcgaggccagaggccaggacggcagcggcagaagaggcccccagaagagaggcgtgagagtgctgagacccagcaccgccgagctggtgcccgccagaagccccagcgagaccctggcctaccagcacctgcccgtgagaatcttcgtggccctgttcgactacgaccccgtgagcatgagccccaaccccgacgccggcgaggaggagctgcccttcagagagggccagatcctgaaggtgttcggcgacaaggacgccgacggcttctaccagggcgagggcggcggcagaaccggctacatcccctgcaacatggtggccgaggtggccgtggacagccccgccggcagacagcagctgctgcagagaggctacctgagccccgacatcctgctggagggcagcggcaacggccccttcgtgtacagcaccgcccacaccaccggccccccccccaagcccagaagaagcaagaaggccgagagcgagggccccgcccagccctgccccggcccccccaagctggtgcccagcgccgacctgaaggccccccacagcatggtggccgccttcgactacaacccccaggagagcagccccaacatggacgtggaggccgagctgcccttcagagccggcgacgtgatcaccgtgttcggcggcatggacgacgacggcttctactacggcgagctgaacggccagagaggcctggtgcccagcaacttcctggagggccccggccccgaggccggcggcctggacagagagcccagaaccccccaggccgagagccaggactggggctgcaccacccagggcagccccggcccccccggcggcccctgcacccccagcagcggcagcgcccccagaatcgagagaggcgagccccagggcagaagcgagaaggtgtggggcttcttcagcaagggcaagcagctgctgagaagactgggcagcggcaagaaggagtag

SEQ ID NO: 294669 - protein, 339 aa, Artificial Sequence
  derived and/or modified sequence
MQRNKQVAMGRKKFNMDPKKGIQFLIENDLLKNTCEDIAQFLYKGEGLNKTAIGDYLGERDEFNIQVLHAFVELHEFTDLNLVQALRQFLWSFRLPGEAQKIDRMMEAFAQRYCQCNNGVFQSTDTCYVLSFAIIMLNTSLHNPNVKDKPTVERFIAMNRGINDGGDLPEELLRNLYESIKNEPFKIPEDDGNDLTHTFFNPDREGWLLKLGGGRVKTWKRRWFILTDNCLYYFEYTTDKEPRGIIPLENLSIREVEDSKKPNCFELYIPDNKDQVIKACKTEADGRVVEGNHTVYRISAPTPEEKEEWIKCIKAAISRDPFYEMLAARKKKVSSTKRH

SEQ ID NO: 294670 - protein, 1327 aa, Artificial Sequence
  derived and/or modified sequence
  misc_feature (1)..(1): Xaa can be any naturally occurring amino acid
XHQVKVQGCWGRWRWQEFENAEGDEYAADLAQGSPATAAQNGPDVYVLPLTEVSLPMAKQPGRSVQLLKSTDVGRHSLLYLKEIGRGWFGKVFLGEVNSGISSAQVVVKELQASASVQEQMQFLEEVQPYRALKHSNLLQCLAQCAEVTPYLLVMEFCPLGDLKGYLRSCRVAESMAPDPRTLQRMACEVACGVLHLHRNNFVHSDLALRNCLLTADLTVKIGDYGLAHCKYREDYFVTADQLWVPLRWIAPELVDEVHSNLLVVDQTKSGNVWSLGVTIWELFELGTQPYPQHSDQQVLAYTVREQQLKLPKPQLQLTLSDRWYEVMQFCWLQPEQRPTAEEVHLLLSYLCAKGATEAEEEFERRWRSLRPGGGGVGPGPGAAGPMLGGVVELAAASSFPLLEQFAGDGFHADGDDVLTVTETSRGLNFEYKWEAGRGAEAFPATLSPGRTARLQELCAPDGAPPGVVPVLSAHSPSLGSEYFIRLEEAAPAAGHDPDCAGCAPSPPATADQDDDSDGSTAASLAMEPLLGHGPPVDVPWGRGDHYPRRSLARDPLCPSRSPSPSAGPLSLAEGGAEDADWGVAAFCPAFFEDPLGTSPLGSSGAPPLPLTGEDELEEVGARRAAQRGHWRSNVSANNNSGSRCPESWDPVSAGGHAEGCPSPKQTPRASPEPGYPGEPLLGLQAASAQEPGCCPGLPHLCSAQGLAPAPCLVTPSWTETASSGGDHPQAEPKLATEAEGTTGPRLPLPSVPSPSQEGAPLPSEEASAPDAPDALPDSPTPATGGEVSAIKLASALNGSSSSPEVEAPSSEDEDTAEATSGIFTDTSSDGLQARRPDVVPAFRSLQKQVGTPDSLDSLDIPSSASDGGYEVFSPSATGPSGGQPRALDSGYDTENYESPEFVLKEAQEGCEPQAFAELASEGEGPGPETRLSTSLSGLNEKNPYRDSAYFSDLEAEAEATSGPEKKCGGDRAPGPELGLPSTGQPSEQVCLRPGVSGEAQGSGPGEVLPPLLQLEGSSPEPSTCPSGLVPEPPEPQGPAKVRPGPSPSCSQFFLLTPVPLRSEGNSSEFQGPPGLLSGPAPQKRMGGPGTPRAPLRLALPGLPAALEGRPEEEEEDSEDSDESDEELRCYSVQEPSEDSEEEAPAVPVVVAESQSARNLRSLLKMPSLLSETFCEDLERKKKAVSFFDDVTVYLFDQESPTRELGEPFPGAKESPPTFLRGSPGSPSAPNRPQQADGSPNGSTAEEGGGFAWDDDFPLMTAKAAFAMALDPAAPAPAAPTPTPAPFSRFTVSPAPTSRFSITHVSDSDAESKRGPEAGAGGESKEA

SEQ ID NO: 294671 - DNA, 417 bp, Artificial Sequence
  derived and/or modified sequence
atgcggcccaccgccgacagcttccggctgaagaagggcaacgtgtttcctaactttgatccatgcgcgcaagccctccagaagagctgtcacttcgctctcagcttcctcatcgggaagatgggcatcatcattttgagtgtttgtctgatctgcacaaggttgcttcaggagggcatcgcacagtccaagtgcctcatcaacgtttcttttagtctctacagttgttttatcgtgttcgtgaccatcagccaagatagcgagaccctgtctctcgactgtgaccatcggctgttcttttcgctgcctttcacagatccagcatcggggggccagtctcagcattcttggccctgccctgagagaagtaaaaacctcccccaggtatccaagcagctgaggaatagagctggatag

SEQ ID NO: 294672 - DNA, 417 bp, Artificial Sequence
  derived and/or modified sequence
atgcgacccactgccgactcgttccgcctcaagaaaggcaacgtttttcctaactttgatccctgcgcccaggccttgcagaagagctgccacttcgcccttagcttccttattggtaaaatgggcatcattatcctgtccgtttgcctgatctgcacccgactgcttcaggagggaatagcccagagcaagtgtttaatcaatgttagcttttcgctgtacagctgctttatagtcttcgtgacaatttctcaggacagcgagactctgtctctcgactgtgatcacagactctttttcagcctccctttcactgaccccgctagtgggggtcaatcccagcattcttggccttgccccgagcgcagtaaaaatctgccccaggtctccaaacagcttaggaatcgcgctggttag

SEQ ID NO: 294673 - DNA, 1466 bp, Artificial Sequence
  derived and/or modified sequence
tgagaaaccagacgggaccacctagagtcggtctccttcccccaaacgccctggacctaccatgggcacaagctggggctcagggaatacctctgtgctccaccactcagcagctgcttttcaagagaaggaaaacactactacacgccatccacagccaccgcacaatactgtatccctttgtcagggataataaaacagacgggaagtcactctggaacttactatggccttgggtcaaaggcaggctgaccggggctggcagaagaaagctaaaacttacttctctgggattctaggaatttcaacaaatgagaccaacagcagatagtttcagattaaagaaaggcaatgtgttcccaaactttgacccctgtgcacaggctctgcagaaaagctgtcactttgcactcagtttccttataggtaaaatggggataataatattgtctgtctgcctaatttgtacaaggctcttacaagagggtatagcacaaagtaagtgcttaataaatgtgagcttttctttgtattcctgtttcatagtatttgtaactatttcacaagattcagaaaccttgtccctggactgtgatcatcgccttttcttcagtcttccattcacagacccagcctctggtgggcagtcacaacacagctggccatgtccagagaggtccaaaaacctgccccaggtgtcaaagcagctaagaaacagggccgggtgagactctgcctgactctttcattctgccaaatctaagctaagcagtgattcctatgcccacctgggaggggagaaacctgaggcccaccttgtaaatccctacaggctcagtgtgcctggcattgggatgggcagaggagacagagggaatgccaaaaaaagagcagttacaaaggacagaccacaggtccaggatgaggggactttcaacggcttgttcgtggttccgtttttgcccaaactctctcgatccacctttgagcaacagtaattatctctttgcctccatcaactccatttaccatccctgtccaattctttcccaataagccagagaataagagtgcagacattaaaggtcagattttcatggtgctgaacccatttaacccagctgtgtggctttgagtaagctacctaagctctctgagcctccatttcctcgtgtgcaaaccaaggaaaatactcacctacttattagaaggaaagaaaagactgagtacctgccatgtgacaggctttcaacaagggaccacctcttgtcataaacaagaggcacatgaacaagtgaccacgggtttaacttgtacacaggtattatgaaaacaacaagtctgcatttcaataaatatttgttatataaatgaacgggactgttcccagagcctgctgcttggaggaagctagggaataaggaactcaaaaacaaggtaagaatgtcagagcagggaagggaagg

SEQ ID NO: 294674 - DNA, 991 bp, Artificial Sequence
  derived and/or modified sequence
atcgtcggctcggaggctgaggggctgccgcagccgggagcccccctcgcctcgctcctcgctccgcttggtgtcatgtgattctctgagggagcagctgcgtgagtggagatgctttcagtggtggagaatggactggacccccaggctgccatcccgacacatcatctcagagttggagcacctgacgtttgtcaacatggatgtgggccgctgccgggcatggctgcggctggccctgaacaatggcctgatggagtgctacctgaagctgctgctgcaggagcaggcccgcttgcaactacagcggaaggaatctctggattccatttcccattcttcaggctctgaagacatcgaagtccatcactcgggccataagatacggaggaaccagaagccgactgcctcctccctcagcctggacacggccagttcatcccagctgtcctgcagcctaaactctgatagctgcttactccaagagaatggctccaagagtccagaccattgcgaggagcccatgtcctatgactcagacctgggcacagcaaatgctgaggactcagaccagtctctgcaagaaaaaacaagagctggatctcagaggatgacttctaccggccttcccgggagcaacccctgaagagtgcttcagaccacccaatagcttcttacagggggactccagagtcaaggcctggtctccacaggcatttttctcaagaaccaagaaaaaactgctccctgggggcgttagaccaagcgtgtgtaccttccccaggaagaaggcaagcccaggcagccccatcccaggggcataagagtttccaggtggtacaccggaggcagatgggactgtccaacccattccagggtctcatgaagctgggcaccgtggagcggcagggggcaatgggcatctggaaggagctcttctgcgagctctccccactggagttccgcctctacctgagcaacgaggagcaca

SEQ ID NO: 294675 - protein, 361 aa, Artificial Sequence
  derived and/or modified sequence
MSGAGVGGASEESQAMQAHVSIILPVHNAEPWLDECLRSVLQQDFEGTMELSVFNDASKDKSGAIIEKWRVKLEDSGVHVIIGGHDSPSPRGVGYAKNQAVAQSSGSYLCFLDSDDVMMPQRVRLQHEAAVQHPSSIIGCRVRRDPPNSTERYTRWINQLTPEQLLTQVFTSNGPTVIMPTWFCSRAWFSHVGPFNEGGQGVPEDLLFFYEHLRKGGGVIRVDQSLLLYRHHPQAATHCVLETTIWTHRVRFLEEQALPRWAAFTIWNAGKQGRRLYRSLTAGSQRKVVAFCDVDENKIRKGFYCHEDSQERPKPRIPILHFRAARPPFVICVKLDLTGGAFEDNLRSLHLQEGQDFLHFS

SEQ ID NO: 294676 - DNA, 1086 bp, Artificial Sequence
  derived and/or modified sequence
atgagcggcgccggcgtgggcggcgccagcgaggagagccaggccatgcaggcccacgtgagcatcatcctgcccgtgcacaacgccgagccctggctggacgagtgcctgagaagcgtgctgcagcaggacttcgagggcaccatggagctgagcgtgttcaacgacgccagcaaggacaagagcggcgccatcatcgagaagtggagagtgaagctggaggacagcggcgtgcacgtgatcatcggcggccacgacagccccagccccagaggcgtgggctacgccaagaaccaggccgtggcccagagcagcggcagctacctgtgcttcctggacagcgacgacgtgatgatgccccagagagtgagactgcagcacgaggccgccgtgcagcaccccagcagcatcatcggctgcagagtgagaagagacccccccaacagcaccgagagatacaccagatggatcaaccagctgacccccgagcagctgctgacccaggtgttcaccagcaacggccccaccgtgatcatgcccacctggttctgcagcagagcctggttcagccacgtgggccccttcaacgagggcggccagggcgtgcccgaggacctgctgttcttctacgagcacctgagaaagggcggcggcgtgatcagagtggaccagagcctgctgctgtacagacaccacccccaggccgccacccactgcgtgctggagaccaccatctggacccacagagtgagattcctggaggagcaggccctgcccagatgggccgccttcaccatctggaacgccggcaagcagggcagaagactgtacagaagcctgaccgccggcagccagagaaaggtggtggccttctgcgacgtggacgagaacaagatcagaaagggcttctactgccacgaggacagccaggagagacccaagcccagaatccccatcctgcacttcagagccgccagaccccccttcgtgatctgcgtgaagctggacctgaccggcggcgccttcgaggacaacctgagaagcctgcacctgcaggagggccaggacttcctgcacttcagctag

SEQ ID NO: 294677 - DNA, 1086 bp, Artificial Sequence
  derived and/or modified sequence
atgtccggggccggcgtcggaggagcatcagaggagagccaggccatgcaagcccatgtatccattatcctgccagtccacaatgccgaaccctggctcgacgagtgtctgcgatctgtgctccagcaggacttcgaggggacgatggagctctcagtattcaacgatgcgtctaaggataagagcggggcgattatcgagaaatggagggtaaagcttgaggactcaggagttcatgtgattatcggagggcacgatagtccctccccccgcggagtgggatacgcgaagaaccaggccgtggcacagagctctggtagctacttgtgctttctcgattccgacgatgtcatgatgccgcaacgcgtgcggctgcaacatgaggccgctgtgcagcacccgtcttcaattataggctgccgagtcaggagggaccctcccaattctaccgagaggtacactaggtggataaatcagctgactcctgagcaactccttactcaggtattcacatcaaacggccccaccgtcatcatgcctacttggttttgctcccgtgcatggttctctcatgtgggcccttttaatgaaggcggccagggcgttcccgaggatctgctgtttttctacgagcacctgaggaagggcggcggtgtgatccgcgtggatcagagcctgctgctctataggcaccacccacaagccgctacacattgtgtcctagagaccactatctggacccatcgagttaggttcctcgaggaacaggcccttcccagatgggccgcattcacaatatggaacgccgggaaacagggaaggcgattgtatcgctcacttacagcaggctcccagcgtaaggtggtcgccttctgtgacgtcgacgaaaataaaattcgaaagggattttactgccatgaggattctcaggaacgcccaaaacctcgaattccaatcctgcactttagagctgccaggccgcctttcgtaatctgcgtgaagctggacttgacaggaggggcattcgaagataacttgcgatcccttcatctgcaggagggtcaggattttctccatttttcatag

SEQ ID NO: 294678 - DNA, 1086 bp, Artificial Sequence
  derived and/or modified sequence
atgtctggggccggcgtgggcggggccagcgaggagagccaggccatgcaggcccacgtgtccatcatcctgcctgtgcacaatgctgagccctggctggatgaatgtctgcggtctgtgctgcagcaggactttgagggcaccatggagctgagcgtcttcaatgatgccagcaaggacaagagcggggccatcatcgagaagtggagggtgaagctggaggacagcggcgtgcacgtgatcatcggcggccatgacagccccagcccccggggcgtgggctacgccaagaaccaggccgtggcccagagcagcggcagctacctgtgcttcctggacagtgatgatgtgatgatgccccagagggtgcggctgcagcatgaagctgctgtgcagcaccccagcagcatcatcggctgccgggtgagaagagacccccccaacagcacagagcgctacacccgctggatcaaccagctgaccccagagcagctgctgacccaggtgttcaccagcaatggccccaccgtcatcatgcccacctggttctgcagccgggcctggttcagccacgtgggccccttcaatgaaggaggccagggcgtgcctgaggacctgctcttcttctatgagcacctgaggaaaggaggcggcgtcatccgggtggaccagagcctgctgctgtaccgccaccacccccaggccgccacccactgtgtgctggagaccaccatctggacccaccgggtgcgcttcctggaggagcaggccctgccccgctgggccgccttcaccatctggaatgccggcaagcagggccggcggctgtaccgcagcctgacagctggcagccagaggaaggtggtggccttctgtgatgtggatgagaacaagatcaggaagggcttctactgccacgaggacagccaggagcggcccaagccccgcatccccatcctgcacttccgggccgcccggcccccatttgtgatctgtgtgaagctggacctgaccggcggggcctttgaggacaacctgcggagcctgcacctgcaggagggccaggacttcctgcacttctcctag

SEQ ID NO: 294679 - DNA, 1086 bp, Artificial Sequence
  derived and/or modified sequence
atgagcggcgccggcgtgggcggcgccagcgaggagagccaggccatgcaggcgcacgtatccataatcttgcccgtacataacgcagaaccttggttagacgaatgcctgcgctccgtgctgcagcaagattttgaagggaccatggagctctcagtattcaacgatgcctctaaggacaagtctggcgcgatcattgaaaagtggcgcgtgaagctggaggattctggtgtccacgtgatcattggtggacacgattctccctcaccccggggggtggggtacgccaagaaccaagcagtggcacagagtagtggctcttatctttgttttcttgattctgacgatgtcatgatgccccagagggtgaggctgcagcacgaagccgccgttcagcatccctcgtcaataattgggtgccgtgtacgcagggatccgcccaatagtaccgagagatatacaaggtggatcaaccagctgacgccagaacagcttctcacacaagtctttacatctaacggtcctaccgtgatcatgcccacctggttttgctcccgggcctggttctcccacgtgggtccgtttaatgagggcggccagggagtgcccgaagacctgctgtttttttatgagcatcttagaaagggtgggggcgttatcagagtggaccaaagcctgttgctgtatcggcaccatccacaagcagccactcactgcgtcctcgaaacaacaatctggacccatcgagtgcgcttcctcgaagagcaggccttgccgaggtgggcggcctttaccatttggaacgcaggtaagcagggccgtagactctataggagtctaactgcaggttcacaacggaaagtggtggccttttgtgatgtggacgagaacaagatccgcaagggcttctattgccatgaggatagccaagagcggccaaaaccaaggattccgattctgcacttccgtgccgcaagaccgccctttgtgatctgcgtgaagttagatctcaccgggggggccttcgaggacaacctcagatccctgcatctgcaggagggtcaggatttcctgcacttttcatag

SEQ ID NO: 294680 - DNA, 1086 bp, Artificial Sequence
  derived and/or modified sequence
atgtccggcgctggcgtggggggagcctccgaagagagccaggctatgcaagcacacgtatctataatcttgcctgtacacaacgctgaaccttggctcgatgagtgcctaagaagcgtgctgcagcaggatttcgaggggaccatggagctgagcgtgttcaacgacgccagcaaagataaatctggcgcaatcatcgaaaaatggagggttaagctcgaagattcaggtgtccacgttatcattggcggacacgacagtccctcaccccgaggcgtgggatatgcaaagaaccaggccgtcgctcaatccagtggatcttatctgtgttttttggactcagacgatgtaatgatgccacagagagtcaggctgcagcacgaagcagccgtacaacatccttcctcaatcatcgggtgccgggtgagaagagacccacccaactccaccgaaagatacacccgctggattaatcaattgactccggagcagctgttgactcaggtattcacaagtaacggccctaccgtgatcatgcctacatggttttgttctagagcctggttcagccacgtcggcccattcaatgaggggggtcagggagtgcctgaagacctcctctttttctacgagcaccttcgcaaaggtggaggcgttatccgcgtggaccaaagccttcttctctaccgccaccaccctcaagcagcaactcattgtgtgcttgaaacaacgatctggacccatcgagtgcggtttctggaggagcaggcgctgcctcggtgggccgcatttaccatctggaatgctggaaagcagggacgaagactataccgcagtctgactgctggctcccagagaaaagtggttgctttctgcgacgtcgatgagaataagatcaggaagggtttctattgccatgaggacagccaggagaggcccaagcccaggattcctatactgcatttccgggcagctcgtccaccttttgtgatttgtgtcaagctcgatctgaccggcggagcattcgaagacaatcttcgctctctacacctgcaggaggggcaggattttttacacttcagttag

SEQ ID NO: 294681 - DNA, 1378 bp, Artificial Sequence
  derived and/or modified sequence
gccgaagcggcgggatgagcggagccggcgtgggcggggcgtccgaggagagccaggccatgcaggcccacgtgtctattatcctcccagtccacaacgctgaaccgtggctggacgaatgtttgaggtctgttttgcaacaggactttgaaggtaccatggagctgtctgttttcaatgatgccagtaaggacaagtctggggctatcattgaaaaatggagagtgaagctggaagattctggtgtccacgtgatcattggggggcacgattctccctctcctagaggcgtcggatacgctaaaaatcaagcagttgcccagagctcagggtcttacctttgctttttggattcggatgacgtcatgatgccccagcgggtgaggctgcaacacgaggctgccgttcagcacccgtcgagcatcattggttgcagagtgaggagagatccccctaactccaccgaacgatacacacgttggatcaaccagctgacgccggagcagctcctaacccaggttttcacctcaaatggccccacggtgatcatgcccacctggttctgctcgcgagcgtggttctcccacgtgggcccctttaacgagggaggtcagggcgtcccggaggacctgctgttcttctacgagcacctcaggaagggcggcggcgtcatccgcgtggaccagagtctcctgctgtatcgccaccacccacaggcggccacgcactgcgtcctcgagacgaccatctggacccaccgcgtccgcttcctggaagagcaggccctgccccgctgggcggccttcaccatctggaacgctggcaagcaggggcgccggctgtaccgcagcttgactgccggcagccagcgcaaggtggtggcattctgtgacgtggacgagaacaagatcaggaaaggcttctattgccacgaggactctcaggaaagacccaagccccgaatccccatcctgcacttccgagccgcccggccacccttcgtcatctgcgtgaagctggacctcacagggggcgcctttgaggacaacctgaggtcactgcacttgcaggagggccaggacttccttcacttcagctgacggacccatggcagctgctcccagtgcatcccaggccagcaggagctttgtgagctgcaggcatggcgatggtgcgcctgttccacacccagcaggcgcaaccagagtctcgtgtgtgccgaccacaggagccaagccttttccactgtgtggactcatgtggccaaggctaggcctggtcacccaggaccctcaccacgtgaccccagccaatcgggacagttcaaggaggaggagacccctattacacaggttggaataaaatatttaaatctcgt

SEQ ID NO: 294682 - protein, 477 aa, Artificial Sequence
  derived and/or modified sequence
MPPCQPQRPLLLLLLLLACQPQVPSAQVMDFLFEKWKLYGDQCHHNLSLLPPPTELVCNRTFDKYSCWPDTPANTTANISCPWYLPWHHKVQHRFVFKRCGPDGQWVRGPRGQPWRDASQCQMDGEEIEVQKEVAKMYSSFQVMYTVGYSLSLGALLLALAILGGLSKLHCTRNAIHANLFASFVLKASSVLVIDGLLRTRYSQKIGDDLSVSTWLSDGAVAGCRVAAVFMQYGIVANYCWLLVEGLYLHNLLGLATLPERSFFSLYLGIGWGAPMLFVVPWAVVKCLFENVQCWTSNDNMGFWWILRFPVFLAILINFFIFVRIVQLLVAKLRARQMHHTDYKFRLAKSTLTLIPLLGVHEVVFAFVTDEHAQGTLRSAKLFFDLFLSSFQGLLVAVLYCFLNKEVQSELRRRWHRWRLGKVLWEERNTSNHRASSSPGHGPPSKELQFGRGGGSQDSSAETPLAGGLPRLAESPF

SEQ ID NO: 294683 - DNA, 1434 bp, Artificial Sequence
  derived and/or modified sequence
atgcctccatgccagcctcagagaccactgctgctactgttactgttacttgcttgccaaccgcaggtgcctagcgctcaggttatggatttcctgttcgagaaatggaaactctacggtgatcagtgccatcacaatctgtctctgttacctccacctaccgaacttgtgtgtaaccggacattcgacaagtatagctgctggcccgacactccagcaaacacaactgccaacatttcatgtccctggtacttgccctggcaccacaaggtgcagcacaggtttgttttcaaaagatgtggccccgacggacagtgggtcaggggaccacgcgggcaaccgtggcgggatgcttcacagtgtcagatggatggagaggaaatcgaggtccagaaagaggtggctaagatgtattcatctttccaggttatgtacacagtaggctactcattgtccctgggggcactgcttctggccctggccattctgggtggactgtctaagctacactgtacccgtaacgccatccacgcgaacttgttcgcctccttcgtgctgaaggccagttctgtcctggttatcgacggactgctgcgtacccggtactcccagaagatcggcgacgacctttccgtatccacttggctttcagatggtgcggttgccggctgcagagtggctgccgtgtttatgcagtacggcatcgtggctaactattgttggctgcttgtagaggggctctatctgcacaacctcctggggctggcaacgttgcccgagcgctcatttttcagcctgtatctgggtattgggtggggggcaccgatgttgttcgtcgtgccctgggccgtggtcaaatgcctgttcgagaacgtgcagtgctggacatccaatgacaatatgggtttttggtggatcctgagatttcctgtctttctggctatactgatcaatttcttcatctttgtgcggatcgtgcagttactagtggccaagctgagagcccggcagatgcaccacactgactacaagtttcgcctggccaagtcaactctgacgctcatccccttgttaggggtacacgaggtggtctttgccttcgtgaccgacgagcacgcccaagggaccctgcgatccgctaaactgttcttcgacctgttcctaagctcctttcaggggctgctcgtggccgtgctgtactgctttcttaacaaagaagtccagagcgagttgcgccggcgatggcaccggtggagactaggtaaagtgttatgggaggagagaaacacgtctaaccaccgagcctcctcctccccaggtcacggaccaccatcgaaggagttgcagtttggcagagggggaggttctcaggattcctcggcagagacccccttagctggcggcctgcctagactggctgagagccctttctag

SEQ ID NO: 294684 - DNA, 2051 bp, Artificial Sequence
  derived and/or modified sequence
agtttgcaccgaccccgatctggcagcgccgcgaagacgagcggtcaccggcgcccgacccgagcgcgcccagaggacggcggggagccaagccgacccccgagcagcgccgcgcggaccctgaggctcagaggggcagcttcaggggaggacaccccactggccaggacgccccaggctctgctgctctgccactcagctgccctcggaggagcgtacacacccaccaggactgcattgccccagctgtgcagcccctgccagatgtgggaggcagctagctgcccagaggcatgcccccctgccagccacagcgacccctgctgctgttgctgctgctgctggcctgccagccacaggtcccctccgctcaggtgatggacttcctgtttgagaagtggaagctctacggtgaccagtgtcaccacaacctgagcctgctgccccctcccacggagctggtgtgcaacagaaccttcgacaagtattcctgctggccggacacccccgccaataccacggccaacatctcctgcccctggtacctgccttggcaccacaaagtgcaacaccgcttcgtgttcaagagatgcgggcccgacggtcagtgggtgcgtggaccccgggggcagccttggcgtgatgcctcccagtgccagatggatggcgaggagattgaggtccagaaggaggtggccaagatgtacagcagcttccaggtgatgtacacagtgggctacagcctgtccctgggggccctgctcctcgccttggccatcctggggggcctcagcaagctgcactgcacccgcaatgccatccacgcgaatctgtttgcgtccttcgtgctgaaagccagctccgtgctggtcattgatgggctgctcaggacccgctacagccagaaaattggcgacgacctcagtgtcagcacctggctcagtgatggagcggtggctggctgccgtgtggccgcggtgttcatgcaatatggcatcgtggccaactactgctggctgctggtggagggcctgtacctgcacaacctgctgggcctggccaccctccccgagaggagcttcttcagcctctacctgggcatcggctggggtgcccccatgctgttcgtcgtcccctgggcagtggtcaagtgtctgttcgagaacgtccagtgctggaccagcaatgacaacatgggcttctggtggatcctgcggttccccgtcttcctggccatcctgatcaacttcttcatcttcgtccgcatcgttcagctgctcgtggccaagctgcgggcacggcagatgcaccacacagactacaagttccggctggccaagtccacgctgaccctcatccctctgctgggcgtccacgaagtggtcttcgccttcgtgacggacgagcacgcccagggcaccctgcgctccgccaagctcttcttcgacctcttcctcagctccttccagggcctgctggtggctgtcctctactgcttcctcaacaaggaggtgcagtcggagctgcggcggcgttggcaccgctggcgcctgggcaaagtgctatgggaggagcggaacaccagcaaccacagggcctcatcttcgcccggccacggccctcccagcaaggagctgcagtttgggaggggtggtggcagccaggattcatctgcggagacccccttggctggtggcctccctagattggctgagagccccttctgaaccctgctgggaccccagctagggctggactctggcacccagagggcgtcgctggacaacccagaactggacgcccagctgaggctgggggcgggggagccaacagcagcccccacctaccccccacccccagtgtggctgtctgcgagattgggcctcctctccctgcacctgccttgtccctggtgcagaggtgagcagaggagtccagggcgggagtgggggctgtgccgtgaactgcgtgccagtgtccccacgtatgtcggcacgtcccatgtgcatggaaatgtcctccaacaataaagagctcaagtggtcaccgtg

SEQ ID NO: 294685 - DNA, 1434 bp, Artificial Sequence
  derived and/or modified sequence
atgccaccctgccagccccagaggcccctgctgctgctgctgctgctgctggcctgccagccccaggtgcccagcgcccaggtgatggacttcctgtttgagaagtggaagctgtatggagaccagtgccaccacaacctgagcctgctgcccccacccacagagctggtgtgcaacagaacatttgacaagtacagctgctggccagacaccccagccaacaccacagccaacatcagctgcccctggtacctgccctggcaccacaaggtgcagcacagatttgtgttcaagagatgtggcccagatggccagtgggtgcggggcccccggggccagccctggagagatgccagccagtgccagatggatggagaggagattgaggtgcagaaggaggtggccaagatgtacagcagcttccaggtgatgtacacagtgggctacagcctgagcctgggcgccctgctgctggccctggccatcctgggcggcctgagcaagctgcactgcaccagaaatgccatccacgccaacctgtttgccagctttgtgctgaaggccagctctgtgctggtgattgatggcctgctgcggacccgctacagccagaagattggagatgacctgtctgtgtccacctggctgagtgatggagctgtggccggctgccgggtggccgctgtgttcatgcagtatggaattgtggccaactactgctggctgctggtggagggcctgtacctgcacaacctgctgggcctggccaccctgcctgagaggagcttcttcagcctgtacctgggcatcggctggggcgcccccatgctgtttgtggtgccctgggccgtggtgaagtgcctgtttgaaaatgtgcagtgctggaccagcaatgacaacatgggcttctggtggatcctgcgcttccctgtgttcctggccatcctgatcaacttcttcatctttgtgagaattgtgcagctgctggtggccaagctgcgggcccggcagatgcaccacacagactacaagttccggctggccaagagcaccctgaccctcatccccctgctgggcgtgcatgaggtggtgtttgcctttgtgacagatgagcacgcccagggcaccctgcggagcgccaagctgttctttgacctcttcctgagcagcttccagggcctgctggtggccgtgctgtactgcttcctgaacaaggaggtgcagagcgagctgcggcggcgctggcaccgctggaggctgggcaaggtgctgtgggaggagaggaacaccagcaaccaccgggccagcagcagccctggccacggcccccccagcaaggagctgcagtttggccggggcggcggcagccaggacagcagcgctgagacccccctggccggcggcctgccccggctggccgagagccccttctag

SEQ ID NO: 294686 - DNA, 1434 bp, Artificial Sequence
  derived and/or modified sequence
atgcccccctgccagccccagcggcccctgctgctgctgctgctgctgttggcctgtcaacctcaggttccatccgcacaagttatggactttctctttgaaaaatggaagctctacggagatcagtgccatcacaacctgtctctactgccaccccctactgagctcgtatgcaacaggacttttgataaatatagctgctggccagacaccccagctaatacgacagcaaatatttcctgtccttggtacctaccctggcatcataaggtccagcacagattcgtgttcaaaagatgcggtccagatggacaatgggtgcgcggccccagaggccaaccctggcgagacgcaagtcagtgccaaatggacggagaagaaattgaggtccagaaagaagtggccaaaatgtactcctcttttcaggtgatgtatactgtcgggtactcgctttctctgggtgccctgctgcttgctctagctattctaggcgggctttccaaactccactgcaccaggaatgcaatccacgcaaacctttttgccagcttcgtcttgaaagcttcctccgtgctcgtcatcgatggcctgttgagaactaggtatagccagaagatcggggacgatctttcagtatccacatggttgtccgacggagctgtggccggctgccgagtggcagcggtgttcatgcaatacgggattgtggctaattattgttggttgctggtggaagggctgtatcttcacaatctgcttgggctggcaaccctccccgaaaggagcttcttttccctttacctgggaatcggctggggtgcgcctatgctgttcgtcgtcccttgggccgttgtcaagtgcctcttcgagaacgtgcagtgttggacgtccaacgataacatgggcttctggtggatattgcgttttcctgtattcctggctattctcatcaatttttttatctttgtacgtatcgttcagctgctcgtagctaaactaagagcgcgtcagatgcaccacactgactataaatttcgactcgccaagtcaaccctgacgctgattcccctactaggggtccacgaggtcgtttttgccttcgttacagatgaacatgcccagggtacactgagatctgccaaactctttttcgatctattcctctcctccttccagggtttactggtggccgtactctactgctttctgaataaagaggtgcagagtgaactgcggcggcggtggcacaggtggaggttgggcaaggtattatgggaggaacgcaatacttctaatcaccgcgcatcgagctcaccagggcatggcccgccgtctaaagaacttcaattcggaagaggtggaggcagccaggattcgtctgcggaaacaccactggccggagggctgcctaggctcgcggagagcccattttag

SEQ ID NO: 294687 - DNA, 1434 bp, Artificial Sequence
  derived and/or modified sequence
atgcctccctgccagccacagcggccactgctattactcctccttctcctagcatgtcagccccaggtgcctagcgcgcaggtgatggatttcctctttgagaaatggaaactgtacggggatcagtgtcatcacaaccttagcctgctgcctcctccaactgagctcgtttgtaacagaacgtttgacaaatacagctgctggcccgacacccccgcaaatacaactgccaatatttcttgtccttggtacctgccttggcaccataaggtccagcaccgattcgtatttaagagatgcgggccagacggacaatgggtgagaggccctagggggcagccctggagggatgcctcacagtgtcaaatggatggggaggagatcgaagtccagaaagaggttgcgaagatgtatagctccttccaggtgatgtataccgttggctacagcctgtctttaggagccctgctgctggcactggccattctgggaggcctgagcaagctgcattgtactcgcaacgcgattcatgccaatctgtttgctagttttgtcttgaaggccagctctgtcctagtaatcgacggactccttaggacccggtacagtcagaaaatcggcgatgatctatcagtctctacatggctgtccgatggcgctgttgcagggtgccgggtagctgctgtattcatgcaatacggcatagtcgccaactactgttggcttctggtggagggtttatatttgcacaatctgcttggactggccacgctcccggaaaggagttttttttccctgtatctcggcatcggctggggcgctcccatgctgtttgtggtcccctgggcagtagtaaagtgtctgtttgaaaacgtgcagtgctggacgtccaatgataacatgggattttggtggattctccgcttccccgtcttcctagccatcttgataaatttcttcatcttcgtgcggattgtccagttattggtagccaaactcagagcacggcaaatgcatcacaccgattacaagtttcggttggctaagtctactctgactctgatccctctgctaggcgtacacgaggttgttttcgcgttcgttaccgacgagcacgcacaaggaaccctcaggtccgctaaactgtttttcgacctcttcctgagcagttttcagggattgctggtcgccgtcttatactgtttcctcaacaaagaggttcagtcggagctgcggaggaggtggcacagatggcgtctggggaaagtactttgggaagaacgcaacacatctaatcatcgcgctagttcttcacctggtcacggacccccttctaaggaactccagttcggacggggtggagggagtcaggattccagtgccgagacacctcttgcgggtggcctcccacgcctggccgagagccctttttag

SEQ ID NO: 294688 - DNA, 1434 bp, Artificial Sequence
  derived and/or modified sequence
atgcccccctgccagccccagagacccctgctgctgctgctgctgctgctggcctgccagccccaggtgcccagcgcccaggtgatggacttcctgttcgagaagtggaagctgtacggcgaccagtgccaccacaacctgagcctgctgcccccccccaccgagctggtgtgcaacagaaccttcgacaagtacagctgctggcccgacacccccgccaacaccaccgccaacatcagctgcccctggtacctgccctggcaccacaaggtgcagcacagattcgtgttcaagagatgcggccccgacggccagtgggtgagaggccccagaggccagccctggagagacgccagccagtgccagatggacggcgaggagatcgaggtgcagaaggaggtggccaagatgtacagcagcttccaggtgatgtacaccgtgggctacagcctgagcctgggcgccctgctgctggccctggccatcctgggcggcctgagcaagctgcactgcaccagaaacgccatccacgccaacctgttcgccagcttcgtgctgaaggccagcagcgtgctggtgatcgacggcctgctgagaaccagatacagccagaagatcggcgacgacctgagcgtgagcacctggctgagcgacggcgccgtggccggctgcagagtggccgccgtgttcatgcagtacggcatcgtggccaactactgctggctgctggtggagggcctgtacctgcacaacctgctgggcctggccaccctgcccgagagaagcttcttcagcctgtacctgggcatcggctggggcgcccccatgctgttcgtggtgccctgggccgtggtgaagtgcctgttcgagaacgtgcagtgctggaccagcaacgacaacatgggcttctggtggatcctgagattccccgtgttcctggccatcctgatcaacttcttcatcttcgtgagaatcgtgcagctgctggtggccaagctgagagccagacagatgcaccacaccgactacaagttcagactggccaagagcaccctgaccctgatccccctgctgggcgtgcacgaggtggtgttcgccttcgtgaccgacgagcacgcccagggcaccctgagaagcgccaagctgttcttcgacctgttcctgagcagcttccagggcctgctggtggccgtgctgtactgcttcctgaacaaggaggtgcagagcgagctgagaagaagatggcacagatggagactgggcaaggtgctgtgggaggagagaaacaccagcaaccacagagccagcagcagccccggccacggcccccccagcaaggagctgcagttcggcagaggcggcggcagccaggacagcagcgccgagacccccctggccggcggcctgcccagactggccgagagccccttctag

SEQ ID NO: 294689 - protein, 1941 aa, Artificial Sequence
  derived and/or modified sequence
LLTSVLMPSFGYFIRSPEKREPIALIRKSDVSRGNLEKEMAHLNHDLYSGDLNEQSQAQLSEGSITLQVEAVESTSQVDENDVTLTADKGKTEDTFFMSNKPQRYKDKLPDSGDSMLRISTIASAIAEASVNTDPSQLAAMIKALSNKTRDKTFQEDEKQKDYSHVRHFLPNDLEKSNGSNALDMEKYLKKTEVSRYESALENFSRASMSDTWDLSLPKEQTTQDIHPVDLSATSVSVRAPEENTAAIVYVENGESENQESFRTINSSNSVTNRENNSAVVDVKTCSIDNKLQDVGNDEKATSISTPSDSYSSVRNPRITSLCLLKDCEEIRDNRENQRQNECVSEISNSEKHVTFENHRIVSPKNSDLKNTSPEHGGRGSEDEQESFRPSTSPLSHSSPSEISGTSSSGCALESFGSAAQQQQPPCEQELSPLVCSPAGVSRLTYVSEPESSYPTTATDDALEDRKSDITSELSTTIIQGSPAALEERAMEKLREKVPFQNRGKGTLSSIIQNNSDTRKATETTSLSSKPEYVKPDFRWSKDPSSKSGNLLETSEVGWTSNPEELDPIRLALLGKSGLSCQVGSATSHPVSCQEPIDEDQRISPKDKSTAGREFSGQVSHQTTSENQCTPIPSSTVHSSVADMQNMPAAVHALLTQPSLSAAPFAQRYLGTLPSTGSTTLPQCHAGNATVCGFSGGLPYPAVAGEPVQNSVAVGICLGSNIGSGWMGTSSLCNPYSNTLNQNLLSTTKPFPVPSVGTNCGIEPWDSGVTSGLGSVRVPEELKLPHACCVGIASQTLLSVLNPTDRWLQVSIGVLSISVNGEKVDLSTYRCLVFKNKAIIRPHATEEIKVLFIPSSPGVFRCTFSVASWPCSTDAETIVQAEALASTVTLTAIAESPVIEVETEKKDVLDFGDLTYGGWKALPLKLINRTHATVPIRLIINANAVAWRCFTFSKESVRAPVEVAPCADVVTRLAGPSVVNHMMPASYDGQDPEFLMIWVLFHSPKKQISSSDILDSAEEFSAKVDIEVDSPNPTPVLRSVSLRARAGIARIHAPRDLQTMHFLAKVASSRKQHLPLKNAGNIEVYLDIKVPEQGSHFSVDPKNLLLKPGEEHEVIVSFTPKDPEACEERILKIFVQPFGPQYEVVLKGEVISSGSKPLSPGPCLDIPSILSNKQFLAWGGVPLGRTQLQKLALRNNSASTTQHLRLLIRGQDQDCFQLQNTFGSEQRLTSNCEIRIHPKEDIFISVLFAPTRLSCMLARLEIKQLGNRSQPGIKFTIPLSGYGGTSNLILEGVKKLSDSYMVTVNGLVPGKESKIVFSVRNTGSRAAFVKAVGFKDSQKKVLLDPKVLRIFPDKFVLKERTQENVTLIYNPSDRGINNKTATELSTVYLFGGDEISRQQYRRALLHKPEMIKQILPEHSVLQNINFVEAFQDELLVTEVYDLPQRPNDVQLFYGSMCKIILSVIGEFRDCISSREFLQPSSKASLESTSDLGASGKHGGNVSLDVLPVKGPQGSPLLSRAARPPLDQLASEEPWTVLPEHLILVAPSPCDMAKTGRFQIVNNSVRLLRFELCWPAHCLTVTPQHGCVAPESKLQILVSPNSSLSTKQSMFPWSGLIYIHCDDGQKKIVKVQIREDLTQVELLTRLTSKPFGILSPVSEPSVSHLVKPMTKPPSTKVEIRNKSITFPTTEPGETSESCLELENHGTTDVKWHLSSLAPPYVKGVDESGDVFRATYAAFRCSPISGLLESHGIQKVSITFLPRGRGDYAQFWDVECHPLKEPHMKHTLRFQLSGQSIEAENEPENACLSTDSLIKIDHLVKPRRQAVSEASARIPEQLDVTARGVYAPEDVYRFRPTSVGESRTLKVNLRNNSFITHSLKFLSPREPFYVKHSKYSLRAQHYINMPVQFKPKSAGKFEALLVIQTDEGKSIAIRLIGEALGKN

SEQ ID NO: 294690 - protein, 2062 aa, Artificial Sequence
  derived and/or modified sequence
MDGCLDTETPTVSIQENVDVASLKPISDSGINFTDAIWSPTCERRTCECHESIEKNKDKTDLPQSVVYQNEEGRWVTDLAYYTSFNSKQNLNVSLSDEMNEDFRSGSEAFDLIAQDEEEFNKEHQFIQPSFGYFIRSPEKREPIALIRKSDVSRGNLEKEMAHLNHDLYSGDLNEQSQAQLSEGSITLQVEAVESTSQVDENDVTLTADKGKTEDTFFMSNKPQRYKDKLPDSGDSMLRISTIASAIAEASVNTDPSQLAAMIKALSNKTRDKTFQEDEKQKDYSHVRHFLPNDLEKSNGSNALDMEKYLKKTEVSRYESALENFSRASMSDTWDLSLPKEQTTQDIHPVDLSATSVSVRAPEENTAAIVYVENGESENQESFRTINSSNSVTNRENNSAVVDVKTCSIDNKLQDVGNDEKATSISTPSDSYSSVRNPRITSLCLLKDCEEIRDNRENQRQNECVSEISNSEKHVTFENHRIVSPKNSDLKNTSPEHGGRGSEDEQESFRPSTSPLSHSSPSEISGTSSSGCALESFGSAAQQQQPPCEQELSPLVCSPAGVSRLTYVSEPESSYPTTATDDALEDRKSDITSELSTTIIQGSPAALEERAMEKLREKVPFQNRGKGTLSSIIQNNSDTRKATETTSLSSKPEYVKPDFRWSKDPSSKSGNLLETSEVGWTSNPEELDPIRLALLGKSGLSCQVGSATSHPVSCQEPIDEDQRISPKDKSTAGREFSGQVSHQTTSENQCTPIPSSTVHSSVADMQNMPAAVHALLTQPSLSAAPFAQRYLGTLPSTGSTTLPQCHAGNATVCGFSGGLPYPAVAGEPVQNSVAVGICLGSNIGSGWMGTSSLCNPYSNTLNQNLLSTTKPFPVPSVGTNCGIEPWDSGVTSGLGSVRVPEELKLPHACCVGIASQTLLSVLNPTDRWLQVSIGVLSISVNGEKVDLSTYRCLVFKNKAIIRPHATEEIKVLFIPSSPGVFRCTFSVASWPCSTDAETIVQAEALASTVTLTAIAESPVIEVETEKKDVLDFGDLTYGGWKALPLKLINRTHATVPIRLIINANAVAWRCFTFSKESVRAPVEVAPCADVVTRLAGPSVVNHMMPASYDGQDPEFLMIWVLFHSPKKQISSSDILDSAEEFSAKVDIEVDSPNPTPVLRSVSLRARAGIARIHAPRDLQTMHFLAKVASSRKQHLPLKNAGNIEVYLDIKVPEQGSHFSVDPKNLLLKPGEEHEVIVSFTPKDPEACEERILKIFVQPFGPQYEVVLKGEVISSGSKPLSPGPCLDIPSILSNKQFLAWGGVPLGRTQLQKLALRNNSASTTQHLRLLIRGQDQDCFQLQNTFGSEQRLTSNCEIRIHPKEDIFISVLFAPTRLSCMLARLEIKQLGNRSQPGIKFTIPLSGYGGTSNLILEGVKKLSDSYMVTVNGLVPGKESKIVFSVRNTGSRAAFVKAVGFKDSQKKVLLDPKVLRIFPDKFVLKERTQENVTLIYNPSDRGINNKTATELSTVYLFGGDEISRQQYRRALLHKPEMIKQILPEHSVLQNINFVEAFQDELLVTEVYDLPQRPNDVQLFYGSMCKIILSVIGEFRDCISSREFLQPSSKASLESTSDLGASGKHGGNVSLDVLPVKGPQGSPLLSRAARPPLDQLASEEPWTVLPEHLILVAPSPCDMAKTGRFQIVNNSVRLLRFELCWPAHCLTVTPQHGCVAPESKLQILVSPNSSLSTKQSMFPWSGLIYIHCDDGQKKIVKVQIREDLTQVELLTRLTSKPFGILSPVSEPSVSHLVKPMTKPPSTKVEIRNKSITFPTTEPGETSESCLELENHGTTDVKWHLSSLAPPYVKGVDESGDVFRATYAAFRCSPISGLLESHGIQKVSITFLPRGRGDYAQFWDVECHPLKEPHMKHTLRFQLSGQSIEAENEPENACLSTDSLIKIDHLVKPRRQAVSEASARIPEQLDVTARGVYAPEDVYRFRPTSVGESRTLKVNLRNNSFITHSLKFLSPREPFYVKHSKYSLRAQHYINMPVQFKPKSAGKFEALLVIQTDEGKSIAIRLIGEALGKN

SEQ ID NO: 294691 - DNA, 6189 bp, Artificial Sequence
  derived and/or modified sequence
atggacggctgcctggacaccgagacccccaccgtgagcatccaggagaacgtggacgtggccagcctgaagcccatcagcgacagcggcatcaacttcaccgacgccatctggagccccacctgcgagagaagaacctgcgagtgccacgagagcatcgagaagaacaaggacaagaccgacctgccccagagcgtggtgtaccagaacgaggagggcagatgggtgaccgacctggcctactacaccagcttcaacagcaagcagaacctgaacgtgagcctgagcgacgagatgaacgaggacttcagaagcggcagcgaggccttcgacctgatcgcccaggacgaggaggagttcaacaaggagcaccagttcatccagcccagcttcggctacttcatcagaagccccgagaagagagagcccatcgccctgatcagaaagagcgacgtgagcagaggcaacctggagaaggagatggcccacctgaaccacgacctgtacagcggcgacctgaacgagcagagccaggcccagctgagcgagggcagcatcaccctgcaggtggaggccgtggagagcaccagccaggtggacgagaacgacgtgaccctgaccgccgacaagggcaagaccgaggacaccttcttcatgagcaacaagccccagagatacaaggacaagctgcccgacagcggcgacagcatgctgagaatcagcaccatcgccagcgccatcgccgaggccagcgtgaacaccgaccccagccagctggccgccatgatcaaggccctgagcaacaagaccagagacaagaccttccaggaggacgagaagcagaaggactacagccacgtgagacacttcctgcccaacgacctggagaagagcaacggcagcaacgccctggacatggagaagtacctgaagaagaccgaggtgagcagatacgagagcgccctggagaacttcagcagagccagcatgagcgacacctgggacctgagcctgcccaaggagcagaccacccaggacatccaccccgtggacctgagcgccaccagcgtgagcgtgagagcccccgaggagaacaccgccgccatcgtgtacgtggagaacggcgagagcgagaaccaggagagcttcagaaccatcaacagcagcaacagcgtgaccaacagagagaacaacagcgccgtggtggacgtgaagacctgcagcatcgacaacaagctgcaggacgtgggcaacgacgagaaggccaccagcatcagcacccccagcgacagctacagcagcgtgagaaaccccagaatcaccagcctgtgcctgctgaaggactgcgaggagatcagagacaacagagagaaccagagacagaacgagtgcgtgagcgagatcagcaacagcgagaagcacgtgaccttcgagaaccacagaatcgtgagccccaagaacagcgacctgaagaacaccagccccgagcacggcggcagaggcagcgaggacgagcaggagagcttcagacccagcaccagccccctgagccacagcagccccagcgagatcagcggcaccagcagcagcggctgcgccctggagagcttcggcagcgccgcccagcagcagcagcccccctgcgagcaggagctgagccccctggtgtgcagccccgccggcgtgagcagactgacctacgtgagcgagcccgagagcagctaccccaccaccgccaccgacgacgccctggaggacagaaagagcgacatcaccagcgagctgagcaccaccatcatccagggcagccccgccgccctggaggagagagccatggagaagctgagagagaaggtgcccttccagaacagaggcaagggcaccctgagcagcatcatccagaacaacagcgacaccagaaaggccaccgagaccaccagcctgagcagcaagcccgagtacgtgaagcccgacttcagatggagcaaggaccccagcagcaagagcggcaacctgctggagaccagcgaggtgggctggaccagcaaccccgaggagctggaccccatcagactggccctgctgggcaagagcggcctgagctgccaggtgggcagcgccaccagccaccccgtgagctgccaggagcccatcgacgaggaccagagaatcagccccaaggacaagagcaccgccggcagagagttcagcggccaggtgagccaccagaccaccagcgagaaccagtgcacccccatccccagcagcaccgtgcacagcagcgtggccgacatgcagaacatgcccgccgccgtgcacgccctgctgacccagcccagcctgagcgccgcccccttcgcccagagatacctgggcaccctgcccagcaccggcagcaccaccctgccccagtgccacgccggcaacgccaccgtgtgcggcttcagcggcggcctgccctaccccgccgtggccggcgagcccgtgcagaacagcgtggccgtgggcatctgcctgggcagcaacatcggcagcggctggatgggcaccagcagcctgtgcaacccctacagcaacaccctgaaccagaacctgctgagcaccaccaagcccttccccgtgcccagcgtgggcaccaactgcggcatcgagccctgggacagcggcgtgaccagcggcctgggcagcgtgagagtgcccgaggagctgaagctgccccacgcctgctgcgtgggcatcgccagccagaccctgctgagcgtgctgaaccccaccgacagatggctgcaggtgagcatcggcgtgctgagcatcagcgtgaacggcgagaaggtggacctgagcacctacagatgcctggtgttcaagaacaaggccatcatcagaccccacgccaccgaggagatcaaggtgctgttcatccccagcagccccggcgtgttcagatgcaccttcagcgtggccagctggccctgcagcaccgacgccgagaccatcgtgcaggccgaggccctggccagcaccgtgaccctgaccgccatcgccgagagccccgtgatcgaggtggagaccgagaagaaggacgtgctggacttcggcgacctgacctacggcggctggaaggccctgcccctgaagctgatcaacagaacccacgccaccgtgcccatcagactgatcatcaacgccaacgccgtggcctggagatgcttcaccttcagcaaggagagcgtgagagcccccgtggaggtggccccctgcgccgacgtggtgaccagactggccggccccagcgtggtgaaccacatgatgcccgccagctacgacggccaggaccccgagttcctgatgatctgggtgctgttccacagccccaagaagcagatcagcagcagcgacatcctggacagcgccgaggagttcagcgccaaggtggacatcgaggtggacagccccaaccccacccccgtgctgagaagcgtgagcctgagagccagagccggcatcgccagaatccacgcccccagagacctgcagaccatgcacttcctggccaaggtggccagcagcagaaagcagcacctgcccctgaagaacgccggcaacatcgaggtgtacctggacatcaaggtgcccgagcagggcagccacttcagcgtggaccccaagaacctgctgctgaagcccggcgaggagcacgaggtgatcgtgagcttcacccccaaggaccccgaggcctgcgaggagagaatcctgaagatcttcgtgcagcccttcggcccccagtacgaggtggtgctgaagggcgaggtgatcagcagcggcagcaagcccctgagccccggcccctgcctggacatccccagcatcctgagcaacaagcagttcctggcctggggcggcgtgcccctgggcagaacccagctgcagaagctggccctgagaaacaacagcgccagcaccacccagcacctgagactgctgatcagaggccaggaccaggactgcttccagctgcagaacaccttcggcagcgagcagagactgaccagcaactgcgagatcagaatccaccccaaggaggacatcttcatcagcgtgctgttcgcccccaccagactgagctgcatgctggccagactggagatcaagcagctgggcaacagaagccagcccggcatcaagttcaccatccccctgagcggctacggcggcaccagcaacctgatcctggagggcgtgaagaagctgagcgacagctacatggtgaccgtgaacggcctggtgcccggcaaggagagcaagatcgtgttcagcgtgagaaacaccggcagcagagccgccttcgtgaaggccgtgggcttcaaggacagccagaagaaggtgctgctggaccccaaggtgctgagaatcttccccgacaagttcgtgctgaaggagagaacccaggagaacgtgaccctgatctacaaccccagcgacagaggcatcaacaacaagaccgccaccgagctgagcaccgtgtacctgttcggcggcgacgagatcagcagacagcagtacagaagagccctgctgcacaagcccgagatgatcaagcagatcctgcccgagcacagcgtgctgcagaacatcaacttcgtggaggccttccaggacgagctgctggtgaccgaggtgtacgacctgccccagagacccaacgacgtgcagctgttctacggcagcatgtgcaagatcatcctgagcgtgatcggcgagttcagagactgcatcagcagcagagagttcctgcagcccagcagcaaggccagcctggagagcaccagcgacctgggcgccagcggcaagcacggcggcaacgtgagcctggacgtgctgcccgtgaagggcccccagggcagccccctgctgagcagagccgccagaccccccctggaccagctggccagcgaggagccctggaccgtgctgcccgagcacctgatcctggtggcccccagcccctgcgacatggccaagaccggcagattccagatcgtgaacaacagcgtgagactgctgagattcgagctgtgctggcccgcccactgcctgaccgtgaccccccagcacggctgcgtggcccccgagagcaagctgcagatcctggtgagccccaacagcagcctgagcaccaagcagagcatgttcccctggagcggcctgatctacatccactgcgacgacggccagaagaagatcgtgaaggtgcagatcagagaggacctgacccaggtggagctgctgaccagactgaccagcaagcccttcggcatcctgagccccgtgagcgagcccagcgtgagccacctggtgaagcccatgaccaagccccccagcaccaaggtggagatcagaaacaagagcatcaccttccccaccaccgagcccggcgagaccagcgagagctgcctggagctggagaaccacggcaccaccgacgtgaagtggcacctgagcagcctggcccccccctacgtgaagggcgtggacgagagcggcgacgtgttcagagccacctacgccgccttcagatgcagccccatcagcggcctgctggagagccacggcatccagaaggtgagcatcaccttcctgcccagaggcagaggcgactacgcccagttctgggacgtggagtgccaccccctgaaggagccccacatgaagcacaccctgagattccagctgagcggccagagcatcgaggccgagaacgagcccgagaacgcctgcctgagcaccgacagcctgatcaagatcgaccacctggtgaagcccagaagacaggccgtgagcgaggccagcgccagaatccccgagcagctggacgtgaccgccagaggcgtgtacgcccccgaggacgtgtacagattcagacccaccagcgtgggcgagagcagaaccctgaaggtgaacctgagaaacaacagcttcatcacccacagcctgaagttcctgagccccagagagcccttctacgtgaagcacagcaagtacagcctgagagcccagcactacatcaacatgcccgtgcagttcaagcccaagagcgccggcaagttcgaggccctgctggtgatccagaccgacgagggcaagagcatcgccatcagactgatcggcgaggccctgggcaagaactag

SEQ ID NO: 294692 - DNA, 6189 bp, Artificial Sequence
  derived and/or modified sequence
atggatggatgcctggacacggaaacccctacagtgtccatccaggagaatgttgacgtggcaagtcttaagcctatcagcgacagcggcatcaactttactgacgccatctggagtcccacatgcgaacgacggacgtgcgagtgccatgaatctattgaaaagaacaaggataaaactgatcttccacaatccgtggtgtatcagaacgaagaggggagatgggtgactgatctagcttactataccagctttaattcaaaacagaacctgaatgttagtctgtcagacgaaatgaacgaagactttaggtccggttccgaagccttcgatttaattgcgcaggacgaggaagagttcaacaaagaacaccagtttatccagccctctttcggctattttatcaggagtcctgagaagcgcgagcccattgccttgatccgcaaatccgacgtctcaagaggaaacctggagaaggaaatggcacatctgaaccatgacctgtactccggcgacctcaatgagcagtctcaggcgcagctcagcgaagggagcatcacgttacaggtggaagcagtggaatctacgtcccaggtggacgaaaacgatgtcaccctgacagcagataagggtaagactgaagataccttctttatgtcgaacaagccccaaaggtataaggacaagctgccagactcgggcgactctatgctcagaatcagtactatcgcatccgctatagctgaagcctccgtgaacacagatccatctcagctcgccgccatgatcaaggctctctctaataagacgagagacaagacatttcaggaggacgaaaaacagaaggactactctcacgtgcgccattttttgccaaacgacctcgagaaaagcaatggtagcaatgccctggacatggagaaatatctgaaaaagaccgaggtgtctcgttacgagtccgccctcgaaaacttctcccgagcctcaatgagcgatacctgggatctgtcccttcccaaggagcagacaacacaagacattcatccggttgatctgtccgcgacttccgtcagtgtgcgggctccagaggaaaacacagcggctatcgtatacgttgagaacggtgagagcgagaatcaggaatctttccgcactatcaactcttccaacagtgtaacaaatcgcgagaacaattcagcagtggtggacgtgaagacttgctcgatagacaataaattacaggatgtcgggaacgacgagaaagctacaagcatatcgactcccagcgatagctactctagcgtccgtaaccccaggatcacctctctgtgtctactaaaagattgcgaggaaataagagacaaccgcgaaaaccagaggcagaatgagtgtgtgtctgagatctccaatagcgagaagcacgtaactttcgagaaccaccgcattgtgtcacccaaaaatagcgatcttaaaaacacaagtcctgaacacggtggacggggttctgaggatgaacaggagtctttcaggccttccaccagcccactatcacattcgagcccttcagagatatctggaacgtcctcatccgggtgcgccctcgagtcattcggatcggccgctcagcagcagcagcctccttgtgaacaggagctttcgccacttgtgtgctctccagcgggagtgtcccgacttacttatgtgagcgaacctgagtcgtcttatcctaccactgccaccgatgatgcattggaagacaggaaaagcgacataacaagcgaattaagtaccacaatcatccagggctcccccgccgccctggaggagagggcgatggaaaagctcagagagaaggtgccattccaaaatagggggaaggggaccctctcttcgattattcagaataatagcgatacgagaaaggcaacagaaaccaccagcctatcatcaaagcccgagtacgtgaagccagactttaggtggtctaaagatccgtcgtccaagtcaggtaatctgctggagaccagcgaagtagggtggacatccaaccctgaggagctggaccccatccggctggcacttctcgggaagtctggactgagctgccaggtcggcagcgccacttctcaccctgtgtcatgtcaggaacccattgacgaagaccaacggatctcacccaaggacaagagtactgccggacgagaatttagtggtcaggtaagtcaccagaccaccagcgaaaatcagtgtactcccataccttcttccaccgtgcactctagcgtagctgacatgcagaatatgcctgcagccgtgcatgccctgctgacgcagccgtcactgtctgctgctcctttcgcgcagcggtacctcggaacactgccttctaccggatcaactaccttgccccagtgccacgctgggaatgcaacagtgtgcggattctccggtgggctcccatatccagctgtggccggcgagcccgtacagaactcagtcgctgttggaatatgcctggggagcaatatcggctccggctggatgggtacaagttctctctgcaatccatacagtaacacactgaatcaaaacctgctgagcacaaccaaaccctttccagtgccctctgtggggacaaattgtgggattgagccctgggacagcggggtcacaagcggccttgggtccgtcagagttccagaggaactaaaactaccacacgcatgctgcgtgggtatcgcttcgcagacccttctgtccgtcctaaacccaacagatagatggctccaggtaagtatcggcgtgctgtccatcagtgtgaatggggagaaggtggatctgtctacctatcggtgtctcgtgttcaaaaataaagccatcatccgcccccatgctaccgaagagattaaggtcctctttattcctagttcacccggggttttccgctgtacttttagtgtggcatcctggccctgctcaacagatgcagaaacgatcgttcaagctgaagctttggcgtcgaccgttaccctgacggctatagctgagagtcccgttattgaagtggagaccgagaagaaagatgtccttgattttggcgatctgacctacggtggttggaaggcactgccacttaaactcataaaccgcacccatgccaccgtgcccattcgcctaatcataaatgctaatgctgtggcgtggagatgtttcactttctcaaaggagtcggttcgggctcccgtggaagttgccccttgcgccgacgtggttactcgactggcaggaccttcggtggtgaatcacatgatgcctgcgtcttacgacggtcaagatcccgagttcttgatgatctgggtgttgttccactctcccaaaaaacagatctcatcctccgatattcttgactccgccgaagaattctcagctaaagtcgatattgaagtagattccccaaatcctacgccggtcctgcggtctgtgtccctcagggcccgggcaggcatcgctagaatccatgcacccagagatctccagaccatgcacttcttggctaaagttgcaagcagtcgaaaacagcatctgcctttgaaaaacgcaggcaatattgaggtgtatctggacattaaggtccccgaacagggaagtcacttttcagtggaccccaagaatttgcttttgaagccaggggaagaacacgaggttattgtgtcctttacccccaaggatcctgaagcttgcgaagagaggatcctcaagatctttgtgcagccctttggcccgcaatatgaagttgttctcaaaggagaagtcatttcctctgggagtaagcctttgagcccggggccatgccttgacataccatcgatattgtctaataaacagttcctggcatggggcggcgtcccactgggacggactcagcttcagaaacttgctctcagaaacaacagcgcctctacgacccagcatctccgactgctgatccgcggccaggaccaagactgctttcagttgcagaataccttcggtagcgagcagcggctgacatcgaattgtgagataaggattcacccaaaagaggacatcttcatcagcgtgctgtttgctccaacaaggctttcctgcatgctggcaaggttggaaattaaacagctgggcaaccgctcccagcctggaatcaagtttacaatccccttaagtgggtacgggggaactagtaatctgattctggagggcgtgaaaaagctgagcgacagctacatggtcacggtgaacggcctggtacccggtaaggagagcaaaattgttttcagcgtgaggaatactgggagcagggccgcgtttgttaaagcagttgggttcaaagactcgcagaagaaggtgcttctggatcccaaggttctgcgaatcttcccagacaagtttgtcctgaaggaacgcacacaggaaaatgtgactctgatttataatccctccgatcggggcatcaataacaagacagctactgaattgtccaccgtgtacctgtttggcggagatgagatttctcggcagcaatataggagagctctgctccacaagcccgaaatgatcaaacaaatcctgccagagcattccgttttacagaacatcaactttgtcgaggctttccaggacgaactgttggttaccgaagtgtatgacctgcctcagaggccaaatgacgtccagctgttctacggatcgatgtgcaaaatcattcttagcgttatcggcgaattcagggactgcatttcatctagggaattcctgcagcctagttcaaaggcctcccttgaaagcacctctgacttgggcgccagcggcaagcacggcggaaacgtatccttggatgtcttgcctgtgaaaggaccacagggctcccctctgctgtctagggcagcaaggcctcccttagaccagctcgcctcggaggaaccctggacggtcctgcctgaacacttgatattggtggcccctagcccttgtgatatggctaagacaggaaggtttcagattgtgaataactccgtcagattgctaaggtttgagctgtgttggcccgctcactgcctgaccgtcactccccagcacggctgcgtggcccccgagtctaaactgcagattctggttagtcccaattctagcttgagtaccaaacagtcgatgtttccgtggtcgggcctcatttacatccattgcgacgatggacagaaaaagatcgtcaaagtgcagatccgagaggatctaacccaggtcgagctcctgactcgtctgacctctaaacctttcggcattctgtcacccgtatctgagccgtccgtctctcatttggtgaaacctatgacaaagccaccatccaccaaggtcgagatcaggaataagtccatcaccttcccaactacggagcccggggaaacatctgagagctgcctggagctggaaaatcacgggaccaccgacgtaaagtggcatctgagcagcctggcccccccatacgtcaaaggggtggatgagagtggggatgtgtttagagccacctatgccgcgttccggtgcagccctatcagcggtttgttggagtcacatggaattcagaaggttagcatcaccttcctaccgagagggaggggagattacgcccagttctgggatgtagagtgtcaccctctgaaagagcctcatatgaagcacactttaaggttccagctgtctggccagtctatagaggcagaaaacgagccggaaaatgcttgcctgtccaccgactccctcattaaaattgaccacctcgttaagcctagaagacaggctgtgtcagaggcctcagccagaatccccgaacagcttgatgtgaccgcgcgaggagtctacgcaccagaggacgtatacaggtttaggccaacgtcagtgggggagagtcgcacccttaaagtcaatctccgaaataactcgttcattactcattccctgaagttcctgtctcctagggaacctttctacgtcaaacactcgaagtactcccttcgcgcacagcactacattaatatgccagtccaattcaagcctaagagcgcagggaaattcgaggcactgctggtgatccagaccgacgagggcaagagcattgccattcggttaatcggcgaagcccttggcaagaattag

SEQ ID NO: 294693 - DNA, 6189 bp, Artificial Sequence
  derived and/or modified sequence
atggatggctgcctggacacagagacccccaccgtgtccatccaggagaatgtggatgtggccagcctgaagcccatcagtgacagcggcatcaacttcacagatgccatctggagccccacctgtgagaggaggacctgtgagtgccacgagagcattgagaagaacaaggacaagacagacctgccccagagcgtggtgtaccagaatgaggagggccgctgggtgacagacctggcctactacaccagcttcaacagcaagcagaacctgaatgtgtccctgagtgatgagatgaatgaagacttccgcagcggcagcgaggcctttgacctgattgcccaggatgaggaggagttcaacaaggagcaccagttcatccagcccagctttggctacttcatccgcagccctgagaagcgggagcccatcgccctgatcaggaagagtgatgtgtcccggggcaacctggagaaggagatggcccacctgaaccacgacctgtacagcggggacctgaatgagcagagccaggcccagctgtctgagggcagcatcaccctgcaggtggaggccgtggagagcaccagccaggtggatgaaaatgatgtgaccctgacagctgacaagggcaagacagaggacaccttcttcatgagcaacaagccccagcgctacaaggacaagctgcctgattctggggacagcatgctgcgcatcagcaccatcgccagcgccatcgccgaggcctctgtgaacacagaccccagccagctggccgccatgatcaaggccctgagcaacaagacccgggacaagaccttccaggaggatgagaagcagaaggactacagccacgtgcgccacttcctgcccaatgacctggagaagagcaatggcagcaatgccctggacatggagaagtacctgaagaagacagaggtgagccgctatgagagcgccctggagaacttcagccgggcctccatgtctgacacctgggacctgagcctgcccaaggagcagaccacccaggacatccaccctgtggacctgagcgccacctctgtgtctgtgcgggcccctgaggagaacacagctgccatcgtgtatgtggagaatggagagagcgagaaccaggagagcttccgcaccatcaacagcagcaacagcgtgaccaaccgggagaacaacagcgctgtggtggatgtgaagacctgcagcattgacaacaagctgcaggatgtgggcaatgatgagaaggccaccagcatcagcacccccagcgacagctacagctctgtgaggaacccccgcatcaccagcctgtgcctgctgaaggactgtgaggagatccgggacaaccgggagaaccagaggcagaatgaatgtgtgtctgagatcagcaacagcgagaagcacgtgacctttgagaaccaccgcatcgtgagccccaagaacagcgacctgaagaacaccagccctgagcacggcggccggggctctgaagatgagcaggagagcttccggcccagcaccagccccctgagccacagcagccccagcgagatcagcggcaccagcagcagcggctgtgccctggagagctttggatctgctgcccagcagcagcagcccccctgtgagcaggagctgagccccctggtgtgcagccctgctggggtgtcccggctgacctacgtgtctgagcctgagagcagctaccccaccacagccacagatgatgccctggaggacaggaagagtgacatcaccagcgagctgagcaccaccatcatccagggcagccctgctgccctggaggagcgggccatggagaagctgcgggagaaggtgcccttccagaacagaggcaagggcaccctgagcagcatcatccagaacaacagcgacaccaggaaggccacagagaccaccagcctgagcagcaagccagaatatgtgaagccagacttccgctggagcaaggaccccagcagcaagagcggcaacctgctggagaccagcgaggtgggctggaccagcaaccctgaggagctggaccccatccggctggccctgctgggcaagagcggcctgagctgccaggtgggcagcgccaccagccaccctgtgtcctgccaggagcccattgatgaggaccagaggatcagccccaaggacaagagcacagctggccgggagttcagcggccaggtgagccaccagaccaccagcgagaaccagtgcacccccatccccagcagcacagtgcacagctctgtggccgacatgcagaacatgcctgctgctgtgcacgccctgctgacccagcccagcctgtctgctgccccctttgcccagcgctacctgggcaccctgcccagcacaggcagcaccaccctgccccagtgccacgccggaaatgccaccgtgtgtggcttcagcggcggcctgccctacccagctgtggccggggagcctgtgcagaacagcgtggccgtgggcatctgcctgggcagcaacatcggcagcggctggatgggcaccagcagcctgtgcaacccctacagcaacaccctgaaccagaacctgctgagcaccaccaagcccttccctgtgcccagcgtgggcaccaactgtggcatcgagccctgggacagcggcgtgaccagcggcctgggctctgtgcgggtgcctgaggagctgaagctgccccacgcctgctgcgtgggcatcgccagccagaccctgctgtctgtgctgaaccccacagaccgctggctgcaggtgtccattggagtgctgagcatctctgtgaatggagagaaggtggacctgagcacctaccgctgcctggtgttcaagaacaaggccatcatccggccccacgccacagaggagatcaaggtgctcttcatccccagcagccctggggtcttccgctgcaccttctctgtggcctcctggccctgcagcacagatgctgagaccatcgtgcaggccgaggccctggccagcacagtgaccctgacagccatcgccgagagccctgtgattgaggtggagacagagaagaaggatgtgctggactttggagacctgacctatggaggctggaaggccctgcccctgaagctgatcaacagaacccacgccaccgtgcccatccgcctcatcatcaatgccaatgctgtggcctggcgctgcttcaccttcagcaaggagagcgtgcgggcccctgtggaggtggccccctgtgctgatgtggtgacccggctggccggccccagcgtggtgaaccacatgatgcctgccagctatgatggccaggaccctgagttcctgatgatctgggtgctcttccacagccccaagaagcagatcagcagcagtgacatcctggacagcgctgaggagttcagcgccaaggtggacatcgaggtggacagccccaaccccacccctgtgctgcggtctgtgtccctgcgggcccgggccggcatcgcccgcatccacgccccccgggacctgcagaccatgcacttcctggccaaggtggccagcagcaggaagcagcacctgcccctgaagaatgccggcaacatcgaggtgtacctggacatcaaggtgcctgagcagggcagccacttctctgtggaccccaagaacctgctgctgaagccaggagaggagcatgaagtcatcgtgtccttcacccccaaggaccctgaggcctgtgaggagcgcatcctgaagatctttgtgcagcccttcggcccccagtatgaggtggtgctgaagggggaggtgatcagcagcggcagcaagcccctgagccctggcccctgcctggacatccccagcatcctgagcaacaagcagttcctggcctggggcggcgtgcccctgggccgcacccagctgcagaagctggccctgaggaacaacagcgccagcaccacccagcacctgcggctgctgatccggggccaggaccaggactgcttccagctgcagaacacctttggaagtgagcagaggctgaccagcaactgtgagatccgcatccaccccaaggaggacatcttcatctctgtgctgtttgcccccacccggctgagctgcatgctggcccggctggagatcaagcagctgggcaacagaagccagcccggcatcaagttcaccatccccctgagcggctatggaggcaccagcaacctgatcctggagggcgtgaagaagctgagtgacagctacatggtgacagtgaatggcctggtgcctgggaaggagagcaagatcgtgttttctgtgaggaacacaggcagcagagctgcctttgtgaaggctgtgggcttcaaggacagccagaagaaggtgctgctggaccccaaggtgctgcgcatcttcccagacaagtttgtgctgaaggagaggacccaggagaatgtgaccctcatctacaaccccagcgaccggggcatcaacaacaagacagccacagagctgagcacagtgtacctgtttggaggagatgagatcagccggcagcagtaccgccgggccctgctgcacaagccagagatgatcaagcagatcctgcctgagcacagcgtgctgcagaacatcaactttgtggaggccttccaggatgagctgctggtgacagaggtgtatgacctgccccagaggcccaatgatgtgcagctgttctacggctccatgtgcaagatcatcctgtctgtgattggagagttccgggactgcatcagcagccgggagttcctgcagcccagcagcaaggccagcctggagagcaccagtgacctgggcgccagcggcaagcacggcggcaatgtgtccctggatgtgctgcctgtgaagggcccccagggcagccccctgctgagcagagctgcccggccccccctggaccagctggccagcgaggagccctggacagtgctgcctgagcacctgatcctggtggcccccagcccctgtgacatggccaagacaggccgcttccagatcgtgaacaacagcgtgcggctgctgcgctttgagctgtgctggccagcccactgcctgactgtgaccccccagcacggctgtgtggcccctgagagcaagctgcagatcctggtgagccccaacagcagcctgagcaccaagcagagcatgttcccctggagcggcctcatctacatccactgtgatgatggccagaagaagatcgtgaaggtgcagatccgggaggacctgacccaggtggagctgctgacccggctgaccagcaagcccttcggcatcctgagccctgtgtctgagcccagcgtgagccacctggtgaagcccatgaccaagccacccagcaccaaggtggagatccggaacaagagcatcaccttccccaccacagagcctggagagaccagcgagagctgcctggagctggagaaccacggcaccacagatgtgaagtggcacctgagcagcctggccccaccctacgtgaagggcgtggatgaaagtggagatgtgttccgggccacctacgccgccttccgctgcagccccatcagcggcctgctggagagccacggcatccagaaggtgtccatcaccttcctgccccggggccgcggggactatgcccagttctgggatgtggagtgccaccccctgaaggagccccacatgaagcacaccctgcgcttccagctgagcggccagagcattgaagcagaaaatgaaccagaaaatgcctgcctgagcacagacagcctcatcaagattgaccacctggtgaagccccggcggcaggccgtgtctgaggccagcgcccgcatccctgagcagctggatgtgacagcccggggcgtgtatgccccagaagatgtgtaccgcttccggcccacctctgtgggggagagcaggaccctgaaggtgaacctgaggaacaacagcttcatcacccacagcctgaagttcctgagcccccgggagcccttctacgtgaagcacagcaagtacagcctgcgggcccagcactacatcaacatgcctgtgcagttcaagcccaagtctgctgggaagtttgaggccctgctggtgatccagacagatgagggcaagagcatcgccatccggctgattggagaggccctgggcaagaactag

SEQ ID NO: 294694 - DNA, 6189 bp, Artificial Sequence
  derived and/or modified sequence
atggacggctgcctggacaccgagacccccaccgtgagcatccaggagaacgtcgatgtagctagcctgaaacctatttccgattcaggcataaacttcacagatgccatttggtctcccacttgcgaacggaggacatgtgagtgccatgagagcatcgagaagaacaaggataagactgacctccctcaatcagtggtctaccaaaacgaggagggccggtgggtaactgacctggcgtactatactagcttcaactctaagcagaatctgaatgtttcgctgtctgacgaaatgaatgaggactttagaagcggttcggaggccttcgacctgatcgcgcaggacgaggaagaatttaacaaggaacaccaattcattcagcctagtttcggatactttattcggtctccagaaaaaagggagcccatcgcgttgatccggaagagcgacgtttccagaggcaacctcgagaaagagatggcacacctgaatcatgacctgtattccggggatctgaatgagcagtcccaggctcagctcagtgaggggtccatcacactgcaggtggaagctgttgaatccaccagccaggtcgacgagaacgatgtgactctgaccgccgataaaggaaagacggaggataccttcttcatgtccaacaagcctcagcgttacaaggataagctacccgacagtggtgacagcatgttgaggattagcacaattgcatccgcgattgctgaggcctccgtgaatactgatccatcacagctggccgccatgataaaggccctgagcaacaagacacgggataagacatttcaggaagacgaaaaacaaaaagattacagtcacgtgcgccactttctccctaatgacctggagaagtccaatggctctaatgccctagacatggagaaataccttaagaagacagaggtcagccggtatgagtcagctctagagaacttttctagggctagtatgtctgatacatgggacttgtcccttccaaaggagcagaccacgcaggatatccaccccgttgacctctctgccacttcagtctccgtccgagctcccgaagaaaataccgccgcgatcgtatatgttgagaacggagaaagtgaaaaccaagaatcatttcgcacaatcaattctagtaatagcgtgaccaaccgcgagaataatagtgccgtggttgatgtcaaaacctgtagcattgataacaaactccaggatgtgggcaacgacgagaaggccacttctatcagcactcctagcgactcctactcatccgtccggaatcccaggattacatcattatgcttgctcaaagattgcgaagaaatccgggacaaccgcgagaaccagagacagaacgagtgtgtctcagaaatttccaactcggagaaacacgtcacattcgagaaccaccgcatagtcagtccgaagaacagcgacctgaagaacacaagccccgagcacggtggccgggggtctgaggacgagcaagagagtttccgtccatccacctcgccactgtcgcacagcagccctagcgaaatctccgggacatcatcttctgggtgcgccctggagtcttttggttcagcagctcagcagcagcagcctccatgtgagcaggaattgtcccccttagtgtgctcaccagctggtgtgtcacgcctgacttatgtctccgaacccgaatcttcctatccaactacggccactgacgatgccctggaggatagaaagtctgatataacctccgaactgtccactacaataatacagggctcccccgctgcgcttgaggagagagccatggagaaactgagagagaaagtccccttccagaaccgcggcaagggaacactgtcgtcaatcatccagaataatagcgataccagaaaagcaaccgagaccacatcactctcctccaagcccgagtacgtgaaacccgattttagatggagtaaagacccttcatcgaagtcaggcaatctgttagagacttccgaagtcgggtggaccagcaatccagaagaactggaccctatccggctggccctgctggggaagagcgggctcagctgtcaagtgggctccgcaacttctcacccagtaagctgccaggaacccatcgacgaggaccaaaggatttcgccaaaagacaaaagcacagccggcagggagttttctggccaagtgtctcatcagaccactagcgaaaatcagtgtactccaattccttcaagtaccgtgcactcctccgtggctgatatgcagaatatgcctgcagccgtgcatgctttactcacacagccctctctcagtgcagctccgtttgctcagagatacctggggacattgccgtccacagggtccaccaccctcccccaatgtcacgcaggcaatgcgacggtctgtggctttagcggtggcctgccgtaccccgccgtggccggcgaaccggtgcagaacagcgtcgcagtcggcatatgcttgggaagcaatatcggcagcggttggatgggaacctccagcctgtgtaatccctattctaatactctaaaccagaatcttctgtccacaaccaagccgttccctgtccctagcgtcggaaccaactgtggcattgaaccctgggattccggcgtgacgtcggggctgggaagcgtacgagtccccgaggaattaaagctgccgcacgcctgctgcgtgggaattgcaagtcaaacactcttgtcagtcctgaaccctaccgacaggtggctgcaagtgagtatcggggtcctgagcatctccgtgaacggtgaaaaagtggacctaagcacctaccgctgccttgtatttaaaaataaggcaattattcggccacatgccaccgaggagattaaggtattgtttatcccctcttctcccggggtgttccgctgtactttttctgtggcaagttggccctgtagcaccgacgctgagaccatcgtgcaggctgaggctctggcaagcaccgtgacgctcactgctatcgcagagtctcccgtgattgaagtggagacagagaagaaagatgttctagatttcggtgacctgacatacggtggatggaaggccctccctcttaagttaataaatagaacacacgccaccgtgcccatacggctcatcatcaacgcgaatgcagtcgcttggcggtgcttcacttttagcaaagaaagtgtccgggccccggttgaagttgcaccttgtgccgacgtcgtgacaagactggcaggacccagcgttgtgaaccacatgatgccagcctcatatgatggccaggatccggaattcctcatgatatgggtactgtttcatagccctaagaagcagatctcctcgtccgatattctggattcggctgaggaatttagtgccaaggtcgatatcgaggttgacagcccaaaccctaccccagtactgagaagcgtttccctgcgggcacgagccggtatcgccagaatccacgccccaagggaccttcaaaccatgcacttcctagccaaagtggcctcttctcgaaaacagcatctgcccctcaagaatgccggcaacatcgaggtttacctggatatcaaggtgccagaacagggaagccatttcagcgtggacccaaagaacctgctgttgaagcccggagaggagcatgaagtcatcgtttccttcacacccaaagatcctgaggcctgtgaggaacgaattctaaagatttttgtgcaaccttttgggccccagtacgaggtggtactgaagggcgaagtgatttcaagcggtagcaagccgttatccccaggcccttgtttggacataccaagtatcctttccaataagcagtttttggcctggggcggcgtgcccctgggcagaacccagctccagaagctcgctctccgaaacaactccgcttctaccacacagcacctgcgccttctgattcgcggccaagatcaggattgtttccagctccagaacacttttgggtctgaacagaggctgacatctaactgtgaaatcagaattcaccccaaagaagacatttttatcagtgtactcttcgcccctacccgcttgtcttgcatgctggcaagactggaaatcaagcagctgggaaatcggtcccaacctggaattaaattcactattcccttgagtgggtatggcggaaccagtaacctgattctagagggcgtcaaaaaattatctgactcatacatggtgaccgttaatggtcttgtgccagggaaagaatcaaagatcgtgttctctgtaagaaacactggctctagagctgcctttgtgaaagcagttggttttaaagactcacagaagaaggtccttctggacccgaaagtgcttcggatctttcccgacaagttcgtgttgaaagaacggacacaggagaacgtgactctcatttacaatccatctgaccggggtattaacaacaaaacggcaacggagctttccaccgtctacctgttcggcggcgatgagatctctcgccagcagtacagaagagctcttctgcacaaacctgagatgatcaagcagattttgccagaacatagcgtccttcagaatatcaatttcgtcgaggccttccaggatgagttgctggtcaccgaagtatatgacctgcctcagcggccaaatgatgttcagctcttctatgggagtatgtgcaagatcattctttccgtgattggggaatttagggattgcatttcaagcagagagttcctccagccgtcctcaaaggccagtctggaaagcactagcgatctgggggcttcaggcaagcatggtgggaatgtgtcattggatgtgttacctgtcaaaggtccccaggggtctcccttactatccagggcagcccgtccgccacttgatcagctggcatcggaggagccatggaccgtgctgccagagcacctgatccttgtggctccttctccctgcgatatggcaaagactggacgattccagatagtgaataattccgtgcggctgctgagatttgagctgtgttggccggcacactgtctcactgtgacccctcagcacggttgcgtagcccccgagtccaagttgcaaattcttgtttcacctaacagcagcctgtctaccaaacagagtatgtttccatggtccggtctcatttacattcactgcgacgatgggcagaaaaagattgtaaaggtgcaaatccgagaagatcttacacaggtggagctgttaacaaggctcacatccaagccattcggtattctgagcccagtgtcagaacccagtgttagccatctggtcaagcccatgactaaaccaccctcaaccaaggttgagattaggaacaagtccataacctttccgaccactgaacctggcgagacgtccgaatcctgcctcgagctggaaaaccacggtacaaccgacgtgaaatggcatctctcttctctggccccaccttacgtgaagggggtcgatgaatcgggggatgtctttcgcgctacttatgcagcatttagatgttctccaatctctggccttctagaaagccatggaattcaaaaggtttcaattactttcttacccagagggagaggtgattatgctcagttctgggacgtagaatgccaccctttgaaagaaccccatatgaagcataccctgcgttttcagctgtctggtcaatccatagaagccgagaacgaaccggaaaacgcctgtctttctacagattcactaataaaaatagaccacttggttaaaccaaggagacaggccgtctctgaagcatcagctagaatcccagaacagctcgatgtaacagcgaggggggtttacgcccctgaggacgtttatagattccgacccaccagcgtgggtgagtctagaactctgaaagtgaatctccgaaataactcctttatcacacatagtttgaaattcttgtcgccacgggagccattttatgtgaagcactccaagtatagcctgcgcgcgcagcactacatcaatatgccagttcaattcaagcctaaaagtgcagggaaattcgaggccttgctggttatccagactgatgagggtaagtcaattgctattaggcttataggcgaggcgctcggcaagaactag

SEQ ID NO: 294695 - DNA, 6188 bp, Artificial Sequence
  derived and/or modified sequence
atggatggttgtctcgacaccgaaacccccacagtctcaattcaagagaacgtggatgtggccagcctaaaacctatcagcgacagcgggattaactttacagacgctatatggtcccctacttgcgaacgcaggacttgcgagtgccacgaatcaatcgaaaagaataaggataagacagatctccctcagtctgtggtttaccagaacgaggaaggaagatgggttacagatcttgcctactacacctcttttaactctaaacaaaacttaaatgtgtctctaagcgatgagatgaatgaggacttccggtcaggttccgaggctttcgatctgattgcccaggatgaggaagagttcaataaagaacatcagtttatccagccatcctttgggtattttattcgctcccccgaaaaacgggaacctatcgcgctgatcagaaagtctgatgtatcacgtgggaatctggagaaagagatggctcatcttaaccatgacctttattccggggacctaaatgaacaatctcaagcccagctctccgagggatctatcacactccaagtagaggcggtggagtctaccagccaggtcgacgagaatgacgtgacactcaccgcagacaagggtaagacggaggacacatttttcatgtccaacaaaccacagcggtacaaagataagttgcccgacagtggggattccatgctgcggataagcactatcgccagtgcaatagctgaggcctctgtaaacacggatcccagtcagctggcggctatgattaaggcactttccaacaaaaccagggacaaaacgtttcaagaagatgaaaaacaaaaggattactctcacgtgcgccactttttgccaaacgatctggaaaagagcaatgggagcaatgccttggacatggagaagtacctgaagaagactgaagtttctcgttatgagtccgccctggagaacttctcacgtgcgtccatgtcagacacttgggacctgagtttgccaaaagaacagaccacccaggatatacaccccgtcgacctctccgctacatctgttagcgtccgcgcaccagaagagaataccgccgctatcgtgtacgtagagaacggagaatctgagaatcaggaatccttcaggactatcaattcctccaattctgtaaccaatcgtgagaacaatagtgccgtggtggatgtgaagacatgctctattgacaataagttgcaagatgtgggcaacgacgaaaaggctacctctatatctaccccaagtgactcctactcttctgtgcgaaaccccaggattacgagcctgtgcctgctcaaagactgtgaagagatcagagacaacagagaaaatcaacgacagaatgagtgcgtctccgagatcagtaatagcgagaaacacgttacctttgaaaatcaccgaatcgtctctcccaaaaacagcgacctgaagaatacctctcccgagcacggagggcgaggaagtgaggatgaacaggaatcattcagacccagcactagccccttgtctcactcctccccttccgaaattagcggcacctccagctcagggtgcgccctagaatcttttggcagcgctgctcaacaacagcagcctccttgtgagcaagagctgtccccactagtgtgtagtcccgcaggcgtgtccagactgacttatgtgagtgaaccagaatccagttacccaaccaccgccacagatgacgctttggaggaccgaaagtctgatataacctccgagctgtccacaaccatcattcagggcagcccagctgctcttgaagagagggcaatggaaaaactgcgcgagaaagtcccattccagaaccgcggtaaggggactttaagctccattatacaaaataattccgatacccgcaaggcaacagagaccaccagcctgtcctccaagccagagtatgtaaagcccgacttccggtggtccaaggacccctcatcaaaaagcggaaatctgctggaaacatctgaggtgggatggacctccaatccagaggagttggacccaatacgtttagccctgctggggaaatccggtctctcgtgccaggtgggatctgctactagtcatccagtctcctgccaagaacccatagacgaagatcaacgaataagtcccaaagacaagtccactgctggtagggagttcagtggccaggtcagccaccagacgacttctgaaaatcagtgcacccctatccctagttctactgtgcatagctccgttgctgatatgcagaacatgccagccgctgtccatgccctgctgacccagccgtccttgtccgcagcccctttcgcgcagaggtacctgggcactctgccttcgactggctctaccactctcccacagtgtcatgccggaaacgccacagtgtgtggattctccggtggcttaccataccccgcagtggctggagagccagtgcagaactcggtggcagtcggcatctgtctgggaagcaacattggatccggttggatgggcacatcttccctttgcaacccctacagcaatacactcaatcagaatctcctcagcactactaaaccttttccggtgccctccgtgggcacaaactgtggcatcgagccatgggatagtggagttactagcggactcggctcagtgcgtgtacccgaggagctaaagttaccacacgcatgttgtgtggggatcgctagtcagacactattaagcgttctgaatcctacggatcgttggcttcaggtcagcatcggagtactctctatatcagtgaatggggaaaaagtggacctgagcacctacagatgtttggtgttcaagaacaaagcaatcatccggccacatgctactgaggagatcaaagtgctcttcattccctcaagtcctggcgtgtttcgctgtacgttcagtgtggcaagttggccctgcagtaccgacgcagaaacaattgttcaggctgaagccttggcgtccacggtaaccttaactgccatcgccgagtcgcccgtgatcgaggtggagacagaaaaaaaggacgttctggactttggggacctgacctacggaggctggaaagcactaccacttaagctaataaaccggactcatgcaactgtgcccatacgtctcatcattaatgccaatgccgtggcctggagatgcttcactttctctaaggagtcggttagagcccctgtggaggtggcaccctgtgccgatgtggtgacaaggctagccggtcctagcgtcgtgaaccacatgatgcccgcatcgtatgatggtcaagatccggaatttctgatgatatgggtgctttttcactcacccaagaaacagatctcatcctcagatatcctcgacagcgctgaagaattcagcgcaaaagtggacatcgaagtcgatagtccaaatcctacccccgtgctgcggagtgtcagcttaagagcacgtgctgggatcgccaggatccatgcccctcgagatctccagactatgcactttttggcaaaagtggcctccagccggaagcagcaccttccactcaagaacgccggtaatattgaagtgtaccttgatatcaaagtccccgagcagggtagtcactttagcgttgaccccaagaatctgctgctaaaacctggcgaagagcacgaagtgatagtttcgttcacccccaaagacccagaggcttgtgaagaaagaattctgaagatctttgtacagcctttcgggccacagtatgaagttgttcttaagggagaggtgatttccagtgggtctaaacctctctcccccggtccatgcctcgatataccatctatactttctaacaagcagttcctcgcctggggcggagtacctctggggagaacacagttacagaagctggccctacgtaacaattcggcttccaccacccaacatctgaggttattaatcagaggacaggaccaggattgtttccagcttcaaaacacatttgggagcgagcaaagactgactagtaattgtgaaatccgaatccacccgaaggaggatatcttcatttctgtcctgttcgccccaactcggctcagttgcatgttagctcgactggagataaagcagctgggcaaccggagtcagcctggcattaaatttaccatacccctgagcggctatggcggaaccagtaatctcatcttagaaggcgtgaagaagttatcagacagctacatggtgacagtcaatggccttgtgccaggtaaggagagcaaaattgttttttcagttaggaataccggctctagggctgcttttgttaaagctgttggcttcaaggacagccagaagaaagtattgctggaccctaaagtcctccgaattttccccgataaattcgtgctcaaggagcgaacacaggaaaacgttactctgatctacaacccatctgaccgtggaatcaacaataaaactgctacggagttatccactgtgtacctcttcgggggagatgagatttcgcgccagcagtacagacgggctctgctgcacaagccggagatgattaagcagatcctgcctgagcacagcgtgcttcagaacatcaatttcgtggaggcattccaggatgagctgctggtgaccgaagtgtacgatttgcctcagcggccaaatgacgtgcagcttttctatgggagtatgtgtaaaattatattgtccgtcatcggggaatttcgggactgtatttcctcaagagaatttctacagccttccagcaaggcctccctggaaagcacgtctgacctgggcgcttccggtaagcacggaggaaatgtgtccctcgatgtgctgcccgttaagggaccccaggggagtccgctcctgtctagggcagcccgacctcccctggatcagctggccagcgaggagccttggacagtattgcctgaacacctgatcttggtggccccttcaccatgtgatatggcgaagacaggacgatttcaaatcgttaataacagtgttaggttactacgattcgaactgtgttggccagcccactgtttgaccgttactccgcagcacggatgtgtagctcccgaatcgaagctccagatcctggtgagccccaattcctccctgagcactaaacaaagcatgtttccatggagcggcctaatatacatacattgtgacgacggtcaaaaaaaaattgtgaaagtgcagatccgagaggacctgactcaggtagagctgctgactcggctgaccagcaaacctttcggaatcctgtctccggtctccgaaccatcggtgagccacctggtcaagcccatgacaaagcccccatccacaaaagtcgagatcagaaataagtcaatcacctttcctacgaccgaacccggtgagactagcgagtcttgtctggagttagaaaatcatgggaccacagatgtaaaatggcacctcagctccctggcccctccctacgtcaagggggtcgatgagagcggagacgtgttccgtgccacgtatgctgccttcagatgcagtccgatcagcgggctgctcgaaagtcacggtatccagaaagtgtctataacattcctgccaaggggcaggggcgactatgcgcagttctgggacgtggagtgccatcccctgaaggaacctcacatgaaacacaccctgcgattccagctgtctgggcagtccatcgaggccgaaaatgaacccgaaaacgcgtgtctgtccacagatagtcttatcaaaatcgaccaccttgtaaaacctcggcgtcaggccgtgagtgaggcctccgcccgaattcccgaacagttggatgtcacagccagaggcgtgtacgcaccggaagacgtgtaccggttcaggccaacctctgtgggggagagcagaacgctgaaggtgaatctccggaacaattcctttattacgcatagcctcaagtttctctctcctcgggaacccttctatgtgaaacactccaaatactcacttcgcgcacagcattacattaatatgccagttcagtttaagccaaagtctgctggtaaattcgaagcactactggtgatacagacagatgaaggcaagtctattgcaattcgcttgatcggcgaggccctcggcaagaatta

SEQ ID NO: 294696 - DNA, 6455 bp, Artificial Sequence
  derived and/or modified sequence
agggggcagagtgtcctcaccaaaataagacagttttgcacatggatggatgtttagacactgagactcctacggtgtccattcaagaaaatgtggatgtagcctctttgaagcccattagtgacagtggaattaatttcactgatgccatttggtcaccaacttgtgaaaggcgaacatgtgaatgtcacgagtccatcgaaaagaataaagacaaaacagatctcccacagagtgtggtctatcaaaatgaagagggtaggtgggtcacagaccttgcctattacacatcttttaatagcaaacaaaatttaaatgtgtctctaagtgatgagatgaatgaagacttcagatctggttctgaagcatttgatttgattgcacaagatgaagaagaatttaataaagagcatcaatttatacagccatcatttggctattttattagatcaccagagaagagagaacctattgccttaataagaaaatctgatgtatcaagaggtaatttggaaaaagaaatggctcatcttaaccatgatctatattcaggagatttaaatgaacagtcccaggcacagctaagtgaaggatcaattacacttcaggttgaagcagtagagagtacttcacaagtggatgaaaatgatgtgacgttaacggctgataaaggcaaaacagaggacactttcttcatgagcaacaaaccccaaagatacaaagacaagctaccagatagtggtgattctatgcttaggatcagcaccattgcttcagccattgcagaggcatcagttaatactgatccttcccaacttgctgcaatgatcaaggcactttcaaataaaaccagagacaagacttttcaggaagatgagaaacaaaaggactattctcatgtgcgtcatttcttacctaatgatttagaaaaaagtaatggatccaatgcacttgatatggagaaataccttaaaaaaacagaagttagtagatatgaaagtgcattggaaaacttttcaagggctagtatgtctgatacttgggatttatctttgcccaaagaacaaactactcaagacattcatccggtggacttaagtgctactagtgtaagtgtgagggcaccagaagaaaacacagcagctattgtttatgttgaaaatggagagagtgagaatcaagagtcatttagaaccataaactcctcaaattcagttacaaatagagagaataacagtgcagtagttgatgtgaagacatgttccattgacaacaaattacaagatgttggtaacgatgaaaaagctacctcaatttccactccatctgatagttattcatcagtgaggaaccccagaataacatccctttgtctgttaaaagactgtgaagaaatacgagataacagagaaaatcagaggcaaaatgagtgtgtcagtgaaataagcaacagtgagaagcatgtgacttttgaaaaccatcgcatagtctcacctaaaaatagtgatttgaaaaatacctctcctgagcatggtggacgtggctcagaggatgagcaggagagcttcagaccttccacgtcaccactgagtcattcttctcctagtgaaatttctggaacgagttcatcagggtgtgcgttagagtcctttggttcagcagctcagcagcagcagcctccctgtgagcaggagttgtctcccttggtgtgctcgcctgctggggtgagcaggctgacgtatgtgtctgaaccagagagctcctatcctaccacagccacagatgatgccctggaggaccgcaagagtgatatcaccagcgagttgagtaccacaattattcaaggcagtccagccgcattggaggaacgggctatggaaaaattgagagaaaaagttccatttcagaatagaggaaaaggaacattatcatctattatccagaataactctgatacaagaaaagcaactgaaactacttctctgagtagcaagcctgaatatgtaaaacctgactttagatggagtaaagatccttcctccaaaagtggaaatctgttggaaaccagtgaggtaggttggacatcaaaccctgaggaattggacccgatcaggctggctctcctgggcaagtcaggtctgagctgtcaggtggggtcagccacatcacaccctgtgtcctgccaggagcctatagatgaagatcaaagaataagtcctaaagataagtcaactgctggccgtgagttcagtggccaggtttctcatcagaccacctctgaaaaccagtgtactcctattcccagcagcacagttcacagctctgtggctgacatgcagaacatgcctgctgctgtgcacgcactcttgacacaaccctctctcagcgctgctccttttgctcagcggtatttgggaacactcccttcaactggaagcaccaccttgcctcagtgccatgctggcaatgccacagtctgtggcttctcaggaggccttccctatccagctgttgcaggagagcctgtgcagaactctgtggctgtgggaatttgtctaggatcaaatatcggctctggatggatgggtacctcttccctctgtaacccatattctaataccttaaatcagaacctgctaagcacaacaaaaccttttcctgtgccgtctgttggtacaaactgtggaattgaaccatgggattcaggagtgacatcaggattggggagtgtccgagtgcccgaggagttgaagcttcctcatgcttgctgtgtcgggatcgcttcccagaccctcctcagtgtgcttaatccaactgaccgctggctgcaagtcagcattggggtcctcagcattagtgttaatggtgaaaaggtggatctttcaacatatcgttgtttagttttcaagaataaagccatcataagacctcatgccacagaagagataaaagtgctttttataccatccagtcctggggttttcagatgcacattcagtgttgcttcttggccatgttcgacagatgctgagaccatcgtacaggcagaagctttggccagcaccgtcactctcactgccattgccgagagtcctgttattgaggtagaaacagaaaagaaagacgttcttgattttggtgacttgacttatggaggctggaaagccctcccactaaaattgataaaccgaacgcatgccactgtgccaattagactgattattaatgctaacgctgtagcctggcgctgtttcacgttttccaaggaatccgtccgagctcctgtggaagttgctccttgcgctgatgtggtcactcggctagcaggcccttctgtggtcaaccacatgatgcctgctagttatgatggacaggatccagaatttctgatgatttgggttcttttccatagtccaaagaaacagatcagctcttcagatattctggactcagcagaagaattctcggcaaaagttgatatcgaagttgacagcccaaaccctacgcccgttcttagaagtgtgagtctccgagcaagagcaggaatagctaggatccatgctcccagggacttgcagacgatgcatttcttggccaaagtggcttcctcaagaaagcagcacttacctttgaaaaatgctgggaacattgaagtttatttggatatcaaggtcccagaacaaggaagtcacttttcagtggatccaaagaatctactccttaaacctggagaagaacatgaggttattgtttcatttactccaaaggatcctgaagcctgcgaggaaaggatcttgaaaatatttgtgcagccatttggacctcagtatgaggtagtgttaaaaggcgaagtcatttcttcaggaagtaaacctctgtcacctggaccttgcttagatattccatcgattttgtccaacaaacaatttctggcttggggaggagtccctctaggtagaacacagcttcagaaactagctttaagaaataattctgcatctacaactcaacatttacgactgcttattagaggacaagatcaggactgctttcagcttcagaacacttttggttcagaacagcgattgaccagtaactgtgagatcagaattcacccaaaggaagacattttcatctctgtattatttgcacctactcgattatcttgcatgttggctagactagaaatcaaacaacttggaaatcgatcacaaccaggcattaagttcacaatacctttgtctggatatggaggaacaagcaatcttattttggaaggcgttaaaaaattatctgacagttacatggtaacagtgaatggcttagtacctggcaaagaaagtaaaattgttttttctgtccgcaacactggctcccgagcagcttttgttaaagcagtaggttttaaggattctcagaaaaaagttttgctggatcctaaagtattgaggatttttccagataaatttgtactcaaggaaagaacacaagaaaatgttactttaatatataatccatcagacagaggaatcaataataaaactgcaacagaactatcaactgtatacttatttggtggagatgaaatttcaagacagcagtatcgcagggccctgttacataaaccagagatgataaaacagatacttccagaacatagtgtgcttcaaaacattaattttgttgaagcatttcaagatgagctattagtaactgaagtatatgatcttccccaacgacctaatgatgttcagctcttttatggaagcatgtgtaaaattatactttcagtaattggagaattcagagattgcatttctagcagagaattccttcagccttcttccaaagctagcttggaatctacaagcgacttgggagcttctgggaaacatggtggcaacgtctctttggatgttttaccagtcaaaggtcctcagggttctcctcttctctcacgggcggctcgcccgcctctggatcagctggcctccgaagagccgtggactgtcctacccgagcacttgattctggtagctccttctccttgtgacatggcaaaaactggacgtttccagattgtgaataactctgtgaggttactgagatttgagctgtgctggccagcgcattgcctcacagtcacgccgcagcatggatgtgtcgcgccagagagtaaactacaaattcttgtgagtcctaattcctccttatccacaaaacagtcaatgttcccgtggagtggtttgatctatatacactgtgacgatggacagaagaaaattgtgaaagttcaaattcgagaagatttaactcaagtggaacttttaactcgtttgacctccaaaccatttggaattctttccccagtatctgagccttcagttagtcatttggtcaaaccaatgacaaaaccgccttccacaaaagttgaaataagaaacaagagtattacttttcctacaacagaacctggtgaaacttcagagagctgtctagaactcgagaatcatggcaccacagacgtgaaatggcatctgtcatctttagcgccaccttatgtcaagggagttgatgaaagtggagatgtttttagagctacctatgcagcattcagatgttctcctatttctggtctgctggaaagccatgggatccaaaaagtctccatcacatttttgcccagaggtaggggggattatgcccagttttgggatgttgaatgtcaccctcttaaggagcctcacatgaaacacacgttgagattccaactctctggacaaagcatcgaagcagaaaatgagcctgaaaacgcatgcctttccacggattccctcattaaaatagatcatttagttaagccccgaagacaagctgtgtcagaggcttctgctcgcatacctgagcagcttgatgtgactgctcgtggagtttatgccccagaggatgtgtacaggttccggccgactagtgtgggggaatcacggacacttaaagtcaatctgcgaaataattcttttattacacactcactgaagtttttgagtcccagagagccattctatgtcaaacattccaagtactctttgagagcccagcattacatcaacatgcccgtgcagttcaaaccgaagtccgcaggcaaatttgaagctttgcttgtcattcaaacagatgaaggcaagagtattgctattcgactaattggtgaagctcttggaaaaaattaactagaatacatttttgtgtaaagtaaattacataagttgtattttgttaactttatctttctacactacaattatgcttttgtatatatattttgtatgatggatatctataattgtagattttgtttttacaagctaatactgaagactcgactgaaatattatgtatctagcccatagtattgtacttaacttttacaggtgagaagagagttctgtgtttgc

SEQ ID NO: 294697 - protein, 397 aa, Artificial Sequence
  derived and/or modified sequence
MAMIELGFGRQNFHPLKRKSSLLLKLIAVVFAVLLFCEFLIYYLAIFQCNWPEVKTTASDGEQTTREPVLKAMFLADTHLLGEFLGHWLDKLRREWQMERAFQTALWLLQPEVVFILGDIFDEGKWSTPEAWADDVERFQKMFRHPSHVQLKVVAGNHDIGFHYEMNTYKVERFEKVFSSERLFSWKGINFVMVNSVALNGDGCGICSETEAELIEVSHRLNCSREQARGSSRCGPGPLLPTSAPVLLQHYPLYRRSDANCSGEDAAPAEERDIPFKENYDVLSREASQKLLWWLQPRLVLSGHTHSACEVHHGGRVPELSVPSFSWRNRNNPSFIMGSITPTDYTLSKCYLPREDVVLIIYCGVVGFLVVLTLTHFGLLASPFLSGLNLLGKRKTR

SEQ ID NO: 294698 - DNA, 1194 bp, Artificial Sequence
  derived and/or modified sequence
atggctatgatcgaattgggtttcggtagacagaacttccatcctctgaaacgcaagtcctcactcctgctgaaactgattgccgtggtgttcgctgtgctgctgttttgcgaattcctgatttattatctcgctattttccaatgcaattggcccgaggttaaaacgaccgccagcgatggcgaacagaccacaagggagcctgtgctcaaggcaatgttcctggccgatacgcaccttcttggcgagttcctggggcactggctggataagcttcggagggagtggcagatggagagagcctttcagacggcattgtggcttctgcagccggaggtggtgttcattctgggagatatctttgatgagggcaagtggtccactccggaagcgtgggctgacgatgtcgagcggttccagaaaatgtttaggcatccctcccacgtgcagctgaaagtggtggcagggaaccatgacattgggttccattacgaaatgaacacctataaagttgagaggtttgagaaagtcttttcttccgagagactctttagctggaaaggtattaattttgtgatggtcaactctgtggcactgaatggagatggatgcggtatctgttcagagaccgaagctgagctgatcgaagtgagtcataggcttaactgtagcagagagcaggctcggggaagcagccgatgtggccccggtcccctgttaccaacaagtgccccagtattgttgcaacactatccattgtatagaagatcagacgccaattgcagcggagaagatgctgccccggccgaagaacgcgacatcccctttaaagaaaattacgacgtgctcagtcgggaggcgtcccagaaactgttgtggtggttgcagccacgcctggtcctttcgggccatacccactcagcatgcgaagtacatcacggcggccgtgtgcccgaattgagcgtacccagcttctcctggcgcaatagaaataacccttccttcattatgggctccataaccccgaccgattataccctgtccaaatgctatctcccccgcgaggacgttgtgctaataatttactgcggtgtggtgggatttttggtcgtgttaaccctcactcattttgggctactggcctcgcccttcttgagtggactgaacttgttgggtaagaggaagacaagatag

SEQ ID NO: 294699 - DNA, 1194 bp, Artificial Sequence
  derived and/or modified sequence
atggccatgattgagctgggcttcggccggcagaacttccaccccctgaagaggaagagcagcctgctgctgaagctgattgctgtggtgtttgctgtgctgctcttctgtgagttcctgatctactacctggccatcttccagtgcaactggccagaggtgaagaccacagccagtgatggagagcagaccacccgggagcctgtgctgaaggccatgttcctggccgacacccacctgctgggggagttcctgggccactggctggacaagctgcggcgggagtggcagatggagcgggccttccagacagccctgtggctgctgcagcctgaggtggtgttcatcctgggggacatctttgatgagggcaagtggagcaccccagaggcctgggcagatgatgtggagcgcttccagaagatgttccgccaccccagccacgtgcagctgaaggtggtggccggcaaccacgacatcggcttccactatgagatgaacacctacaaggtggagagatttgagaaggtgttcagcagcgagcggctcttctcctggaagggcatcaactttgtgatggtgaacagcgtggccctgaatggagatggctgcggcatctgcagcgagacagaggccgagctgattgaggtgagccaccggctgaactgcagccgggagcaggcccggggcagcagccgctgtggccctggccccctgctgcccaccagcgcccctgtgctgctgcagcactaccccctgtacagaagaagtgatgccaactgcagcggggaggatgctgccccagctgaggagcgggacatccccttcaaggagaactatgatgtgctgagccgggaggccagccagaagctgctgtggtggctgcagccccggctggtgctgagcggccacacccacagcgcctgtgaggtgcaccacggcggccgggtgcctgagctgtctgtgcccagcttctcctggaggaacagaaacaaccccagcttcatcatgggcagcatcacccccacagactacaccctgagcaagtgctacctgcccagagaagatgtggtgctgatcatctactgcggcgtggtgggcttcctggtggtgctgaccctgacccacttcggcctgctggccagccccttcctgagcggcctgaacctgctgggcaagaggaagaccaggtag

SEQ ID NO: 294700 - DNA, 1898 bp, Artificial Sequence
  derived and/or modified sequence
gccggctccggctgcagttcccgggtccctcggccaccgaagccaccctgccctggtgaaagggctcccgcaccgcccggtgctccccatctgcctggcgttgtgcgcagagctggaaagcatggctgttataaatgaattctgattttggggagcagatgccaacttagagcctcgtaccaatctctctgtctttaaaagatgaggtgacttggtgattttcctggaaaattataggtgcccagctaagacctgaatgccatcaccctccccagggctctgcagttttctcgtggtgaacccttgatggatttgttgttgcttgagaaatggcgatgatcgaattggggtttggaagacagaattttcatccattaaagaggaagagttcattgctgttgaaactcatagctgttgtctttgctgtgcttctattttgtgaatttttaatctattacttagcgatctttcagtgtaattggcctgaagtgaaaaccacagcctctgatggtgaacagaccacacgtgagcctgtgctcaaagccatgtttttggctgacacccatttgcttggggaattcctaggccactggctggacaaattacgaagggaatggcagatggagagagcgttccagacagctctgtggttgctgcagccggaagtcgtcttcatcctgggggatatctttgatgaagggaagtggagcacccctgaggcctgggcggatgatgtggagcggtttcagaaaatgttcagacacccaagtcatgtacagctgaaggtagttgctggaaaccatgacattggcttccattatgagatgaacacatacaaagtagaacgctttgagaaagtgttcagctctgaaagactgttttcttggaaaggcattaactttgtgatggtcaacagcgtggcgctgaacggggatggctgtggcatctgctctgaaacagaagcagagctcattgaagtttctcacagactgaactgctcccgagagcaggcacgtggctccagccggtgtggacctgggcctctgctgcccacgtctgcccctgtcctcctgcagcattatcctctgtatcggagaagtgatgctaactgttctggggaagacgctgctcctgcagaggaaagggacatcccatttaaggagaactatgacgtgctttcacgggaggcatcacaaaagctgctgtggtggctccagccgcgcctggttctcagtggccacacgcacagcgcctgcgaggtgcaccacgggggccgagtccccgagctcagcgtcccatctttcagttggaggaacagaaacaaccccagtttcatcatgggtagcatcacgcccacagactacaccctctccaagtgctacctcccacgtgaggatgtggttttgatcatctactgtggagtggtgggcttccttgtggtcctcacactcactcactttgggcttctagcctcaccttttctttctggtttgaacttgctcggaaagcgtaagacaagatgaagagcaggcgccattataaatatcaaagcccaagaaatggaactttgggcagagatcatgttagaatcaagtggatgatgagaccaattacaggccgtctctctgcacagcacagaaattctcaatcactgaaatgagtaactgcaaaataaatagttgattgtactgttctcatgctataaaagtggacaggtactctacaacaaatctgttttctcatttttatcaaatatatgtatcatcaaaggttgcatctgtacagtatgtaaatgctattaatgtcgtcactcacatgcacgacagtccttgttcccccaggaagggcctggtggccccagcacacacttgggattatgtgtatacataaataaatat

SEQ ID NO: 294701 - DNA, 1194 bp, Artificial Sequence
  derived and/or modified sequence
atggccatgatcgagctgggcttcggccggcagaacttccaccccctgaagagaaagtcatctctcttactgaagctgatcgcggttgtcttcgcggtgctgctgttttgtgagttcttgatttactacctcgccattttccagtgcaattggccggaggtcaagaccacagcctccgacggtgagcagaccacgcgcgaacccgttctgaaggccatgtttctggctgatacacacctccttggcgagttcctgggtcactggcttgataaacttcgcagggagtggcagatggagcgagctttccagacagcactgtggctgttgcagccggaagtggtcttcattctaggggatatctttgacgaggggaaatggtccaccccggaagcctgggccgacgacgtggaaaggtttcagaaaatgtttagacatccatcacatgtgcaactgaaagtagtggcaggaaatcacgatattggcttccactatgagatgaatacttataaagtagagagatttgaaaaagttttctcctctgaaaggctgttctcatggaaaggaatcaacttcgtaatggtgaattctgtggcattaaatggcgacgggtgtgggatctgctccgagacagaggcagaacttatagaggtctcccacaggctcaactgctcccgtgagcaagcccggggcagttctagatgcgggcccgggccactgctccctacttccgcaccagtcctgctgcaacactatcctctgtaccgacggtccgacgccaattgctctggcgaggatgccgccccagccgaagaaagagacatcccttttaaggagaattatgacgtgctgtcacgcgaagcatctcagaagttactttggtggcttcaacccaggctggtgctgtccggacacacccacagtgcttgcgaagtccatcatggaggacgggtgccagagcttagtgtaccttcattctcttggcggaacaggaataatccttcattcatcatgggttctatcacgccaaccgactacactctgtccaagtgctatctgccaagggaagatgtagtccttatcatctactgcggagtggtggggtttttggtggtgctgacgctcacccattttgggctgctggcaagtccatttctaagcggcctgaatttattgggcaaaagaaagacacgttag

SEQ ID NO: 294702 - DNA, 1194 bp, Artificial Sequence
  derived and/or modified sequence
atggccatgatcgaactcggctttggacgccagaacttccacccactgaaacgtaagtcatctctgctgttgaaactaattgccgtggtgttcgccgtcttgctcttctgcgagttcctcatctactatctcgccatcttccagtgcaactggcctgaagtgaaaacaacagcctctgacggtgaacagactactagagagcctgtgttaaaggccatgtttcttgcggacacccatctgctgggtgagtttttgggacactggctggacaagctgaggcgtgagtggcagatggaacgcgcttttcaaaccgccttgtggctgctgcaacctgaggttgtgttcattctcggcgacatatttgacgaagggaagtggtccactcctgaggcgtgggcggacgatgtggagagattccagaagatgtttagacacccaagccacgttcagttgaaggtcgtggccggtaatcacgacatcgggtttcattatgagatgaacacctacaaagtggagcgtttcgaaaaggtgttcagctcagaacgcttgttttcctggaagggaataaacttcgtcatggtcaattctgtggctttgaatggggatggatgcggcatatgcagtgagactgaggccgagctgatcgaggtctcacacagactgaattgtagccgggagcaggctagaggaagctctcggtgtggccctggcccactgttgccgacttcagcccctgtactcttgcagcactatcctctgtaccgcagaagcgatgccaattgttctggagaggacgctgcccctgccgaagagcgagatatcccatttaaagagaattatgacgtcctttcccgtgaggcaagccagaagctgctatggtggttacaacccagattggtcttgtcgggccatactcattccgcttgcgaagttcaccatggcggacgggtaccggagctttctgtgcccagcttctcctggcggaatcgaaacaatccttcgtttattatgggctcgatcacacccaccgactatactctgagcaagtgttacctgcctagggaggatgtggtgctcattatctactgcggggtcgtcgggtttttagttgttctcacgctgacccacttcgggctactcgcgagccccttccttagcggcctgaatctgttaggcaaacgcaagactaggtag

SEQ ID NO: 294703 - DNA, 1194 bp, Artificial Sequence
  derived and/or modified sequence
atggccatgatcgagctgggcttcggcagacagaacttccaccccctgaagagaaagagcagcctgctgctgaagctgatcgccgtggtgttcgccgtgctgctgttctgcgagttcctgatctactacctggccatcttccagtgcaactggcccgaggtgaagaccaccgccagcgacggcgagcagaccaccagagagcccgtgctgaaggccatgttcctggccgacacccacctgctgggcgagttcctgggccactggctggacaagctgagaagagagtggcagatggagagagccttccagaccgccctgtggctgctgcagcccgaggtggtgttcatcctgggcgacatcttcgacgagggcaagtggagcacccccgaggcctgggccgacgacgtggagagattccagaagatgttcagacaccccagccacgtgcagctgaaggtggtggccggcaaccacgacatcggcttccactacgagatgaacacctacaaggtggagagattcgagaaggtgttcagcagcgagagactgttcagctggaagggcatcaacttcgtgatggtgaacagcgtggccctgaacggcgacggctgcggcatctgcagcgagaccgaggccgagctgatcgaggtgagccacagactgaactgcagcagagagcaggccagaggcagcagcagatgcggccccggccccctgctgcccaccagcgcccccgtgctgctgcagcactaccccctgtacagaagaagcgacgccaactgcagcggcgaggacgccgcccccgccgaggagagagacatccccttcaaggagaactacgacgtgctgagcagagaggccagccagaagctgctgtggtggctgcagcccagactggtgctgagcggccacacccacagcgcctgcgaggtgcaccacggcggcagagtgcccgagctgagcgtgcccagcttcagctggagaaacagaaacaaccccagcttcatcatgggcagcatcacccccaccgactacaccctgagcaagtgctacctgcccagagaggacgtggtgctgatcatctactgcggcgtggtgggcttcctggtggtgctgaccctgacccacttcggcctgctggccagccccttcctgagcggcctgaacctgctgggcaagagaaagaccagatag

SEQ ID NO: 294704 - protein, 306 aa, Artificial Sequence
  derived and/or modified sequence
MPEAGFQATNAFTECKFTCTSGKCLYLGSLVCNQQNDCGDNSDEENCLLVTEHPPPGIFNSELEFAQIIIIVVVVTVMVVVIVCLLNHYKVSTRSFINRPNQSRRREDGLPQEGCLWPSDSAAPRLGASEIMHAPRSRDRFTAPSFIQRDRFSRFQPTYPYVQHEIDLPPTISLSDGEEPPPYQGPCTLQLRDPEQQMELNRESVRAPPNRTIFDSDLIDIAMYSGGPCPPSSNSGISASTCSSNGRMEGPPPTYSEVMGHHPGASFLHHQRSNAHRGSRLQFQQNNAESTIVPIKGKDRKPGNLV

SEQ ID NO: 294705 - DNA, 921 bp, Artificial Sequence
  derived and/or modified sequence
atgcctgaagctgggttccaagctaccaacgcattcaccgagtgtaagttcacttgcacatccggtaagtgtctctatctgggcagcttggtctgcaaccagcaaaatgactgtggagacaactccgacgaagaaaactgcctactggttactgagcatcccccccccggaatatttaactccgagctcgagtttgcccagataataatcatcgtggtagtggttacagtgatggttgtcgtcattgtatgtttacttaatcattacaaagtgtcaacacgctctttcattaaccgcccaaatcagtctcggcgaagggaggacggattaccacaggaaggatgcttatggccaagcgacagtgcagcgccaagactgggggcctctgagatcatgcacgcgccaagaagcagggacagatttactgcccccagctttatacagagggaccgattttctcgatttcagcccacctatccctacgttcagcatgaaatcgacctgcccccgaccattagtctatctgacggagaggaaccccccccttatcagggaccgtgtactttacagctcagagatccagagcagcagatggaattgaaccgggagtctgtgagggctcctccgaatagaacaatttttgattcagatctgatagacatagccatgtacagtggcggcccctgtccaccatccagtaacagcggcatcagcgctagtacatgttcatccaatgggcgtatggagggcccgcctccgacttatagtgaggttatgggccaccaccccggagccagcttcctgcaccaccaacgaagcaacgcccaccgaggctctagattacagttccagcagaataacgctgaatctaccattgtcccgatcaaaggaaaagaccggaagcccggcaaccttgtgtag

SEQ ID NO: 294706 - DNA, 921 bp, Artificial Sequence
  derived and/or modified sequence
atgcctgaggccggcttccaggccaccaatgccttcacagagtgcaagttcacctgcaccagcggcaagtgcctgtacctgggcagcctggtgtgcaaccagcagaatgactgtggggacaacagtgatgaggagaactgcctgctggtgacagagcaccccccacctggcatcttcaacagcgagctggagtttgcccagatcatcatcatcgtggtggtggtgacagtgatggtggtggtgattgtgtgcctgctgaaccactacaaggtgtccaccaggagcttcatcaaccggcccaaccagagcagaagaagagaagatggcctgccccaggagggctgcctgtggcccagcgacagcgctgccccccggctgggcgccagcgagatcatgcacgcccccaggagccgggaccgcttcaccgcccccagcttcatccagagggaccgcttcagccgcttccagcccacctacccctacgtgcagcacgagattgacctgccccccaccatcagcctgagtgatggagaggagcccccaccctaccagggcccctgcaccctgcagctgcgggaccctgagcagcagatggagctgaaccgggagagcgtgcgggccccacccaacagaaccatctttgacagcgacctgattgatattgccatgtacagcggcggcccctgcccccccagcagcaacagcggcatcagcgccagcacctgcagcagcaatggaaggatggagggccccccacccacctacagcgaggtgatgggccaccaccctggggccagcttcctgcaccaccagaggagcaatgcccaccggggcagccggctgcagttccagcagaacaatgctgagagcaccatcgtgcccatcaagggcaaggacaggaagccaggcaacctggtgtag

SEQ ID NO: 294707 - DNA, 921 bp, Artificial Sequence
  derived and/or modified sequence
atgcccgaggccggcttccaggccaccaacgccttcaccgagtgcaaattcacttgtacctccggtaagtgcctatacctgggctcactggtttgcaaccagcagaacgactgtggtgataactctgacgaggagaattgcctgctggtgacggagcatccaccccctgggattttcaactccgagctcgaatttgcccaaattatcattatcgtggttgtcgttaccgtaatggttgtggtaatcgtctgcttgctgaaccattacaaggtcagtactcggtcatttattaacagacctaaccaaagccggagaagagaagacggattgccgcaggagggatgtctatggccttcagactcagccgcgccaaggctgggcgcctcagagatcatgcacgctccgcgttcacgggatcgatttacggcccccagcttcattcagagagatagattctccagatttcagccaacttacccatatgtgcagcatgaaatcgacctacccccaacaatctccctgagtgacggagaggagcccccgccctaccaagggccgtgcacgctgcagcttcgcgaccccgaacagcagatggaactcaatcgggagtctgtccgggcaccacccaatcgaacaatcttcgattcagatctgatcgatatcgcaatgtattcagggggtccttgtccgccttcctctaacagcggaattagcgcaagtacatgttcaagcaatgggcggatggagggtcccccccctacatatagtgaagtgatgggccaccaccccggagccagcttcttgcaccaccagagatcaaatgcccaccgcggttcaagattgcaattccaacaaaataatgccgagagcacaattgtccctatcaaaggtaaggaccgaaaaccaggcaatctggtctag

SEQ ID NO: 294708 - DNA, 921 bp, Artificial Sequence
  derived and/or modified sequence
atgccagaggccggtttccaggcaacgaacgcgttcactgagtgcaaatttacgtgcacttcgggaaagtgtttgtacctggggagcctggtgtgtaatcagcagaatgactgcggcgacaactctgacgaggaaaactgtctgcttgtcaccgaacatcctccccctggtatcttcaactcagagctcgaattcgcacagatcattatcatcgtcgtggtggttactgttatggttgtcgtgatcgtatgcctcttgaaccactacaaagttagcactagaagcttcatcaaccgtcctaatcagtcaaggaggcgagaagatggtctcccccaggaaggctgcctgtggccctctgattcagctgctcccaggctcggggctagcgagatcatgcatgctcctaggagtcgcgatcgatttacagctcctagcttcatccagagagatcggttctcgaggttccagcccacatatccctacgtgcagcacgaaatcgatttacctcccacgatatctctgagtgacggtgaggagccccctccctaccaggggccttgcacgctgcagctgcgcgatcccgaacagcagatggaactaaacagggaatccgttcgggcaccacccaataggaccattttcgattccgacctcatcgatatcgccatgtacagcggcggtccctgccctccatcatccaactccggaatttccgctagcacatgttcctcgaatgggagaatggaaggtccacctcccacctactcggaggttatgggccatcaccctggcgcaagtttcttgcaccatcagcggtccaatgcccataggggttcacggctccagttccagcaaaataatgccgagagtacaattgtgcccatcaaggggaaagatagaaaacctggtaacttagtttag

SEQ ID NO: 294709 - DNA, 8686 bp, Artificial Sequence
  derived and/or modified sequence
gctgggtctccgagccccggaggaagcaggcgtgtgttgaatttctctctgcccctcaccttggaataaacaggaagcgacaagcacccagcccggcccggcacttgcctttgtgaaggggtctgccctgcacagcctttaggaagcttcctcgggaccccttcccggtgcgccgccccgggtgggcctgggggcgcgccctcggttcaagctctacgttcgtgacatcaaacctcctgttgggccatttccgagaactcccatcagtttctgtatagtgtaaaagtttcagaggcggagcacagagagctgcggctgggacaaggagcacccgcgtgcaggtgcgaccctgcaggatgctggcagcggcgtggccaggggcgcccgtgttctgagggcctgagggccagcccctccacccgcgccatggcctccgcgccctggctggacggctgacgggagcagggaccgccgccgcccaggtgccacacccaggtaccgcccgcccgcgcgagagccgggcaggtgggccgcggatgctcccagaggccggcccagcagagcgatggacttggacaggctaagatggaagtgacctgagcctcgcccggcggcttcctcgacgggacagcgcaagagttggagcacaggcttgtccggggagcagtatgccggaagctggttttcaggccacaaatgctttcacagagtgcaaattcacctgcaccagtggtaaatgcttgtatcttggttcgctggtctgtaaccaacagaacgactgtggggacaacagtgacgaagagaactgtctcctggtgaccgagcacccgcctccgggcatcttcaactcggagctggagttcgcccaaatcatcatcatcgtcgtggtggtcacggtgatggtggtggtcatcgtctgcctgctgaaccactacaaagtctccacgcggtccttcatcaaccgcccgaaccagagccggaggcgggaggacgggctgccgcaggaagggtgcctgtggccttcagacagcgccgcaccgcggctgggcgcctcggagatcatgcatgccccgcggtccagggacaggttcacagcgccgtccttcatccagagggatcgcttcagccgcttccagcccacctacccctatgtgcagcacgagattgatcttcctcccaccatctccctgtccgacggtgaagagccacctccttaccaggggccctgcaccctgcagctccgggaccctgaacagcagatggaactcaaccgagagtccgtgagggccccacccaaccgaaccatatttgacagtgatttaatagacattgctatgtatagcgggggtccatgcccacccagcagcaactcgggcatcagtgcaagcacctgcagcagtaacgggaggatggaggggccaccccccacatacagcgaggtgatgggccaccacccaggcgcctctttcctccatcaccagcgcagcaacgcacacaggggcagcagactgcagtttcagcagaacaatgcagagagcacaatagtacccatcaaaggcaaagataggaagcctgggaacctggtctgattccttccaacgtgcacttcagctggagaaagaaaccaagaagggaagcggccgctgggcccctcctgcgcacagtgttgttcagtttcacatggtacaaataagtaaaaccaaatgagcaaacacggtctttgtttctgattccttttaggggaattgcatgcaaactagactgaaatgatacaaacttccatctggtctgaccgcaaacagtgtttatttggggacaggggttgggatgggggtgtgggcaggggaaaacagagaacgggatgctttgaagataccatgaaataaaacccacagaggtatttgatgtatttaattgtgaaaggagactttgcagataaatgaggccagaatggcatgttttataattaactgaataaagaaggaagcattattatatattattgtggggaagaaccagccagttcgctttttctcctaaggtgtggaacttttattttgttttaaaaatatgaatcaaaattcctgtgttgtgtgccaaggtataaagtggagaagttagatgagtgcaaggagctcctttgtgttgtgatgatgtgttttaaaagttgcactatcttaatgttgaaaatatttacaagggaactgttttacgtgaagttctgtatgttgtcttttcacctgtggattgtaatcaggcccaaggaatatcctggagtggtccccagaagcatccaagaaaagatatttggggacgtagcctaacattttaccaacttacgtaaatcaaaaaagtcattattgttgcaggagtttgcatcaaatagcagtgcatcgctgaagcttttggagacttttggatggaagataagatagggaagattaagttccagcatttctgacttgttattttgagttactctgctactcttaggctgcatagtttatgagaaaatgaacacatgcatttatggatccagtatcatgcagtgctgccctcatcctccagcagtgcaatttcttcagtaatttagatttttttcactatagcatgaaatatattcaaatacataccttattttatgcaataaattgtttaaaatgcaaggtggttattctgcatactgttgaaatatgtgactcctcagtatattcccattgcctctccccctttcctcgacagcttagttcagttctgcagggctgctcagttcacaggaggctcccagcagccaccccacatccagcctacacagaacttcgtgtgggagtggtgtgggtggtggtttcttatgctttggaagcccctagaaataatgacggaagaatgccatgttgctgatcgtggtaataagccattgtgggttattgtatgtcactagtattagcatagcattcttaaaggaatgcagtgctcaaaacctacccaaattcccgcaggattctaccaaacccttccccaggccagcttttgtactgaaggcaagaactggacagtcagagaacagtggagggggcaagtgactgaagagcaccgggtaaaaagcacaacatgcagttaaaatgcaactagaaaactaattttaaatattgttagttttaatattcctgatatttacaaatattcattcttatatacaatgaaaaaaataactttcttctgcagatgtaagcactggcttttataagagcagcagccaacacgtttagcagacactgcgcgtggagaagggcttatctgcagtacactctgccatgtggagggtgggcctctgtggcctcttcacataacaagatgagctggaatgatgattccatgactcccacctatgcagccttaaagccaaatccgcgtgtgtgtgtttgtgtctgtctgtgggtctcgaaggtgatccgtcggtgcggtggctctgtgctgtaactggagagactgttccaaaccccaagagttgtctgatcctagtctgttcccttctgcttcttacctctgtagataggtcactggtttttgtttgtttgttttgaggattggaatttccattacattcatcctttgcacacagtaacatccacagaactagtccaactcttaaaaggagagaggaaaaacacaggcaccagttgtcagctcatgcttacaacctgtgtggaagtatatacagttgagagtcacagtggaggttctgagactggattcagtcttgttccagtgacagttggaaggcctctgctggagagacaccagctctcagggcagagattggcttggggccagaaggaccctccccaaccctggagacaccctgaaggttcactggctctccagattagcctctcttcctctgtcaggcaaagatgaggagcccgtgttcccatcgggccctgctggcagggacttgcagtggattcttggtcaggtgtgcccacagatgcggaggcgaggtgagtgattccatcatttcagttctcacctgcagttttggtgaagcaggagatgcaccccacagctctagctctcaaatggcttcacagtccttacttctctacctgcctcaagaaggggctcagagcagagacttgtgaattccttagtaactgtgagtatatgaatgtgttgcacatgtccacagtattggcgagataattacataattcagatacctttaatcatctttcaagaaagaggctcctcccattcaaccaccctagagaactgcctttgttaaatagttatttaaagactcatacatatcaaaccatgactttgaaaggtcttcgaggctggggctctgtaatgaattagtttaaaagccaaggtcataacatgaattgatggtcaatttcccttcagcagaaggaaaaggtgatttagatcagtagctcttttgaaggttgtggctgacctgttcataccgtgtcgcctcatggctagtgtggcgttgaaagagtagcgactgggaagatacaacttacacagtggggcctattgttctttcaagaaccctttttttagcttatagaacccatgggtccagtttagtaacgagtgatttaggcaatcaatgataggtttataatcttagattattccagcaaagtgtggattgcattgttaggaagaacatttggtgggaatgaacactcctgggcataccgctgacttttgtcccttgttcccggtgtaggagacccaaggcatcttgaatcccatctataagaacacaatcttccagcatacgtttgctttttcagaaactctagcattctctttaaatactgacgcaatccttaatggaaaagagatttcatgaagcaaattatgtatttcaatagttcttctatttttagtgtccaaaatttactaatacagaagcttgacaagcatgtcctcaccctccccaccacataaacacatggacacacacccaagccacaagaaatcccaagagagcagaagcgaatttttaaaagatttatcgtgaggactgcatttccattcactaattttggctcaaacttatgaggcaggaaataggggccaacagtaaatgggggaggcctcctgacaccagcagaggaattttgtacccaggcgaggacttcttgaacttctgcgtatctccgtttgatctctttcacctttatttcatcttcataagaatgagaaaggctcaaaaggaagcacttttagaaatcttctctgacctagaagaatccatccaaatccctgccttcctctctgaaccaacagttcccttctctgacaggggccatcctctatcttccatccagcggctcttctttttaggaaggctctggtgcagagcacttcaaatatgtcctcaggccagatactgattgctagtagagagacacccggcacccagtccgaagccctccctcaaaggaccggctcatggcgttggtcactggcaggctcagagacattctgctgtgggcgcagggagcccggccccccatgcagccatgactggatgcgcccccatctcgggggcttgctgcactgcttgtttattgaattttgctacttagaatggcaacattaactttgtgtaccattcattttttaaaaattttccaaagctcggcagtgtatgaaagaaaaaactgggaaagatacttggtttctgttaacttttgtgttgcttgcttaagtgattaaagccagtgcttggagccaagccttcatgccacgaacatgctccacagcctgccctttgctctcctgctcacactgaccaagaatgccgcgtgcttggcctactgaggtgaaaggacaattgaatgacaggtgggcaaagggagaacttccccttcttggtgcgaggaaagtcacaaatttaaaaatgttgcttccagcccagatcctaaatgctagttctcagcagctgcgtggcttaccgttcgccatttccaccaccgccagctgccagcaccgctacagatcacagagatgtgaacagacaatggaaagcactcttagccttgcagtggtctacattttttaggaaccaatatttcagcattctttattacccggcacgctgtgtcctttgcagagttcaagtttatgttactgccagggtcagacagtcatttgctgctgctgctgctgctgctgcttctcgaactggatgcattaggaagctgctgtctgagtgtaggaatgtcttgctaagaaagcaatgtcttccttcatccttttctttcttccctctgcgtgtccttgtttttgtgtaatgcgggagagggttagagctatagagattatatatacactatccgtgcacattatatatatgtagatatacccctatcatgtcagagatctgcatgtcagtttttcagcaactaaggtgcctcatgttctgagttcagcagatataggaaccaagccgccccctcctgcacttgatgctcccacctttgttgtgcctcacttaaaatggtgcttttttcagttgtctgtcttttcttatgtttttatttgtaaggtgctgtatataagttgaatatattatgcacatatcctacccaatgggtagaacaaaaagttgttaatactgtaatataatgtatagatgataccaattttaacagaaatggcatagaatttgtgaatgcctatgtgctttgtcctcttttgtaaggaaatttgcaaatggatgcatacagattaaagtctatgtagtttattttcctattaaatatcaatattataacacaagagaaagaagtgtgaacaaacaagcaacagtttatgaccagcgtatatatagcaatggaaagttgcatctttgctgtgaaaacactttaaagaaaatactttttaaaaaatcccacagctttttggttgccactagacgcttcttattttaatcattttagtaatgctcagctggaccagtgttagttatatttgagtcagaaaaatgttgtttttcaacttgctttataatctcctgcatctatctcctgctgtagcatcacgaaggtgtcaggcaacagtgaaaagtgcacatttttgttgttgcagaaactgtgtcagaggaataagtaaatcagcctgcagcagaagactttgttcagctccagaggcatctgtgaccgtctgtgtccaagtctctctgtgcctttttcttttacaaactgaagctgtggagccaatgaagtaacagtagagattgtagggaaagaatacctcaggaaaaacaaatacacttacaagaagaccctgttcttagaaaatgtgtttagttatgggttagcactagaagagacttggctgtcagccagccaagtgaaggacctctcatccattcccattcatgtcccatcataatacggacccaaaaagcaaactcggttttgccatcagttagaaattacgttttggattgtatattgttacatctctcttccggcttagtttttagtgtctgattgtgacctctgcatttatcttcaaataccctaattttaaaacaaaagaacaagaaaagtttataacaccatgttcactaaaaccacggttgaatcttgggtgtgggcatcctttcgagtgttgtccataagagcagttcgtggaattttgcccatctgacccatattatcagcttattctgccaccagagtagagtctaataaattccaaagtttttatttgctccatggtgtatgttctgactttgaaaatgtcagattctataatcatacccctaacatccaggaaacaaatgacagattatctttaaactgaaattgactctacaatgcaacccttaatgctgaatggattaaaaaagtcagcccttttagtatctgtttgaaagggccgtaaaaagttgacacttttgttgttgtggatcctgcgtgtctagacccacgtgttgtttccatcgtatactgtagggtgcaccccttgggattcatcattaagaactgaggctcactgttgtcagaaacaaagctcccaccccccaggttcaaccttgtgggagaactgttgagcatgagaatgttctagactcagaggtactaaaatttgttaccacatcattgcttcctttctacaggacgaattgaggcttaaactttactgttaatgatactggttcattttaatgtgcttgttggtatgttgctatttttcatttcatagctttcaaaaatcatgctaattgtatacttgtctagtttaaggctattttaaaatatgtacaatactattcacagcatttagttcgtttaatttttattataaagcaatctactaaaaaagtacaactgtatttgaacttttcaatagttgtttgtgagctatgataatcaaaagtcattaaagtcttttttaacaaacattcgtgcttacttttcaacataattcccagttatatacagaaaaagatttccacctgtcacgtatctgcctcttttacctgagcaatggtgtagttcttagacctaaggtctgtaattgcaatacttttaaagaaagatgttgctctaagtgctgtttgttagttatgaaatcagatttttctgcttgttcttaatgctgtggtcaaaccatagcacaaaatcattaaaaataatcagcggcatac

SEQ ID NO: 294710 - DNA, 921 bp, Artificial Sequence
  derived and/or modified sequence
atgcccgaggccggcttccaggccaccaacgccttcaccgagtgcaagttcacctgcaccagcggcaagtgcctgtacctgggcagcctggtgtgcaaccagcagaacgactgcggcgacaacagcgacgaggagaactgcctgctggtgaccgagcaccccccccccggcatcttcaacagcgagctggagttcgcccagatcatcatcatcgtggtggtggtgaccgtgatggtggtggtgatcgtgtgcctgctgaaccactacaaggtgagcaccagaagcttcatcaacagacccaaccagagcagaagaagagaggacggcctgccccaggagggctgcctgtggcccagcgacagcgccgcccccagactgggcgccagcgagatcatgcacgcccccagaagcagagacagattcaccgcccccagcttcatccagagagacagattcagcagattccagcccacctacccctacgtgcagcacgagatcgacctgccccccaccatcagcctgagcgacggcgaggagccccccccctaccagggcccctgcaccctgcagctgagagaccccgagcagcagatggagctgaacagagagagcgtgagagccccccccaacagaaccatcttcgacagcgacctgatcgacatcgccatgtacagcggcggcccctgcccccccagcagcaacagcggcatcagcgccagcacctgcagcagcaacggcagaatggagggccccccccccacctacagcgaggtgatgggccaccaccccggcgccagcttcctgcaccaccagagaagcaacgcccacagaggcagcagactgcagttccagcagaacaacgccgagagcaccatcgtgcccatcaagggcaaggacagaaagcccggcaacctggtgtag

SEQ ID NO: 294711 - DNA, 3121 bp, Artificial Sequence
  derived and/or modified sequence
ctctcgggtggactcccggagcggcggcggcggcggcggtggcagactgcgagtcacgtgcgacagaggaggcggagcacggcggccgggtgggtggagaaaacaaagcccccagctgtcagcagaggaaggaggcgacagcgccggagcagtgtcctgtttcccagaggaacagttcatttcaacagccagggagaaagcctggatgctcaagttggggaatggcggtcaatgtgtattctacctcgataacccaagagactatgagcagacatgacatcattgcatgggttaatgacatagtatctttaaactacacaaaagtggaacagctttgttcaggagcggcctattgccaattcatggacatgctcttccctggctgcattagtttgaagaaagtaaaatttcaagcaaagctggaacatgaatatattcacaattttaaacttctgcaagcatcatttaagcgaatgaacgttgataaggtaattccagtggagaagctagtgaaaggacgtttccaggacaacctggattttattcaatggtttaagaaattctatgatgctaactacgatgggaaggagtatgatcctgtagaggcacgacaagggcaagatgcaattcctcctcctgaccctggtgaacagatcttcaacctgccaaaaaagtctcaccatgcaaactcccccacagcaggtgcagctaaatcaagtccagcagctaaaccaggatccacaccttctcgaccctcatcagccaaaagggcttcttccagtggctcagcatccaaatccgataaagatttagaaacgcaggtcatacagcttaatgaacaggtacattcattaaaacttgcccttgaaggcgtggaaaaggaaagggatttctactttgggaagttgagagagatcgagctactctgccaagaacacgggcaggaaaatgatgacctcgtgcagagactaatggacatcctgtatgcttcagaagaacacgagggccacacagaagagccggaagcagaggagcaagcccacgaacagcagcccccgcagcaggaagagtactgacccaccccggctgctcttgacacttccattgtgtgtgggaacgtttcttctggagaattggaacatgtgtggccccaagctcaacagaaaccagttgttcccaatctgccgttaccatcaacgcactgttgcatatgccagccactgcgcttggttcccattttctttgccaaggtgtattagcggacggccctctggccacctacccgagagatcgtagggtcacatacatccaacttcaccacttggctgcttgagattggttctgctcttttcttcatttctttccagaacaactctttcccaccccaacaccactgccaccacccctctttttatcctggtgtgaaacaatggtaatttgatatatggtatttatattggcatttttcaacccagtgtcactagatgtcacacacatttgtggtgctttgatgtttgcaagtctaacctctgaacataaatttggtcaaataattggaacaaagggaaacagatacttgatatgaaagccataatgacggtgacttgtgtcgtgggggaaaacataaggtcattttctccctctactcacaatactaaagggaaaaaatggattcaaagctaggatttcagggcccagcagtgttcctccatcagcatgttagacaactacacagtatgttgttagttttgaaagacattcactcaaggaaaacaccatctcaactttgcccgctcaccatgtcccttgcccccatgtagcccatttcccaggttatgctcttttctttctcagggtcctctttggtgggcagccactccccgagatgttgccatcagttttctgcagtccaaagagggtatggttaggtacgggtcttcctgcctcattcctcttcctctttgtgtaggtttcagccacaaaactgtcattcactctaggggacccctactaaagggtaacttcaggtgtgcagccctgagctccaaggctctgcaccatgccacacacttgctgtaaggctagaagtgaagaccttattaataggagcataattgcgagggagaatcatggttctgcagtctggtgtagacactggaataacagcacagaaaaatctatgactcccaatatcttctagaataaagaattttccctctttaacacaagggccctccttgtcattgaccttagctaaaccatggcaattcataaatagaggaaacattaatgaattaaaagcattccttattttttaactaatatttgtacattttcttagtctctttccaagtctttgcctcttttttttctttatttttattttttcctttgacagatggtatcccttcctggatcattcatttcaccttggtttctaactttaggtttactttcacttgttatttgacttagcaggtgcaacaaaaacaagaaacaaatgtgcccaccccactttccgcttaactgaaaagcttaaaataaatttctgaattatgtatcctgaagctttgaaatttctttattaatcgatgaaatatgaattctaaattctagcattgaagcttttcaccaaaagaagtctctccaaaataaatcttttgcagcaaagtgatatttattgagttatgtggaaaagatggcttgtatttttcagattattacaacacactgtgcagaattagacagatgttccgtggtgtttggtttccctttcttctctctcctgctcactctgcattatagcagcagcttatttctctaaggctggacagcctggctctcggcagtgacgtcctcccacacctggtcacaagtagtagtggctgtgctatacccagcatcatgcttaacagcgtgttgcccttctgagcctgttgtactcactgatctctttaaaaacaaaaaatagctcttgtaaaaggtcacaataactctatgcacctgatactgcagtggttcctaggccattcttcatctgctctggacatctcagtcatacccaatgctcagtggatcatgaccaaactcctgtcatgtggatgcacgtgagtgggtagca

SEQ ID NO: 294712 - protein, 100 aa, Artificial Sequence
  derived and/or modified sequence
MNTEAEQQLLHHARNGNAEEVRQLLETMARNEVIADINCKGRSKSNLGWTPLHLACYFGHRQVVQDLLKAGAEVNVLNDMGDTPLHRAAFTGRKICSQGS

SEQ ID NO: 294713 - protein, 1144 aa, Artificial Sequence
  derived and/or modified sequence
MLRHLTDTFTIYAIDLGALTKIRIRHDNTGNRAGWFLDRIDITDMNNEITYYFPCQRWLAVEEDDGQLSRELLPVDESYVLPQSEEGRGGGDNNPLDNLALEQKDKSTTFSVTIKTGVKKNAGTDANVFITLFGTQDDTGMTLLKSSKTNSDKFERDSIEIFTVETLDLGDLWKVRLGHDNTGKAPGWFVDWVEVDAPSLGKCMTFPCGRWLAKNEDDGSIIRDLFHAELQTRLYTPFVPYEITLYTSDVFAAGTDANIFIIIYGCDAVCTQQKYLCTNKREQKQFFERKSASRFIVELEDVGEIIEKIRIGHNNTGMNPGWHCSHVDIRRLLPDKDGAETLTFPCDRWLATSEDDKKTIRELVPYDIFTEKYMKDGSLRQVYKEVEEPLDIVLYSVQIFTGNIPGAGTDAKVYITIYGDLGDTGERYLGKSENRTNKFERGTADTFIIEAADLGVIYKIKLRHDNSKWCADWYVEKVEIWNDTNEDEFLFLCGRWLSLKKEDGRLERLFYEKEYTGDRSSNCSSPADFWEIALSSKMADVDISTVTGPMADYVQEGPIIPYYVSVTTGKHKDAATDSRAFIFLIGEDDERSKRIWLDYPRGKRGFSRGSVEEFYVAGLDVGIIKKIEVLYEMTVWTGDVVGGGTDSNIFMTLYGINGSTEEMQLDKKKARFEREQNDTFIMEILDIAPFTKMRIRIDGLGSRPEWFLERILLKNMNTGDLTMFYYGDWLSQRKGKKTLVCEMCAVIDEEEMMEWTSYTVAVKTSDILGAGTDANVFIIIFGENGDSGTLALKQSANWNKFERNNTDTFNFPDMLSLGHLCKLRVWHDNKGIFPGWHLSYVDVKDNSRDETFHFQCDCWLSKSEGDGQTVRDFACANNKICDELEETTYEIVIETGNGGETRENVWLILEGRKNRSKEFLMENSSRQRAFRKGTTDTFEFDSIYLGDIASLCVGHLAREDRFIPKRELAWHVKTITITEMEYGNVYFFNCDCLIPLKRKRKYFKVFEVTKTTESFASKVQSLVPVKYEVIVTTGYEPGAGTDANVFVTIFGANGDTGKRELKQKMRNLFERGSTDRFFLETLELGELRKVRLEHDSSGYCSGWLVEKVEVTNTSTGVATIFNCGRWLDKKRGDGLTWRDLFPSV

SEQ ID NO: 294714 - DNA, 3435 bp, Artificial Sequence
  derived and/or modified sequence
atgttgcgacacctgaccgacaccttcacgatttacgctatagatctgggcgccctgaccaagatacgtattagacacgataataccggtaatagagccggctggtttctcgacagaatcgatattaccgatatgaataacgagataacctattactttccctgtcaaagatggctagctgtggaggaagatgatggtcagcttagcagggagctgttacctgtcgacgagagttatgttctgccacaatcggaggagggacgcggcggcggggataataacccactggataaccttgccctggagcaaaaagacaagagcaccactttttctgtgactatcaaaaccggcgttaagaaaaatgctggcacggacgctaacgtgtttatcacactgttcggcacccaggacgatacgggtatgaccctgctcaagtctagtaagactaattcagacaagttcgagcgagattccatagagatcttcactgtagagaccctggacctaggagacctgtggaaggtgaggctgggacacgataacacaggaaaggcaccggggtggttcgtggattgggtagaagtcgatgccccctccctcggaaaatgtatgacctttccgtgtgggaggtggctcgcaaaaaatgaagatgacggatccattataagggatctctttcacgccgagctgcagacccgtctctatacaccctttgtaccttatgaaatcaccctgtatacctctgacgttttcgccgctggcactgacgccaacatcttcattatcatctacgggtgtgacgccgtgtgcactcaacaaaaatatctgtgtaccaataagagagaacaaaagcagttcttcgagaggaagtccgccagccgattcattgttgagctggaagacgtgggcgaaattatcgaaaaaattcggattggtcacaacaacactggtatgaatccaggatggcactgcagccatgttgatatccgacggttgctccccgacaaagacggggccgaaactctaactttcccctgcgatagatggcttgcgaccagcgaagacgacaaaaagactattcgggagctggtgccctatgatatttttactgaaaagtatatgaaagatggctctttgcgccaggtgtacaaagaggtcgaggagcctctggacatcgttctctattcggtacaaatcttcacaggcaacattccaggggctgggacagatgcgaaggtgtacattactatttatggggacctcggagatacgggcgagagatatcttgggaaatccgaaaaccggaccaacaaatttgagagggggacggctgacacatttattatcgaggctgcagatctgggggtgatctacaagatcaaacttagacatgataattcaaagtggtgcgcagattggtatgtcgaaaaggtggagatttggaacgataccaatgaggatgagttcctgttcctctgtggaaggtggttgagcttgaagaaggaagatggccgactggaaaggctcttttatgagaaggagtacactggggacagaagctctaactgctccagcccagcggatttctgggaaattgccctgtcttctaagatggccgatgtggatatctccaccgtgacaggccccatggcagattacgtacaagaaggccccataataccttattatgtgtctgttactaccggcaaacataaggacgccgccactgactccagagccttcattttcctcatcggggaggacgacgagcggagcaagaggatttggctggattacccgaggggaaaaagaggattcagtagaggaagcgtggaggaattttatgttgccggcctcgatgtcggcattattaaaaaaatagaagtgttgtatgagatgacagtgtggacaggcgacgtggttggcggcgggacagatagcaatatctttatgacactttatggaattaatggcagcactgaggagatgcagctggacaaaaagaaggcacggttcgaacgcgagcagaatgatacattcatcatggagatattggatattgcccccttcactaagatgcgaatacggatcgatggacttggctcacgccccgaatggtttttggagagaatactcctgaagaatatgaacactggtgatcttacaatgttctactatggagattggctgtctcagcgcaagggtaagaaaaccctggtgtgcgaaatgtgcgccgtgatcgatgaggaggaaatgatggagtggacttcttacaccgtggctgtaaagacaagcgacattttgggcgcaggtactgatgcaaatgtgttcatcatcatattcggtgagaacggcgatagtggaactctagccctgaaacaaagcgctaactggaataaatttgaaaggaacaacacagacacatttaactttcccgatatgctttcactcgggcatctgtgtaaattgcgggtgtggcacgacaacaaaggtatctttcccggctggcatctgtcctacgtagatgtgaaggataacagtcgagacgagactttccactttcagtgcgattgctggttatctaagtccgagggagatggccagacagtcagagacttcgcctgcgccaacaacaagatctgcgacgagctagaggaaactacatacgagattgtgattgaaactggaaatggaggcgagactcgcgagaatgtgtggctgatcttggagggacggaaaaacaggtccaaggaattcttaatggagaatagtagcaggcaacgagcgtttcggaagggaactactgacacattcgaatttgactccatctacctgggcgatatagcatccttgtgtgtggggcatcttgctcgggaagaccggttcatcccaaagcgggagttagcttggcacgtaaagaccattactattacagaaatggagtatggaaatgtatactttttcaactgcgactgtttgattcccctgaagaggaagaggaaatattttaaggtgttcgaggtaacaaaaactacggagagttttgcaagcaaggtccagagtttagtgccggttaaatatgaggtcatagtcaccacaggctacgagccaggggctggcactgacgcaaacgtcttcgttacaatatttggagctaatggcgacactggcaagagagagttaaaacaaaaaatgcgtaacctgttcgagaggggcagtactgatcggttttttctggaaacccttgaacttggagagctaagaaaagtgcggctcgagcacgactcctccggatactgttctgggtggctcgttgaaaaggtggaagtgacaaacacctctactggggttgccactatctttaactgtggcaggtggctggataagaagaggggcgacggcctgacctggcgcgatctcttcccaagtgtctag

SEQ ID NO: 294715 - DNA, 3435 bp, Artificial Sequence
  derived and/or modified sequence
atgctgcggcacctgacagacaccttcaccatctatgccatcgacctgggcgccctgaccaagatccgcatcagacatgacaacacaggcaacagagctggctggttcctggacagaattgacatcacagacatgaacaatgagatcacctactacttcccctgccagcgctggctggccgtggaggaggatgatggccagctgagccgggagctgctgcctgtggatgagagctatgtgctgccccagagcgaggagggccggggcggcggggacaacaaccccctggacaacctggccctggagcagaaggacaagagcaccaccttctctgtgaccatcaagacaggagtgaagaagaatgccggcacagatgccaacgtgttcatcaccctgtttggcacccaggatgacaccggcatgaccctgctgaagagcagcaagaccaacagcgacaagtttgagcgggacagcattgagatcttcaccgtggagaccctggacctgggggacctgtggaaggtgcggctgggccatgacaacacaggcaaggcccctggctggtttgtggactgggtggaggtggatgcccccagcctgggcaagtgcatgaccttcccctgtggccgctggctggccaagaatgaagatgatggcagcatcatccgggacctcttccacgccgagctgcagacccggctgtacaccccatttgtgccctatgagatcaccctgtacaccagtgatgtgtttgctgctggaacagatgccaacatcttcatcatcatctacggctgtgatgctgtgtgcacccagcagaagtacctgtgcaccaacaagcgggagcagaagcagttctttgagaggaagagcgccagccgcttcatcgtggagctggaggatgtgggggagatcatcgagaagatcagaattggccacaacaacacaggcatgaaccctggctggcactgcagccacgtggacatccggcggctgctgcctgacaaggatggagctgagaccctgaccttcccctgtgaccgctggctggccaccagtgaagatgacaagaagaccatccgggagctggtgccctatgacatcttcacagagaagtacatgaaggatggcagcctgcggcaggtgtacaaggaggtggaggagcccctggacatcgtgctgtacagcgtgcagatcttcaccggcaacatccctggagctggaacagatgccaaggtgtacatcaccatctacggggacctgggggacaccggggagcgctacctgggcaagtcagaaaatagaaccaacaagtttgagcggggcacagctgacaccttcatcattgaagctgctgacctgggcgtcatctacaagatcaagctgcggcatgacaacagcaagtggtgtgccgactggtacgtggagaaggtggagatctggaatgacaccaatgaagatgagttcctgttcctgtgtggccgctggctgagcctgaagaaggaggatggccgcctggagcggctcttctatgagaaggagtacaccggggacaggagcagcaactgcagcagccctgctgacttctgggagatcgccctgagcagcaagatggctgatgtggacatcagcacagtgacaggccccatggctgactatgtgcaggagggccccatcatcccctactacgtgtctgtgaccaccgggaagcacaaggatgctgccacagacagccgggccttcatcttcctgattggagaagatgatgagaggagcaagaggatctggctggactacccccggggcaagaggggcttcagccggggctctgtggaggagttctacgtggccggcctggatgtgggcatcatcaagaagattgaggtgctgtatgagatgacagtgtggacaggagatgtggtgggcggcggcacagacagcaacatcttcatgaccctgtatggcatcaatggcagcacagaggagatgcagctggacaagaagaaggccaggtttgagcgggagcagaatgacaccttcatcatggagatcctggacatcgcccccttcaccaagatgaggatcagaattgatggcctgggcagcaggcctgagtggttcctggagcgcatcctgctgaagaacatgaacacaggagacctgaccatgttctactacggggactggctgagccagaggaagggcaagaagaccctggtgtgtgagatgtgtgctgtgattgatgaggaggagatgatggagtggaccagctacacagtggccgtgaagaccagtgacatcctgggcgccggcacagatgccaacgtgttcatcatcatctttggagaaaatggagacagcggcaccctggccctgaagcagagcgccaactggaacaagtttgaaagaaacaacacagacaccttcaacttcccagacatgctgagcctgggccacctgtgcaagctgcgggtgtggcatgacaacaagggcatcttccctggctggcacctgtcctatgtggatgtgaaggacaacagcagagatgagaccttccacttccagtgtgactgctggctgagcaagtcagaaggagatggccagacagtgcgggactttgcctgtgccaacaacaagatctgtgatgagctggaggagaccacctatgaaattgtgattgaaacaggaaatggaggagagaccagagaaaatgtgtggctgatcctggagggcaggaagaacagaagcaaggagttcctgatggagaacagcagccggcagagggccttcaggaagggcaccacagacacctttgaatttgacagcatctacctgggggacatcgccagcctgtgtgtgggccacctggccagagaagatcgcttcatccccaagcgggagctggcctggcacgtgaagaccatcaccatcacagagatggagtatggaaatgtgtacttcttcaactgtgactgcctgatccccctgaagaggaagaggaagtacttcaaggtgtttgaggtgaccaagaccacagagagctttgccagcaaggtgcagagcctggtgcctgtgaagtatgaagtcatcgtgaccaccggctatgagcctggagctggaacagatgccaacgtgtttgtgaccatctttggagccaatggagacaccgggaagcgggagctgaagcagaagatgaggaacctgtttgagcggggcagcacagaccgcttcttcctggagaccctggagctgggggagctgaggaaggtgcggctggagcatgacagcagcggctactgcagcggctggctggtggagaaggtggaggtgaccaacaccagcactggagtggccaccatcttcaactgtggccgctggctggacaagaagagaggagatggcctgacctggagggacctcttccccagcgtgtag

SEQ ID NO: 294716 - DNA, 3755 bp, Artificial Sequence
  derived and/or modified sequence
gatactttgtggaggggttatgagagaattgcaggcagggccccagcacctagagcccatgggccagctgacccacaggaacaaacagagaatggcgttgagtggcagatgctgaggcacttgacagacaccttcaccatctatgccattgacctgggggccctgaccaagattcggattcgccacgacaacacaggcaacagagcaggctggttcctggacagaatagacattactgacatgaacaacgagatcacgtactactttccatgccaacgttggctggcagtggaggaagatgatggccagctgtccagggagctgttgccagtggatgagtcctatgtgctgccacagagcgaggagggtaggggaggcggtgacaacaaccccctcgacaacctggccctggagcagaaagataaatctaccacattctcagtgaccataaagactggggttaagaagaatgcgggcacagatgctaatgtcttcatcacactctttggcacacaggatgacactggaatgaccctcctgaagtcctccaagacaaacagcgataagtttgagagggacagcattgaaatcttcacggtggagacgctggatctgggagacctgtggaaagtccggcttggccatgacaacacaggcaaggccccaggctggtttgtagactgggtagaggtggatgccccatctcttgggaagtgcatgacgtttccctgtggccgctggctggccaaaaacgaagacgacgggtccatcatcagagacctcttccatgcagagcttcagacgaggctgtacacaccatttgttccttacgagatcaccctctacaccagtgatgtctttgctgctgggacagatgccaacatcttcatcatcatctatggctgcgatgccgtgtgcacccagcagaagtatctgtgtaccaacaagagggaacagaagcagttctttgagaggaagtctgcctcccgcttcatcgtagagttagaagatgtgggagaaatcattgaaaaaattcggattggccataataacacgggcatgaatcctgggtggcactgctctcacgtggacatccgcaggctcctcccggataaagacggtgcagagaccttgactttcccatgcgatcggtggcttgccacctctgaggatgacaaaaagaccattcgagaactggttccatatgacatcttcactgagaaatacatgaaagatgggtccttacggcaagtctacaaggaagtagaagagcctctggacattgtgctgtactcggtgcagatcttcacagggaacattcctggggcagggacggatgccaaggtgtacatcaccatctatggagacctcggggacactggggagcgataccttggcaagtcagagaaccggaccaacaagttcgagagaggaacggctgacaccttcatcatcgaggccgctgacctaggcgtcatctacaagatcaagctccgccatgacaactccaagtggtgcgcagactggtacgtggagaaggtggagatctggaatgacaccaacgaggacgagttcctgttcctatgcgggcgctggctctccctgaagaaggaggatgggcgactcgagaggctcttttacgagaaggagtacactggggaccgcagcagcaactgcagcagccctgctgacttctgggagatcgccctgagctccaagatggccgatgtcgacatcagcacagtgaccgggcccatggctgactacgttcaagagggcccaattattccctactatgtgtcagtcaccactgggaagcacaaggacgcggccactgacagccgagccttcatctttctcatcggggaggatgatgaacgtagtaagcgcatctggttggactacccccgagggaagaggggcttcagccgtggctctgtggaggagttctacgtcgcaggcttggatgtgggcatcatcaagaaaatagaggttctctatgaaatgacggtgtggacaggggatgtggttggcgggggcactgactccaacatcttcatgaccctctacggcatcaacgggagcacagaggagatgcagctggacaaaaagaaagccaggtttgagcgggagcagaacgacaccttcatcatggagatcctagacattgctccattcaccaagatgcggatccggattgatggcctgggcagtcggccggagtggttcctggagaggatcctactgaagaacatgaacactggagacctgaccatgttctactatggagactggctgtcccagcggaagggcaagaagaccctggtgtgtgaaatgtgtgccgttatcgatgaggaagaaatgatggagtggacctcctacaccgtcgcagttaagaccagcgacatcctgggagcaggcactgatgccaacgtgttcatcatcatcttcggggagaacggggatagtgggacactggccctgaagcagtcggcaaactggaacaagtttgagcggaacaacacggacacattcaacttccctgacatgctgagcttgggccacctctgcaagctgagggtctggcacgacaacaaagggatatttcctggctggcatctgagctatgtcgatgtgaaggacaactcccgcgacgagaccttccacttccagtgtgactgctggctctccaagagtgagggtgacgggcagacggtccgcgactttgcctgtgccaacaacaagatctgtgatgagctggaagagaccacctacgagatcgtcatagaaacgggcaacggaggcgaaaccagggagaacgtctggctcatcctggagggcaggaagaaccgatccaaagagtttctcatggaaaattcttctaggcagcgggcctttaggaaggggaccacagacacgtttgagtttgacagcatctacttgggggacattgcctccctctgtgtgggccaccttgccagggaagaccggtttatccccaagagagaacttgcctggcatgtcaagaccatcaccatcaccgagatggagtacggcaatgtgtacttctttaactgtgactgcctcatccccctcaagaggaagaggaagtacttcaaggtattcgaggttaccaagacgacagagagctttgccagcaaggtccagagcctggtgcccgtcaagtacgaagtcatcgtgacaacaggctatgagccaggggcaggcactgatgccaacgtcttcgtgaccatctttggggccaacggagacacaggcaagcgggagctgaagcagaaaatgcgcaacctcttcgagcggggcagcacagaccgcttcttcctggagacgctggagctgggtgagctgcgcaaggtgcgcctggagcacgacagcagtggctactgctcaggctggctggtggagaaggtggaggtcaccaacaccagcaccggcgtggccaccatcttcaactgtggcaggtggctggacaagaagcggggggatggactcacctggagagacctcttcccttctgtctgaggggctagggcccccaccctctcactgagatgccccaatctcacatttctgccctccaccttggcggtcagcagcccttcaaagcctctagcattggcactgggggctagcagtccactgagaacttcatggggtcctgctccccaccctacccccagtttattgaacctacagtgataataattagcatgtgtcataatctgtggctgccc

SEQ ID NO: 294717 - DNA, 3435 bp, Artificial Sequence
  derived and/or modified sequence
atgctgcggcacctgaccgacaccttcaccatctacgccatcgacctgggcgcgctgaccaagatccgcattaggcacgataacaccggcaatcgcgctggatggttcctggatcgtattgacatcacggatatgaataatgagatcacttactattttccttgccagaggtggcttgcagttgaagaggatgacggacagctcagtcgcgaactcctgcctgtggacgaaagttacgttctacctcagagtgaagaggggaggggaggtggggataataaccccttggacaacctggcactggagcaaaaagataagtctaccacattttcggtcacaatcaaaaccggcgtgaagaagaatgcaggtacagacgctaacgtttttattaccctgttcgggacacaggacgacacgggaatgaccctcctgaagagcagtaagactaatagtgataaattcgagagggattcaatcgaaatttttacagtggaaacattggatctgggggatctgtggaaggtccgcctgggtcatgataatactggcaaggcccccgggtggttcgtggactgggttgaagtggacgcacctagtctgggcaagtgtatgactttcccatgcggacggtggctggctaagaatgaggatgatgggagcatcatccgtgatttattccatgccgaactgcagacacgcctgtacaccccttttgtgccatatgagattacgctgtacacaagcgacgtcttcgcggctggcacagacgccaacattttcattattatttacgggtgtgatgcggtgtgtacccagcagaaatatctctgtaccaataagcgtgagcagaagcagttcttcgaacggaaatccgcttccagattcattgttgagttggaagacgttggagagatcatcgagaagatcagaatcggccataataataccggcatgaaccctggctggcattgcagtcatgtcgatattagacggctgctgcccgacaaggatggcgcagaaacactgacttttccgtgcgaccggtggctcgcaacttccgaggacgacaaaaaaacaatccgggaactggtgccatatgatattttcacagaaaagtatatgaaggacggcagcctcaggcaagtgtacaaagaggtcgaggaacccctcgacattgtactctattctgtgcagatcttcaccggtaacatcccaggagccggaacagatgcaaaggtgtatatcaccatttacggagatctgggcgacactggtgagcggtatctggggaagtctgagaacaggacgaataaattcgagcgtggaaccgccgataccttcattatcgaggcggctgacctgggcgtgatctataaaatcaagctgcggcacgacaatagcaagtggtgtgccgactggtatgttgaaaaagtggagatatggaacgacactaacgaggatgagttcttgtttctgtgcggacgatggctcagccttaaaaaagaagatgggaggctcgagagactattctatgagaaagaatacaccggcgatagaagttcaaattgttcttctccagctgacttctgggagattgccctttcatctaaaatggcagacgtcgatattagcacagtcaccggacccatggctgactacgtgcaggagggcccaatcattccatattacgtatccgttactactggcaaacataaagatgccgctactgacagccgcgcttttatcttcttgatcggtgaagacgacgaaaggtcaaaaagaatctggttggattaccctagaggaaaacgtggattcagccggggaagcgtggaagagttttacgttgccggtcttgatgtgggcataattaaaaaaattgaagttctgtacgagatgactgtgtggacaggcgatgtcgttggcggggggaccgattcgaatatttttatgacgttatacggcatcaacggatcaactgaggaaatgcagttggacaagaagaaagcgagatttgagagggaacagaatgacacattcatcatggaaatacttgacatcgctcccttcaccaagatgcggatccgcatcgacggcctgggttcacgtcctgaatggttcttggagcggatattattgaaaaacatgaacacaggcgatctgacaatgttctactacggtgattggttgtctcagagaaaaggaaagaagacgcttgtctgcgaaatgtgcgccgtaatcgacgaggaggagatgatggagtggacttcctatacggttgctgtaaagaccagtgatatcttaggggctgggacagatgctaatgtgttcattatcatctttggagaaaacggtgacagtggtacgctggctctgaagcaaagcgccaattggaataagtttgaacgcaacaatactgacacgtttaactttccggatatgctcagccttggccacctgtgcaaactcagagtctggcacgataacaagggcatctttcctggatggcatctcagttatgtagatgttaaggataacagccgcgatgagactttccacttccaatgcgactgctggctgtctaagtctgagggtgacggtcaaaccgtgcgggatttcgcatgcgctaacaacaagatttgcgatgagttagaggagacaacctatgaaatagtaattgaaacgggtaatggtggtgaaactcgtgaaaatgtatggttgatactggagggtcgaaagaaccggtccaaggagtttctgatggagaacagtagccgacagcgggccttcaggaagggaaccacggacaccttcgagttcgattctatttatctaggcgatatcgccagcctgtgtgtggggcatctggcacgcgaagatagattcatccctaagcgcgaactcgcgtggcatgtaaagaccatcacaattactgaaatggagtacggaaacgtgtatttctttaactgcgactgcttaattccactcaagagaaagagaaagtattttaaagtgttcgaggtcaccaaaactactgaatccttcgcaagcaaagtgcaaagcttagtgcctgtgaagtatgaagtcatcgtgacaaccgggtatgaaccgggtgcgggcaccgacgccaacgtgttcgttacgatttttggcgctaacggcgacacggggaagcgggagctcaagcagaagatgaggaatctgtttgagagaggatctacagatagattctttctggaaactctggaattaggggaactcagaaaggtgagactggagcacgacagctcagggtactgctctgggtggctcgtcgaaaaggtggaagtgacgaataccagcacgggcgttgctacgatattcaactgtggccgatggctggacaagaagcgtggcgatgggctgacctggagggaccttttcccaagcgtatag

SEQ ID NO: 294718 - DNA, 3435 bp, Artificial Sequence
  derived and/or modified sequence
atgctgagacacctgacagatactttcactatttatgccatcgacctgggcgctctcaccaagattaggatcaggcacgataacaccgggaaccgcgcaggctggttcctggaccgaattgacataacagacatgaataatgaaatcacttactacttcccctgccaacggtggctggctgtggaggaggatgacggacaactatcgcgcgagctccttccagtcgacgagtcctacgttctgccacagtctgaagaaggcaggggcggtggagacaataacccattagacaatctcgccttggagcagaaagacaaaagcaccaccttctccgtcaccattaagacgggcgttaagaagaacgccggaacggacgccaacgttttcatcacccttttcggcacacaggatgacactggaatgacactcctgaagagcagcaaaaccaacagcgacaagttcgaaagagattcaatcgaaatcttcaccgttgagaccctagaccttggcgatctgtggaaagtgcggcttgggcacgacaacacaggtaaggctccaggatggttcgtggattgggtggaagtcgatgcaccctctttggggaagtgtatgaccttcccttgtggccgttggctggctaaaaatgaagacgatggctctattattagggatttattccacgccgaactccagaccagactttatacccctttcgtcccctatgagataactctatacacttctgatgtctttgccgcagggactgatgccaacatttttattatcatttacggctgcgacgcagtctgcacccaacagaaatacctctgcacgaacaagcgggagcaaaaacagttcttcgaaaggaagtcagcgtctcgctttatagtagagctggaggacgtgggggagataatcgaaaagattagaattggccacaacaataccggtatgaaccctggatggcactgctcacacgtggacattaggcggctgctgcctgacaaggatggagccgaaactctaactttcccctgcgatcgctggttggccaccagcgaagatgacaagaaaaccatccgcgaattggtgccctatgatatattcacggaaaaatacatgaaagatgggtccctcagacaggtgtacaaggaagtggaggaaccactggatattgtcttgtatagtgttcagatttttaccggaaacattccaggagccggaaccgatgcaaaggtgtacattacaatctatggggacctgggcgacactggtgaacggtacctgggaaagtcagagaacagaacaaataaattcgaaagggggacggccgatactttcattattgaggcagctgacctgggcgttatctataagatcaagctgaggcatgataactcaaagtggtgcgctgactggtatgtagaaaaggtagaaatctggaacgacacgaacgaggacgagttcctgtttttgtgtggaaggtggttgtcactcaagaaagaagacggcaggctggaacgtctgttctacgagaaagaatatactggggataggtcgagtaactgtagctcccctgccgatttctgggagatcgccttgtcaagcaaaatggccgatgtagatatatcgacagtcactggccctatggcagactacgtgcaggaaggcccaattatcccatattacgtgtccgtgactaccggaaaacataaggacgccgctacagattctcgcgctttcattttcttaatcggagaggacgatgagaggagtaagcgaatatggcttgactacccgcgaggaaaaagagggttctctcgcggtagtgttgaggagttttacgtcgcagggttagatgtcggcatcataaagaaaatcgaggtcctctatgagatgacagtctggaccggagacgtggtgggtggaggtacagatagcaatatattcatgacactgtatggcataaatggatcaaccgaggaaatgcagctggataagaagaaggccagatttgagagggagcagaatgatacttttatcatggaaatcctggacattgcaccattcacgaagatgagaattaggattgacgggctgggctcccgccctgagtggtttcttgaaaggatcctattaaagaacatgaatactggagatctcacaatgttctactacggcgattggctttcacagcggaaaggtaagaagacccttgtgtgcgaaatgtgtgctgtgattgacgaggaggaaatgatggaatggacctcttacacggtggccgtaaagacttccgacattctgggggcagggactgacgctaacgttttcattattatctttggggaaaacggcgattccggaaccctggcattgaagcaatcggcaaactggaataagttcgagaggaacaacaccgatacctttaattttccagatatgctgagtctcggccacttatgtaaactgagggtgtggcacgataacaaggggatcttcccagggtggcacctgtcgtacgtcgacgttaaggataattctcgcgacgaaactttccactttcagtgcgattgttggctcagtaagagcgagggagacggccagactgttagggatttcgcttgcgcaaataataagatctgcgacgaacttgaagaaaccacttacgagattgtcatcgaaaccgggaacggcggtgagacgagggagaatgtctggctgatcctcgagggacgtaaaaaccggtctaaggaatttctcatggagaacagttcccggcaaagggcctttaggaaaggtactaccgatacatttgagttcgactccatatatctaggcgatatagcatcgctgtgcgtcggacatctggcacgggaagacaggttcattcctaaaagggaacttgcttggcatgtgaaaacaataaccatcactgagatggagtacgggaatgtatacttttttaattgtgattgtctcatcccacttaagcggaagcgcaaatactttaaggtgtttgaggtcaccaagacaacagaatctttcgcctcaaaggtgcagtccctcgtgcccgtcaagtacgaggtcatcgtcacaactggatacgaaccaggtgcaggcaccgacgctaatgttttcgtcaccatttttggcgcaaatggcgacaccggaaagcgtgagttgaaacagaagatgcgaaacctcttcgaacgtggatctaccgatcgcttttttctggagacactggagctaggcgaactccggaaagtgcgactggaacatgatagctccggttactgtagcgggtggcttgtcgagaaagttgaggttacaaatacttcgaccggcgtggcaacaatctttaattgcggccgatggctggacaagaagagaggcgacggtctgacctggcgcgacctctttccctctgtctag

SEQ ID NO: 294719 - DNA, 3435 bp, Artificial Sequence
  derived and/or modified sequence
atgctgagacacctgaccgacaccttcaccatctacgccatcgacctgggcgccctgaccaagatcagaatcagacacgacaacaccggcaacagagccggctggttcctggacagaatcgacatcaccgacatgaacaacgagatcacctactacttcccctgccagagatggctggccgtggaggaggacgacggccagctgagcagagagctgctgcccgtggacgagagctacgtgctgccccagagcgaggagggcagaggcggcggcgacaacaaccccctggacaacctggccctggagcagaaggacaagagcaccaccttcagcgtgaccatcaagaccggcgtgaagaagaacgccggcaccgacgccaacgtgttcatcaccctgttcggcacccaggacgacaccggcatgaccctgctgaagagcagcaagaccaacagcgacaagttcgagagagacagcatcgagatcttcaccgtggagaccctggacctgggcgacctgtggaaggtgagactgggccacgacaacaccggcaaggcccccggctggttcgtggactgggtggaggtggacgcccccagcctgggcaagtgcatgaccttcccctgcggcagatggctggccaagaacgaggacgacggcagcatcatcagagacctgttccacgccgagctgcagaccagactgtacacccccttcgtgccctacgagatcaccctgtacaccagcgacgtgttcgccgccggcaccgacgccaacatcttcatcatcatctacggctgcgacgccgtgtgcacccagcagaagtacctgtgcaccaacaagagagagcagaagcagttcttcgagagaaagagcgccagcagattcatcgtggagctggaggacgtgggcgagatcatcgagaagatcagaatcggccacaacaacaccggcatgaaccccggctggcactgcagccacgtggacatcagaagactgctgcccgacaaggacggcgccgagaccctgaccttcccctgcgacagatggctggccaccagcgaggacgacaagaagaccatcagagagctggtgccctacgacatcttcaccgagaagtacatgaaggacggcagcctgagacaggtgtacaaggaggtggaggagcccctggacatcgtgctgtacagcgtgcagatcttcaccggcaacatccccggcgccggcaccgacgccaaggtgtacatcaccatctacggcgacctgggcgacaccggcgagagatacctgggcaagagcgagaacagaaccaacaagttcgagagaggcaccgccgacaccttcatcatcgaggccgccgacctgggcgtgatctacaagatcaagctgagacacgacaacagcaagtggtgcgccgactggtacgtggagaaggtggagatctggaacgacaccaacgaggacgagttcctgttcctgtgcggcagatggctgagcctgaagaaggaggacggcagactggagagactgttctacgagaaggagtacaccggcgacagaagcagcaactgcagcagccccgccgacttctgggagatcgccctgagcagcaagatggccgacgtggacatcagcaccgtgaccggccccatggccgactacgtgcaggagggccccatcatcccctactacgtgagcgtgaccaccggcaagcacaaggacgccgccaccgacagcagagccttcatcttcctgatcggcgaggacgacgagagaagcaagagaatctggctggactaccccagaggcaagagaggcttcagcagaggcagcgtggaggagttctacgtggccggcctggacgtgggcatcatcaagaagatcgaggtgctgtacgagatgaccgtgtggaccggcgacgtggtgggcggcggcaccgacagcaacatcttcatgaccctgtacggcatcaacggcagcaccgaggagatgcagctggacaagaagaaggccagattcgagagagagcagaacgacaccttcatcatggagatcctggacatcgcccccttcaccaagatgagaatcagaatcgacggcctgggcagcagacccgagtggttcctggagagaatcctgctgaagaacatgaacaccggcgacctgaccatgttctactacggcgactggctgagccagagaaagggcaagaagaccctggtgtgcgagatgtgcgccgtgatcgacgaggaggagatgatggagtggaccagctacaccgtggccgtgaagaccagcgacatcctgggcgccggcaccgacgccaacgtgttcatcatcatcttcggcgagaacggcgacagcggcaccctggccctgaagcagagcgccaactggaacaagttcgagagaaacaacaccgacaccttcaacttccccgacatgctgagcctgggccacctgtgcaagctgagagtgtggcacgacaacaagggcatcttccccggctggcacctgagctacgtggacgtgaaggacaacagcagagacgagaccttccacttccagtgcgactgctggctgagcaagagcgagggcgacggccagaccgtgagagacttcgcctgcgccaacaacaagatctgcgacgagctggaggagaccacctacgagatcgtgatcgagaccggcaacggcggcgagaccagagagaacgtgtggctgatcctggagggcagaaagaacagaagcaaggagttcctgatggagaacagcagcagacagagagccttcagaaagggcaccaccgacaccttcgagttcgacagcatctacctgggcgacatcgccagcctgtgcgtgggccacctggccagagaggacagattcatccccaagagagagctggcctggcacgtgaagaccatcaccatcaccgagatggagtacggcaacgtgtacttcttcaactgcgactgcctgatccccctgaagagaaagagaaagtacttcaaggtgttcgaggtgaccaagaccaccgagagcttcgccagcaaggtgcagagcctggtgcccgtgaagtacgaggtgatcgtgaccaccggctacgagcccggcgccggcaccgacgccaacgtgttcgtgaccatcttcggcgccaacggcgacaccggcaagagagagctgaagcagaagatgagaaacctgttcgagagaggcagcaccgacagattcttcctggagaccctggagctgggcgagctgagaaaggtgagactggagcacgacagcagcggctactgcagcggctggctggtggagaaggtggaggtgaccaacaccagcaccggcgtggccaccatcttcaactgcggcagatggctggacaagaagagaggcgacggcctgacctggagagacctgttccccagcgtgtag

SEQ ID NO: 294720 - protein, 268 aa, Artificial Sequence
  derived and/or modified sequence
MLLLAAAFLVAFVLLLYMVSPLISPKPLALPGAHVVVTGGSSGIGKCIAIECYKQGAFITLVARNEDKLLQAKKEIEMHSINDKQVVLCISVDVSQDYNQVENVIKQAQEKLGPVDMLVNCAGMAVSGKFEDLEVSTFEVKPYNVYITVAYPPDTDTPGFAEENRTKPLETRLISETTSVCKPEQVAKQIVKDAIQGNFNSSLGSDGYMLSALTCGMAPVTSITEGLQQVVTMGLFRTIALFYLGSFDSIVRRCMMQREKSENADKTA

SEQ ID NO: 294721 - protein, 467 aa, Artificial Sequence
  derived and/or modified sequence
MSSILPFTPPVVKRLLGWKKSAGGSGGAGGGEQNGQEEKWCEKAVKSLVKKLKKTGRLDELEKAITTQNCNTKCVTIPSTCSEIWGLSTPNTIDQWDTTGLYSFSEQTRSLDGRLQVSHRKGLPHVIYCRLWRWPDLHSHHELKAIENCEYAFNLKKDEVCVNPYHYQRVETPVLPPVLVPRHTEILTELPPLDDYTHSIPENTNFPAGIEPQSNYIPETPPPGYISEDGETSDQQLNQSMDTGSPAELSPTTLSPVNHSLDLQPVTYSEPAFWCSIAYYELNQRVGETFHASQPSLTVDGFTDPSNSERFCLGLLSNVNRNATVEMTRRHIGRGVRLYYIGGEVFAECLSDSAIFVQSPNCNQRYGWHPATVCKIPPGCNLKIFNNQEFAALLAQSVNQGFEAVYQLTRMCTIRMSFVKGWGAEYRRQTVTSTPCWIELHLNGPLQWLDKVLTQMGSPSVRCSSMS

SEQ ID NO: 294722 - DNA, 10384 bp, Artificial Sequence
  derived and/or modified sequence
gcgcccgggccgccggccgggcccgggcctgggggcggggcgggaagacggcggccgggagtgttttcagttccgcctccaatcgcccattcccctcttcccctcccagccccctccatcccatcggaagaggaaggaacaaaaggtcccggaccccccggatctgacggggcgggacctggcgccaccttgcaggttcgatacaagaggctgttttcctagcgtggcttgctgcctttggtaagaacatgtcgtccatcttgccattcacgccgccagttgtgaagagactgctgggatggaagaagtcagctggtgggtctggaggagcaggcggaggagagcagaatgggcaggaagaaaagtggtgtgagaaagcagtgaaaagtctggtgaagaagctaaagaaaacaggacgattagatgagcttgagaaagccatcaccactcaaaactgtaatactaaatgtgttaccataccaagcacttgctctgaaatttggggactgagtacaccaaatacgatagatcagtgggatacaacaggcctttacagcttctctgaacaaaccaggtctcttgatggtcgtctccaggtatcccatcgaaaaggattgccacatgttatatattgccgattatggcgctggcctgatcttcacagtcatcatgaactcaaggcaattgaaaactgcgaatatgcttttaatcttaaaaaggatgaagtatgtgtaaacccttaccactatcagagagttgagacaccagttttgcctccagtattagtgccccgacacaccgagatcctaacagaacttccgcctctggatgactatactcactccattccagaaaacactaacttcccagcaggaattgagccacagagtaattatattccagaaacgccacctcctggatatatcagtgaagatggagaaacaagtgaccaacagttgaatcaaagtatggacacaggctctccagcagaactatctcctactactctttcccctgttaatcatagcttggatttacagccagttacttactcagaacctgcattttggtgttcgatagcatattatgaattaaatcagagggttggagaaaccttccatgcatcacagccctcactcactgtagatggctttacagacccatcaaattcagagaggttctgcttaggtttactctccaatgttaaccgaaatgccacggtagaaatgacaagaaggcatataggaagaggagtgcgcttatactacataggtggggaagtttttgctgagtgcctaagtgatagtgcaatctttgtgcagagccccaattgtaatcagagatatggctggcaccctgcaacagtgtgtaaaattccaccaggctgtaatctgaagatcttcaacaaccaggaatttgctgctcttctggctcagtctgttaatcagggttttgaagccgtctatcagctaactagaatgtgcaccataagaatgagttttgtgaaagggtggggagcagaataccgaaggcagacggtaacaagtactccttgctggattgaacttcatctgaatggacctctacagtggttggacaaagtattaactcagatgggatccccttcagtgcgttgctcaagcatgtcataaagcttcaccaatcaagtcccatgaaaagacttaatgtaacaactcttctgtcatagcattgtgtgtggtccctatggactgtttactatccaaaagttcaagagagaaaacagcacttgaggtctcatcaattaaagcaccttgtggaatctgtttcctatatttgaatattagatgggaaaattagtgtctagaaatactctcccattaaagaggaagagaagattttaaagacttaatgatgtcttattgggcataaaactgagtgtcccaaaggtttattaataacagtagtagttatgtgtacaggtaatgtatcatgatccagtatcacagtattgtgctgtttatatacatttttagtttgcatagatgaggtgtgtgtgtgcgctgcttcttgatctaggcaaacctttataaagttgcagtacctaatctgttattcccacttctctgttatttttgtgtgtcttttttaatatataatatatatcaagattttcaaattatttagaagcagattttcctgtagaaaaactaatttttctgccttttaccaaaaataaactcttgggggaagaaaagtggattaacttttgaaatccttgaccttaatgtgttcagtggggcttaaacagtcattctttttgtggttttttgtttttttttgtttttttttttaactgctaaatcttattataaggaaaccatactgaaaacctttccaagcctcttttttccattcccatttttgtcctcataatcaaaacagcataacatgacatcatcaccagtaatagttgcattgatactgctggcaccagttaattctgggatacagtaagaattcatatggagaaagtccctttgtcttatgcccaaatttcaacaggaataattggcttgtataatctagcagtctgttgatttatccttccacctcataaaaaatgcataggtggcagtataattattttcagggatatgctagaattacttccacatatttatccctttttaaaaaagctaatctataaataccgtttttccaaaggtattttacaatatttcaacagcagaccttctgctcttcgagtagtttgatttggtttagtaaccagattgcattatgaaatgggccttttgtaaatgtaattgtttctgcaaaatacctagaaaagtgatgctgaggtaggatcagcagatatgggccatctgtttttaaagtatgttgtattcagtttataaattgattgttattctacacataattatgaattcagaattttaaaaattgggggaaaagccatttatttagcaagttttttagcttataagttacctgcagtctgagctgttcttaactgatcctggttttgtgattgacaatatttcatgctctgtagtgagaggagatttccgaaactctgttgctagttcattctgcagcaaataattattatgtctgatgttgactcattgcagtttaaacatttcttcttgtttgcatcttagtagaaatggaaaataaccactcctggtcgtcttttcataaattttcatatttttgaagctgtctttggtacttgttctttgaaatcatatccacctgtctctataggtatcattttcaatactttcaacatttggtggttttctattgggtactccccattttcctatatttgtgtgtatatgtatgtgttcatgtaaatttggtatagtaattttttattcattcaacaaatatttattgttcacctgtttgtaccaggaacttttcttagtctttgggtaaaggtgaacaagacaactacagttcctgcctttgctgagacagcagttacactaacccttaattatcttacttgtctatgaaggagataaacagggtactgtactggagaataacagatgggatgcttcaggtaggacatcaaggaaagcctctaaggaaaggatgcatgagctaacacctgacattaaagaagcaagccaagtgaggagccaggggagataagcattcctggcaaagagaatagcatcaaatgcaaaaaggttcacactaaaggaaactcctgattaggtattaatgctttatacagaaacctctatacaaatccaaacttgaagatcagaatggttctacagttcataacattttgaaggtggccttattttgtgatagtctgcttcatgtgattctcactaacatatctccttcctcaacctttgctgtaaaaatttcatttgcaccacatcagtactacttaatttaacaagcttttgttgtgtaagctctcactgttttagtgccctgctgcttgcttccagactttgtgctgtccagtaattatgtcttccactacccatcttgtgagcagagtaaatgtcctaggtaataccactatcaggcctgtaggagatactcagtggagcctctgcccttctttttcttacttgagaacttgtaatggtgttagggaacagttgtaggggcagaaaacaactctgaaagtggtagaaggtcctgatcttggtggttactcttgcattactgtgttaggtcaagcagtgcctactatgctgtttcagtagtggagcgcatctctacagttctgatgcgatttttctgtacagtatgaaattgggactcaactctttgaaaacacctattgagcagttatacctgttgagcagtttacttcctggttgtaattacatttgtgtgaatgtgtttgatgctttttaacgagatgatgttttttgtattttatctactgtggcctgattttttttttgttttctgcccctccccccatttataggtgtggttttcatttttctaagtgatagaatcccctctttgttgaatttttgtctttatttaaattagcaacattacttaggatttattcttcacaatactgttaattttctaggaatgatgacctgagaaccgaatggccatgctttctatcacatttctaagatgagtaatattttttccagtaggttccacagagacaccttgggggctggcttaggggaggctgttggagttctcactgacttagtggcatatttattctgtactgaagaactgcatggggtttcttttggaaagagtttcattgctttaaaaagaagctcagaaagtctttataaccactggtcaacgattagaaaaatataactggatttaggcctaccttctggaataccgctgattgtgctctttttatcctactttaaagaagctttcatgattagatttgagctatatcagttataccgattataccttataatacacattcagttagtaaacatttattgatgcctgttgtttgcccagccactgtgatggatattgaataataaaaagatgactaggacggggccctgacccttgagctgtgcttggtcttgtagaggttgtgttttttttcctcaggacctgtcactttggcagaaggaaatctgcctaatttttcttgaaagctaaattttctttgtaagtttttacaaattgtttaatacctagttgtattttttaccttaagccacattgagttttgcttgatttgtctgtcttttaaacactgtcaaatgctttcccttttgttaaaattattttaatttcactttttttgtgcccttgtcaatttaagactaagactttgaaggtaaaacaaacaaacaaacatcagtcttagtctcttgctagttgaaatcaaataaaagaaaatatatacccagttggtttctctacctcttaaaagcttcccatatatacctttaagatccttctcttttttctttaactactaaataggttcagcatttattcagtgttagataccctcttcgtctgagggtggcgtaggtttatgttgggatataaagtaacacaagacaatcttcactgtacataaaatatgtcttcatgtacagtctttactttaaaagctgaacattccaatttgcgccttccctcccaagcccctgcccaccaagtatctctttagatatctagtctgtggacatgaacaatgaatacttttttcttactctgatcgaaggcattgatacttagacatatcaaacatttcttcctttcatatgctttactttgctaaatctattatattcattgcctgaattttattcttcctttctacctgacaacacacatccaggtggtacttgctggttatcctctttcttgttagccttgttttttgttttttttttttttttttgagagggagtctcgctctgttgcccaacctggagtgcagtggtgcgatcttggttcactgcaagctccgcctcccgggttcacgccatgcttctgcctcagcctcccaagtagctgggactacaggcgcccaccaccacactcggctaattttttgtatttttagtagagacggggtttcaccgtgttggccaggatggtctcgatctcctgacctcgtgatctgtccacctcggcttcccaaagtgctgggattacaggcatgagccaccgcgcccagcctagccatatttttatctgcatatatcagaatgtttctctcctttgaacttattaacaaaaaaggaacatgcttttcatacctagagtcctaatttcttcatcatgaaggttgctattcaaattgatcaatcattttaattttacaaatggctcaaaaattctgttcagtaaatgtctttgtgactggcaaatggcataaattatgtttaagattatgaacttttctgacagttgcagccaatgttttccctacgataccagatttccatcttggggcatattggattgttgtatttaagacagtcagaataatgatagtgtgtggtctccagaggtagtcagaatcctgctattgagttctttttatatcttccttttcaattttttattaccattttgtttgtttagactacactttgtagggattgaggggcaaattatctcttggagtggaattcctgtgttttgagccttacaaccaggaaatatgagctatactagatagcctcatgatagcatttacgataagaacttatctcgtgtgttcatgtaattttttgagtaggaactgttttatcttgaatattgtagctaactatatatagcagaactgcctcagtctttttaagaaggaaataaataatatatgtgtatgaatttatatatacatatacactcatagacaaacttaacagttggggtcattctaacagttaaaacaattgttccattgtttaaatctcagatcctggtaaaatgttcttaatttgtctgtgtacattttcctttcatggacagaccattggagtacattaattttcttaatctgccatttggcagttcatttaatataccattttttggcaacttggtaactaagaatcacagccaaaatttgttaacatcaaagaaagctctgccatataccccgttactaaattattatacatccagcagattctgggatgtactaacttagggttaactttgttgttgttgataatactagattgctccctctttaattcttcttctggtgcaaggttgctgcttaagttaccctgggaaatactactacaaggtcaaattttctagtatcttacagcctgattgaaggtgattcagatctttgctcaatataaatggattttccaagattctctgggccatccttgacccacaggtgatctcgctggagtatattaacttaacttcagtgccagttggtttggtgccatgagatccataatgaatccagaacttcaccattgcttagatataagagtcccttggaagaataatgccactgatgatgggggtcagaaggtgtattaactcaacatagagggcttttagatttttcttcaaaaaaatttcgagaaaagtattcttttaccctccaaacagttaacagctcttagtttctccaaatatgctctttgatttacttatttttaattaaagatggtaatttattgaacaatgaaatccgtaatatattgatttaaggacaaaagtgaagttttagaattataaaagtacttaaatattatatattttccatttcataattgttttcctttctctgtggctttaaagtttttgactattttacaatgttaatcactaggtaacttgccatatttctggttctatattaagttctatcctttataatgctgttattataaagctggtttttagcatttgtctgtagcaatagaaattttactaagtctctgttctcccagtaagttttttcttttctcagtaagtccctaagaaaacatttgtttgccactcttactattcccaatcttggattgttcgagctgaaaaaaaatttgatgagaaacaggaggatccttttctggtgaatataggttcctgctttaagaatgtggaaatccattgctttatataactaatatacacacagattaattaaaattgtgagaaataattcacacatgacaagtaggtaacatgcatgagttttgaatttttttaaaaacccaactgtttgacaaaatatagaacccaaattggtactttcttagaccagtgtaacctcacacctcagttttgcttttccaaccctgacttgaaaggcatatttgtatctttttattagtgatagtgaagctgtgacactaaccttttatacaaaagagtaaagaaagaaaaactacagcgattaagatgagaacagttctgcagttgttgaactagatcacagcattgtaggcagaataaaaaatgttcatatctgagaatattcctttcgccatcttttcccaaggccagacctcctggtggagcacagttaaaagtaacattctgggcctttgtaatcggagggctgtgtctccagctggcagcctttgttttaatatataatgcaggactgtggaaaacagttggcatagaatattttcacctaaaaaagaaagaaaagacatacaaaactggattaattgcaaaaagagaatacagtaaaataccatataactggacaaagctagaagaacctttagaagatttgtctgaaaacagatttcaagagtgagcttttatacactgctcactaatttgcttgattactaccaactcttcttaaagttaacacgtttaaggtatttctggacttcctagccttttagcaagcttagaggaactagccattagctagtgatgtaaaaatattttggggactgatgcccttaaaggttatgcccttgaaagttcttaccttttctctagtgatattaaggaacgagtgggtagtgttctcagggtgaccagctgccctaaagtgcctgggattgagggtttccctggatgcgggactttccctggatacaaaacttttagcagagttttgtatatatgtggatttttctgataagtagcacatcagaggccttaaccactgcccaaaagcgattctccattgagagtacatatcttgaacttaagaaattcatttgctctgatttttaatcttgtaaagtttttgctaaactcaaaacaagtcccaggcacaccagaaggagctgaccaccttaggtgttcttgtgatttatccttacttccctatgttgtcatagttgcttctaaactcagctgcactatggctgtcaacatttctgatacttattgggatatgtgccatccagtcatttagtactttgaatggaacatgagatttataacacaggtaatagctgaaggtaccagtatggtggtgagactcacacttagtgatccagctaaggtaactgatgttataatggaacagagaagaggccaactagatagctaagttcttctgaacctatgtgtatatgtaagtacaaatcatgcgtccttatggggttaaacttaatctgaaatttacatttttcatagtaaaaggaaaccaattgttgcagatttcttttcttgtgaggaaatacatggcctttgatgctctggcgtctactgcatttcccagtctgttctgctcgagaagccagaatgtgttgttaacatttttccgtgaatgttgtgttaaaatgattaaatgcatcagccaatggcaagtgaaggaattgggtgtcctgatgcagactgagcagtttctctcaattgtagcctcatactcataaggtgcttaccagctagaacattgagcacgtgaggtgagattttttttctctgatggcattaactttgtaatgcaatatgatggatgcagaccctgttcttgtttccctctggaagtccttagtggctgcatccttggtgcactgtgatggagatattaaatgtgttctttgtgagctttcgttctatgattgtcaaaagtacgatgtggttccttttttatttttattaaacaatgagctgaggctttattacagctggttttcaagttaaaattgttgaatactgatgtctttctcccacctacaccaaatattttagtctatttaaagtacaaaaaaagttctgcttaagaaaacattgcttacatgtcctgtgatttctggtcaatttttatatatatttgtgtgcatcatctgtatgtgctttcactttttaccttgtttgctcttacctgtgttaacagccctgtcaccgttgaaaggtggacagttttcctagcattaaaagaaagccatttgagttgtttaccatgtta

SEQ ID NO: 294723 - DNA, 1404 bp, Artificial Sequence
  derived and/or modified sequence
atgagcagcatcctgcccttcaccccccccgtggtgaagagactgctgggctggaagaagagcgccggcggcagcggcggcgccggcggcggcgagcagaacggccaggaggagaagtggtgcgagaaggccgtgaagagcctggtgaagaagctgaagaagaccggcagactggacgagctggagaaggccatcaccacccagaactgcaacaccaagtgcgtgaccatccccagcacctgcagcgagatctggggcctgagcacccccaacaccatcgaccagtgggacaccaccggcctgtacagcttcagcgagcagaccagaagcctggacggcagactgcaggtgagccacagaaagggcctgccccacgtgatctactgcagactgtggagatggcccgacctgcacagccaccacgagctgaaggccatcgagaactgcgagtacgccttcaacctgaagaaggacgaggtgtgcgtgaacccctaccactaccagagagtggagacccccgtgctgccccccgtgctggtgcccagacacaccgagatcctgaccgagctgccccccctggacgactacacccacagcatccccgagaacaccaacttccccgccggcatcgagccccagagcaactacatccccgagacccccccccccggctacatcagcgaggacggcgagaccagcgaccagcagctgaaccagagcatggacaccggcagccccgccgagctgagccccaccaccctgagccccgtgaaccacagcctggacctgcagcccgtgacctacagcgagcccgccttctggtgcagcatcgcctactacgagctgaaccagagagtgggcgagaccttccacgccagccagcccagcctgaccgtggacggcttcaccgaccccagcaacagcgagagattctgcctgggcctgctgagcaacgtgaacagaaacgccaccgtggagatgaccagaagacacatcggcagaggcgtgagactgtactacatcggcggcgaggtgttcgccgagtgcctgagcgacagcgccatcttcgtgcagagccccaactgcaaccagagatacggctggcaccccgccaccgtgtgcaagatcccccccggctgcaacctgaagatcttcaacaaccaggagttcgccgccctgctggcccagagcgtgaaccagggcttcgaggccgtgtaccagctgaccagaatgtgcaccatcagaatgagcttcgtgaagggctggggcgccgagtacagaagacagaccgtgaccagcaccccctgctggatcgagctgcacctgaacggccccctgcagtggctggacaaggtgctgacccagatgggcagccccagcgtgagatgcagcagcatgagctag

SEQ ID NO: 294724 - DNA, 1404 bp, Artificial Sequence
  derived and/or modified sequence
atgtcctccattctacctttcaccccacctgtcgtgaagcgtctcctcggctggaaaaagagcgctggcgggagcggcggcgccggcggaggcgaacagaatggccaggaggagaaatggtgcgaaaaggccgttaaatctctcgtgaaaaaacttaagaagacaggaagactggatgagctcgagaaagcgatcactacacagaactgtaacaccaagtgcgttaccatcccgtccacatgctccgaaatctggggtctgtcgacacccaacaccattgatcaatgggatacaactggactctattccttctccgaacagacaagatccctggatggccgattacaggtgtcgcatagaaagggcctgcctcacgttatctactgccgactttggaggtggccagatctccacagtcaccatgagttgaaggccatcgagaactgtgagtacgccttcaaccttaagaaagacgaagtctgcgtcaacccataccactatcagcgggttgaaactcctgttctacccccagtgttggttccaaggcacaccgaaattctcacggagctgccacccctggacgattacacccacagtattcccgaaaatactaactttcccgcgggtatcgaaccccagtccaattacatcccagagaccccacctccaggttacataagcgaggatggtgagacatccgaccagcagttgaaccagtcaatggacacaggatctcctgccgagttgtcgcccactactctctctccggtgaatcacagtctggacctgcaacccgtgacttattcagagccggctttttggtgcagcattgcttactacgagctgaaccaacgagtaggggagacttttcatgctagtcagccatccctcaccgtcgatggtttcactgacccatctaatagcgaacgattttgcctgggactgctgtctaacgtaaacaggaatgccactgtagagatgacacgcagacatattggacggggtgtacggttgtactacatcggcggagaggttttcgctgagtgtctgtcggacagcgcaatttttgtgcagagtcctaattgtaatcagagatatggctggcacccagccacagtgtgcaaaattcccccaggctgtaacctgaagatttttaataatcaggagtttgcggcacttctagcccaatccgtgaaccagggctttgaggccgtttatcagctgacacgcatgtgcaccatacgtatgagcttcgttaaggggtggggggccgaataccgacgccagactgtgaccagtacaccctgctggattgaactgcaccttaacggacccctccagtggctggataaagtcctgacacagatgggctctccctcagtccggtgcagctcaatgtcttag

SEQ ID NO: 294725 - DNA, 1404 bp, Artificial Sequence
  derived and/or modified sequence
atgagttccatactgccgttcacaccccctgtagtcaagaggcttttaggttggaagaaatcagcagggggaagtggcggagcgggcggcggcgagcaaaacggccaggaagagaagtggtgcgagaaagcagtcaaatctctagtcaagaaactgaagaagacaggaaggttagatgaactggagaaggcaataaccacccaaaattgcaacactaagtgtgtgacgatcccctcaacatgtagcgaaatctggggactgtctacacctaacacaatcgatcagtgggataccactggcttgtattcttttagtgaacagacgcgctccctcgatggaagactgcaggtatcacacaggaaggggttacctcatgtgatttattgcaggctgtggcgctggccagatttgcattctcaccacgaactgaaagcgatcgaaaattgcgagtacgcatttaacctgaagaaggatgaagtgtgcgtcaacccttatcactatcagcgtgtggagactccagtgctgccacctgtgctggtgcctagacacactgagatactaacggagttgcctccattagatgattacacacattccataccagaaaacacgaacttcccagcaggtatcgaacctcagtctaactacatccccgaaactccaccacccgggtatatatctgaggatggagaaacaagtgatcagcagctgaatcagagtatggacacgggctccccagcagagctatctcccactacactctcccccgtcaatcacagcctcgatctccagcctgttacttattctgaaccggcattttggtgttctattgcctactatgagctgaatcagagagttggcgagaccttccacgcctcccagccgtcactcacagtggacggctttactgaccccagcaacagtgagcgcttctgcctgggactgctttcaaacgttaatcggaatgcgaccgtagaaatgacgcgcaggcacatcggaagaggggtgaggctatactacatcgggggcgaagtgttcgccgaatgtctaagtgactctgccatcttcgtccagtcccctaattgcaaccagagatatgggtggcacccagctacagtttgtaagataccacctgggtgtaatttgaagatctttaataaccaggagtttgccgctctcctggcccagtccgttaatcaagggttcgaggccgtgtaccaactcacacggatgtgtaccataagaatgtcctttgtcaagggatggggggccgaatacaggcgacagacagtgaccagtaccccttgctggatcgagctgcatctgaatgggcccttgcagtggctcgacaaagtgttgacacagatggggagtccctctgtacgctgttcatcaatgtcctag

SEQ ID NO: 294726 - DNA, 1404 bp, Artificial Sequence
  derived and/or modified sequence
atgagcagcatcctgcccttcaccccacctgtggtgaagaggctgctgggctggaagaagtctgctgggggcagcggcggggccggcggcggggagcagaatggccaggaggagaagtggtgtgagaaggctgtgaagagcctggtgaagaagctgaagaagacaggccgcctggatgagctggagaaggccatcaccacccagaactgcaacaccaagtgtgtgaccatccccagcacctgcagcgagatctggggcctgagcacccccaacaccatcgaccagtgggacaccaccggcctgtacagcttcagcgagcagaccaggagcctggatggccgcctgcaggtgagccacaggaagggcctgccccacgtgatctactgccgcctgtggcgctggccagacctgcacagccaccacgagctgaaggccatcgagaactgtgaatatgccttcaacctgaagaaggatgaggtgtgtgtgaacccctaccactaccagagggtggagacccctgtgctgccccctgtgctggtgcccaggcacacagagatcctgacagagctgccccccctggatgactacacccacagcatccctgagaacaccaacttccctgctggcatcgagccccagagcaactacatccctgagaccccacctcctggctacatcagtgaagatggagagaccagtgaccagcagctgaaccagagcatggacaccggcagccctgctgagctgagccccaccaccctgagccctgtgaaccacagcctggacctgcagcctgtgacctacagcgagcccgccttctggtgcagcatcgcctactatgagctgaaccagagggtgggggagaccttccacgccagccagcccagcctgactgtggatggcttcacagaccccagcaacagcgagcgcttctgcctgggcctgctgagcaatgtgaacagaaatgccaccgtggagatgaccaggaggcacatcggccggggcgtgcggctgtactacatcggcggggaggtgtttgctgagtgcctgagtgacagcgccatctttgtgcagagccccaactgcaaccagagatatggctggcacccagccaccgtgtgcaagatccccccaggctgcaacctgaagatcttcaacaaccaggagtttgctgccctgctggcccagagcgtgaaccagggctttgaggccgtgtaccagctgaccaggatgtgcaccatccgcatgagctttgtgaagggctggggcgctgagtaccgccggcagacagtgaccagcaccccctgctggattgagctgcacctgaatggccccctgcagtggctggacaaggtgctgacccagatgggcagccccagcgtgcgctgcagctccatgtcctag

SEQ ID NO: 294727 - DNA, 1404 bp, Artificial Sequence
  derived and/or modified sequence
atgagcagcatcctgcccttcaccccccccgtggtgaagcggctgctgggctggaagaagagtgccggaggctccggcggcgcaggcggcggggagcagaatggacaggaagaaaaatggtgtgagaaggccgtgaaaagtcttgtcaaaaagctgaagaagaccggacgactcgacgagctcgagaaagccatcactacccagaattgcaacactaagtgcgtgactattccctcaacatgcagcgagatatgggggcttagtacgccaaacaccatcgaccagtgggacacaacagggctttattctttcagcgaacaaacgaggagcctggatggacgtctgcaagtgtcacataggaagggcttaccgcacgtaatatactgccgcctctggagatggccagatcttcactcccaccacgaattgaaggccatcgaaaactgtgagtatgccttcaacctgaaaaaggatgaagtttgtgtcaatccttatcattaccagcgtgtcgaaacgcctgttctgccccccgttcttgttcctagacacaccgaaatcctcacggaactccccccactagacgactacacacacagcatccccgagaacacaaattttcctgccgggatagagccccagagtaactacattcccgaaacccctccaccgggctatatctcagaggacggagaaacctcagaccagcaactcaatcagagcatggatactgggtctcccgcggagctcagcccgacgaccttgagcccagtgaatcactcactggacttgcagcctgtgacctatagtgagcccgcattttggtgctcaatagcttactacgaactcaaccaacgagtgggcgagaccttccatgcttcgcagccaagtctgactgtggacggattcacagatccttctaactcagagcgattttgcctcggcctgcttagcaacgtcaatagaaacgctacagtggagatgacgagacgacatatcggccgcggcgtaaggctgtattatatcgggggggaggtgttcgcggaatgcctgtccgactcggccattttcgtgcagagcccaaactgcaaccagcggtacggatggcaccctgccacagtctgtaagattccaccagggtgtaacctgaagatctttaataatcaggaattcgcagcattactggcacagtctgtgaaccagggattcgaggcagtgtaccaacttactagaatgtgtaccataagaatgagttttgttaagggctggggtgccgaatataggaggcaaactgttaccagtactccatgttggattgaactccatctgaacggtcctctgcagtggctggacaaggtattgacgcagatgggatcccctagcgtgcggtgctcaagtatgtcttag

SEQ ID NO: 294728 - DNA, 1404 bp, Artificial Sequence
  derived and/or modified sequence
atgagcagcatcctgcccttcaccccccccgtggtgaagcggctgttaggctggaagaagagcgcaggaggcagcggcggagctggaggaggtgagcagaatggtcaagaggaaaagtggtgtgagaaggccgtgaagtcactagtgaaaaaactgaagaagaccgggcggctggacgaactggagaaagccatcactacccagaactgcaatacgaaatgtgtgaccatcccctcaacttgtagtgagatttggggactttccacacccaatacaattgatcagtgggataccaccggcttatatagtttttcagaacagactcggagcttagacggccggctacaggtcagtcataggaagggacttccccacgttatctattgtcgcctatggcggtggccggatttgcactcccaccacgaacttaaggcgattgagaactgcgagtatgcttttaatctgaaaaaggatgaggtgtgtgtgaatccttaccattaccagcgtgtggaaactcccgttttgccgccagtgctggtgccccgtcatactgagattctgacggaactgcctcccctggatgattatacacattcaattcctgaaaatactaattttcctgcagggatcgagccgcagagcaactatatccctgagaccccacctcctgggtacattagcgaggatggggaaaccagtgaccagcaactcaatcagagtatggatactggctcccctgctgagctgagtcctactaccctcagtcccgtgaaccactctcttgatctgcaacctgtcacctatagtgaacccgcattctggtgtagcatcgcatattacgaactgaaccaacgagtcggggagactttccatgcctcccaacccagcttgactgttgatgggttcacagatccgagcaacagcgaacgattctgtctgggcctcctgagcaatgtcaaccggaatgccaccgtggaaatgaccagacgccacataggacgcggcgtgcgcctctactacatcggcggcgaggtgtttgccgaatgtctgagtgactctgccatctttgtgcagtccccgaattgcaatcaaagatacggttggcaccccgccaccgtttgtaaaatacctcccgggtgtaaccttaaaatcttcaataatcaggagtttgctgccctcttggcgcaaagcgtcaaccagggctttgaggctgtctatcagcttactaggatgtgcactatccgcatgagttttgtcaaaggctggggcgcagagtaccggagacagaccgtgacaagtacgccctgttggatcgagcttcaccttaatggacccctgcagtggctcgataaggtgcttacacagatgggatcccccagtgtgagatgctcgagcatgtcctag

SEQ ID NO: 294729 - DNA, 1404 bp, Artificial Sequence
  derived and/or modified sequence
atgtctagcatcctaccattcaccccacccgttgtgaagagacttctgggatggaaaaagtcagcaggagggtctggtggcgctggaggcggtgagcagaacgggcaagaggagaagtggtgtgagaaggcagtcaagtccctggtgaaaaagctgaagaaaactggtaggttggacgagctcgaaaaagccattactacccagaactgcaacaccaagtgtgtgactatccccagtacttgttctgagatctgggggttgtcaacccccaacacaatcgaccaatgggatacaacaggcctttattcatttagtgagcagacccggtctcttgacggacgacttcaggtgtcgcatagaaaaggactgccacacgtgatttactgcaggctgtggcgctggccagatcttcacagccaccatgagctgaaggctattgaaaattgtgagtacgcattcaacctcaagaaggatgaggtgtgtgtcaacccgtaccactatcagagagttgagacccccgttttgcctcccgttctggtacctcgtcataccgaaatactgacagaactacccccactagacgattatacccattcaattcccgaaaacactaatttccccgcaggtatcgagcctcagagcaattacattcctgagaccccccctcctggttacatctctgaagatggtgagacgagcgatcagcagcttaaccaatctatggacaccggatctcccgctgaactgagcccaactactttatcacctgttaaccacagtctggacctccaaccagtgacctatagtgagcctgcgttttggtgctctatcgcatattacgagctgaatcagagagtgggagaaacctttcatgctagccagccttcactaactgttgatgggttcactgacccttctaattctgaacgattctgtttgggattattgtcaaatgtcaatcgcaacgccaccgtcgagatgactcgtcgccacatcggcagaggcgtccggttgtactacattgggggtgaggtgttcgctgaatgcctgtccgacagtgctatattcgtgcaaagccctaactgcaaccaacggtacggctggcaccccgcaaccgtgtgcaagatccctccgggatgcaaccttaagatttttaataatcaagagtttgccgctttattagctcaatcagtcaatcagggcttcgaggcagtttaccagttgactcgtatgtgcacaatcagaatgtcctttgtgaagggatggggggcagaatacaggcgccagacagtgacgtccaccccctgctggattgaacttcatctaaacggtccacttcaatggctggataaggttctgacccagatgggaagcccctccgtgaggtgctcttcaatgtcttag

SEQ ID NO: 294730 - DNA, 1404 bp, Artificial Sequence
  derived and/or modified sequence
atgtcgtccatactcccatttaccccgccagtagttaagcgtctccttggctggaagaagtccgctgggggaagtggcggtgctgggggaggcgagcagaatgggcaggaggagaaatggtgcgagaaggcggtaaaatcattagttaaaaaacttaaaaaaactggaaggttagacgagctggaaaaagccatcactactcagaattgcaacaccaaatgtgttactataccgtctacatgctccgagatttggggtctgtctacccccaataccattgaccagtgggacaccaccggattatactctttttccgaacaaactaggtccctggatggaagactgcaagtgtctcacagaaaaggacttccccacgtgatttattgcagactgtggagatggccagatctccactcacaccacgagttgaaggccattgaaaactgcgagtacgcctttaatttaaagaaggatgaggtctgcgtcaacccttaccactaccagagggttgagacaccagtgttaccacccgtactcgtcccccgacacactgaaattctgacagagctgcctcccctggacgattatacacacagcatcccagagaatactaacttccccgctggtattgagccccagagtaactacatcccagaaacacctcctcccggttacatcagcgaagatggggagacaagcgatcagcaactcaatcaatcaatggatactggcagtccagccgagctcagcccgactacactctccccagtcaatcacagtctggacctgcagcccgtgacatacagcgagcccgcattctggtgctctatcgcctattacgagctgaaccagagagtcggggaaacctttcacgctagtcagccatctctgacagtagatggctttaccgatcccagcaacagtgaaaggttctgtcttggcctcctctcaaatgttaatcggaacgccaccgtggagatgaccagacgacatattggccgaggcgtgcgcctttattatattggcggagaggtgttcgcagagtgcctgtccgacagcgcgatcttcgtccagagcccaaattgcaatcaacggtacgggtggcaccctgccaccgtgtgtaagatcccgcctgggtgcaatctcaaaatcttcaataatcaagaatttgccgcactcctcgcccagagcgtgaaccaggggttcgaagccgtgtaccagctcacacgcatgtgcacaatccggatgtccttcgttaaaggctggggggcagagtatcgtagacagaccgtcacatccacgccctgttggattgaactgcatctgaacgggccacttcagtggctcgataaggtcctcacccagatggggtccccatctgttcgatgttcctccatgtcttag

SEQ ID NO: 294731 - DNA, 11932 bp, Artificial Sequence
  derived and/or modified sequence
ccgcgcgcccgggccgccggccgggcccgggcctgggggcggggcgggaagacggcggccgggagtgttttcagttccgcctccaatcgcccattcccctcttcccctcccagccccctccatcccatcggaagaggaaggaacaaaaggtcccggaccccccggatctgacggggcgggacctggcgccaccttgcaggttcgatacaagaggctgttttcctagcgtggcttgctgcctttggtaagaacatgtcgtccatcttgccattcacgccgccagttgtgaagagactgctgggatggaagaagtcagctggtgggtctggaggagcaggcggaggagagcagaatgggcaggaagaaaagtggtgtgagaaagcagtgaaaagtctggtgaagaagctaaagaaaacaggacgattagatgagcttgagaaagccatcaccactcaaaactgtaatactaaatgtgttaccataccaagcacttgctctgaaatttggggactgagtacaccaaatacgatagatcagtgggatacaacaggcctttacagcttctctgaacaaaccaggtctcttgatggtcgtctccaggtatcccatcgaaaaggattgccacatgttatatattgccgattatggcgctggcctgatcttcacagtcatcatgaactcaaggcaattgaaaactgcgaatatgcttttaatcttaaaaaggatgaagtatgtgtaaacccttaccactatcagagagttgagacaccagttttgcctccagtattagtgccccgacacaccgagatcctaacagaacttccgcctctggatgactatactcactccattccagaaaacactaacttcccagcaggaattgagccacagagtaattatattccagaaacgccacctcctggatatatcagtgaagatggagaaacaagtgaccaacagttgaatcaaagtatggacacaggctctccagcagaactatctcctactactctttcccctgttaatcatagcttggatttacagccagttacttactcagaacctgcattttggtgttcgatagcatattatgaattaaatcagagggttggagaaaccttccatgcatcacagccctcactcactgtagatggctttacagacccatcaaattcagagaggttctgcttaggtttactctccaatgttaaccgaaatgccacggtagaaatgacaagaaggcatataggaagaggagtgcgcttatactacataggtggggaagtttttgctgagtgcctaagtgatagtgcaatctttgtgcagagccccaattgtaatcagagatatggctggcaccctgcaacagtgtgtaaaattccaccaggctgtaatctgaagatcttcaacaaccaggaatttgctgctcttctggctcagtctgttaatcagggttttgaagccgtctatcagctaactagaatgtgcaccataagaatgagttttgtgaaagggtggggagcagaataccgaaggcagacggtaacaagtactccttgctggattgaacttcatctgaatggacctctacagtggttggacaaagtattaactcagatgggatccccttcagtgcgttgctcaagcatgtcataaagcttcaccaatcaagtcccatgaaaagacttaatgtaacaactcttctgtcatagcattgtgtgtggtccctatggactgtttactatccaaaagttcaagagagaaaacagcacttgaggtctcatcaattaaagcaccttgtggaatctgtttcctatatttgaatattagatgggaaaattagtgtctagaaatactctcccattaaagaggaagagaagattttaaagacttaatgatgtcttattgggcataaaactgagtgtcccaaaggtttattaataacagtagtagttatgtgtacaggtaatgtatcatgatccagtatcacagtattgtgctgtttatatacatttttagtttgcatagatgaggtgtgtgtgtgcgctgcttcttgatctaggcaaacctttataaagttgcagtacctaatctgttattcccacttctctgttatttttgtgtgtcttttttaatatataatatatatcaagattttcaaattatttagaagcagattttcctgtagaaaaactaatttttctgccttttaccaaaaataaactcttgggggaagaaaagtggattaacttttgaaatccttgaccttaatgtgttcagtggggcttaaacagtcattctttttgtggttttttgtttttttttgtttttttttttaactgctaaatcttattataaggaaaccatactgaaaacctttccaagcctcttttttccattcccatttttgtcctcataatcaaaacagcataacatgacatcatcaccagtaatagttgcattgatactgctggcaccagttaattctgggatacagtaagaattcatatggagaaagtccctttgtcttatgcccaaatttcaacaggaataattggcttgtataatctagcagtctgttgatttatccttccacctcataaaaaatgcataggtggcagtataattattttcagggatatgctagaattacttccacatatttatccctttttaaaaaagctaatctataaataccgtttttccaaaggtattttacaatatttcaacagcagaccttctgctcttcgagtagtttgatttggtttagtaaccagattgcattatgaaatgggccttttgtaaatgtaattgtttctgcaaaatacctagaaaagtgatgctgaggtaggatcagcagatatgggccatctgtttttaaagtatgttgtattcagtttataaattgattgttattctacacataattatgaattcagaattttaaaaattgggggaaaagccatttatttagcaagttttttagcttataagttacctgcagtctgagctgttcttaactgatcctggttttgtgattgacaatatttcatgctctgtagtgagaggagatttccgaaactctgttgctagttcattctgcagcaaataattattatgtctgatgttgactcattgcagtttaaacatttcttcttgtttgcatcttagtagaaatggaaaataaccactcctggtcgtcttttcataaattttcatatttttgaagctgtctttggtacttgttctttgaaatcatatccacctgtctctataggtatcattttcaatactttcaacatttggtggttttctattgggtactccccattttcctatatttgtgtgtatatgtatgtgttcatgtaaatttggtatagtaattttttattcattcaacaaatatttattgttcacctgtttgtaccaggaacttttcttagtctttgggtaaaggtgaacaagacaactacagttcctgcctttgctgagacagcagttacactaacccttaattatcttacttgtctatgaaggagataaacagggtactgtactggagaataacagatgggatgcttcaggtaggacatcaaggaaagcctctaaggaaaggatgcatgagctaacacctgacattaaagaagcaagccaagtgaggagccaggggagataagcattcctggcaaagagaatagcatcaaatgcaaaaaggttcacactaaaggaaactcctgattaggtattaatgctttatacagaaacctctatacaaatccaaacttgaagatcagaatggttctacagttcataacattttgaaggtggccttattttgtgatagtctgcttcatgtgattctcactaacatatctccttcctcaacctttgctgtaaaaatttcatttgcaccacatcagtactacttaatttaacaagcttttgttgtgtaagctctcactgttttagtgccctgctgcttgcttccagactttgtgctgtccagtaattatgtcttccactacccatcttgtgagcagagtaaatgtcctaggtaataccactatcaggcctgtaggagatactcagtggagcctctgcccttctttttcttacttgagaacttgtaatggtgttagggaacagttgtaggggcagaaaacaactctgaaagtggtagaaggtcctgatcttggtggttactcttgcattactgtgttaggtcaagcagtgcctactatgctgtttcagtagtggagcgcatctctacagttctgatgcgatttttctgtacagtatgaaattgggactcaactctttgaaaacacctattgagcagttatacctgttgagcagtttacttcctggttgtaattacatttgtgtgaatgtgtttgatgctttttaacgagatgatgttttttgtattttatctactgtggcctgattttttttttgttttctgcccctccccccatttataggtgtggttttcatttttctaagtgatagaatcccctctttgttgaatttttgtctttatttaaattagcaacattacttaggatttattcttcacaatactgttaattttctaggaatgatgacctgagaaccgaatggccatgctttctatcacatttctaagatgagtaatattttttccagtaggttccacagagacaccttgggggctggcttaggggaggctgttggagttctcactgacttagtggcatatttattctgtactgaagaactgcatggggtttcttttggaaagagtttcattgctttaaaaagaagctcagaaagtctttataaccactggtcaacgattagaaaaatataactggatttaggcctaccttctggaataccgctgattgtgctctttttatcctactttaaagaagctttcatgattagatttgagctatatcagttataccgattataccttataatacacattcagttagtaaacatttattgatgcctgttgtttgcccagccactgtgatggatattgaataataaaaagatgactaggacggggccctgacccttgagctgtgcttggtcttgtagaggttgtgttttttttcctcaggacctgtcactttggcagaaggaaatctgcctaatttttcttgaaagctaaattttctttgtaagtttttacaaattgtttaatacctagttgtattttttaccttaagccacattgagttttgcttgatttgtctgtcttttaaacactgtcaaatgctttcccttttgttaaaattattttaatttcactttttttgtgcccttgtcaatttaagactaagactttgaaggtaaaacaaacaaacaaacatcagtcttagtctcttgctagttgaaatcaaataaaagaaaatatatacccagttggtttctctacctcttaaaagcttcccatatatacctttaagatccttctcttttttctttaactactaaataggttcagcatttattcagtgttagataccctcttcgtctgagggtggcgtaggtttatgttgggatataaagtaacacaagacaatcttcactgtacataaaatatgtcttcatgtacagtctttactttaaaagctgaacattccaatttgcgccttccctcccaagcccctgcccaccaagtatctctttagatatctagtctgtggacatgaacaatgaatacttttttcttactctgatcgaaggcattgatacttagacatatcaaacatttcttcctttcatatgctttactttgctaaatctattatattcattgcctgaattttattcttcctttctacctgacaacacacatccaggtggtacttgctggttatcctctttcttgttagccttgttttttgttttttttttttttttttgagagggagtctcgctctgttgcccaacctggagtgcagtggtgcgatcttggttcactgcaagctccgcctcccgggttcacgccatgcttctgcctcagcctcccaagtagctgggactacaggcgcccaccaccacactcggctaattttttgtatttttagtagagacggggtttcaccgtgttggccaggatggtctcgatctcctgacctcgtgatctgtccacctcggcttcccaaagtgctgggattacaggcatgagccaccgcgcccagcctagccatatttttatctgcatatatcagaatgtttctctcctttgaacttattaacaaaaaaggaacatgcttttcatacctagagtcctaatttcttcatcatgaaggttgctattcaaattgatcaatcattttaattttacaaatggctcaaaaattctgttcagtaaatgtctttgtgactggcaaatggcataaattatgtttaagattatgaacttttctgacagttgcagccaatgttttccctacgataccagatttccatcttggggcatattggattgttgtatttaagacagtcagaataatgatagtgtgtggtctccagaggtagtcagaatcctgctattgagttctttttatatcttccttttcaattttttattaccattttgtttgtttagactacactttgtagggattgaggggcaaattatctcttggagtggaattcctgtgttttgagccttacaaccaggaaatatgagctatactagatagcctcatgatagcatttacgataagaacttatctcgtgtgttcatgtaattttttgagtaggaactgttttatcttgaatattgtagctaactatatatagcagaactgcctcagtctttttaagaaggaaataaataatatatgtgtatgaatttatatatacatatacactcatagacaaacttaacagttggggtcattctaacagttaaaacaattgttccattgtttaaatctcagatcctggtaaaatgttcttaatttgtctgtgtacattttcctttcatggacagaccattggagtacattaattttcttaatctgccatttggcagttcatttaatataccattttttggcaacttggtaactaagaatcacagccaaaatttgttaacatcaaagaaagctctgccatataccccgttactaaattattatacatccagcagattctgggatgtactaacttagggttaactttgttgttgttgataatactagattgctccctctttaattcttcttctggtgcaaggttgctgcttaagttaccctgggaaatactactacaaggtcaaattttctagtatcttacagcctgattgaaggtgattcagatctttgctcaatataaatggattttccaagattctctgggccatccttgacccacaggtgatctcgctggagtatattaacttaacttcagtgccagttggtttggtgccatgagatccataatgaatccagaacttcaccattgcttagatataagagtcccttggaagaataatgccactgatgatgggggtcagaaggtgtattaactcaacatagagggcttttagatttttcttcaaaaaaatttcgagaaaagtattcttttaccctccaaacagttaacagctcttagtttctccaaatatgctctttgatttacttatttttaattaaagatggtaatttattgaacaatgaaatccgtaatatattgatttaaggacaaaagtgaagttttagaattataaaagtacttaaatattatatattttccatttcataattgttttcctttctctgtggctttaaagtttttgactattttacaatgttaatcactaggtaacttgccatatttctggttctatattaagttctatcctttataatgctgttattataaagctggtttttagcatttgtctgtagcaatagaaattttactaagtctctgttctcccagtaagttttttcttttctcagtaagtccctaagaaaacatttgtttgccactcttactattcccaatcttggattgttcgagctgaaaaaaaatttgatgagaaacaggaggatccttttctggtgaatataggttcctgctttaagaatgtggaaatccattgctttatataactaatatacacacagattaattaaaattgtgagaaataattcacacatgacaagtaggtaacatgcatgagttttgaatttttttaaaaacccaactgtttgacaaaatatagaacccaaattggtactttcttagaccagtgtaacctcacacctcagttttgcttttccaaccctgacttgaaaggcatatttgtatctttttattagtgatagtgaagctgtgacactaaccttttatacaaaagagtaaagaaagaaaaactacagcgattaagatgagaacagttctgcagttgttgaactagatcacagcattgtaggcagaataaaaaatgttcatatctgagaatattcctttcgccatcttttcccaaggccagacctcctggtggagcacagttaaaagtaacattctgggcctttgtaatcggagggctgtgtctccagctggcagcctttgttttaatatataatgcaggactgtggaaaacagttggcatagaatattttcacctaaaaaagaaagaaaagacatacaaaactggattaattgcaaaaagagaatacagtaaaataccatataactggacaaagctagaagaacctttagaagatttgtctgaaaacagatttcaagagtgagcttttatacactgctcactaatttgcttgattactaccaactcttcttaaagttaacacgtttaaggtatttctggacttcctagccttttagcaagcttagaggaactagccattagctagtgatgtaaaaatattttggggactgatgcccttaaaggttatgcccttgaaagttcttaccttttctctagtgatattaaggaacgagtgggtagtgttctcagggtgaccagctgccctaaagtgcctgggattgagggtttccctggatgcgggactttccctggatacaaaacttttagcagagttttgtatatatgtggatttttctgataagtagcacatcagaggccttaaccactgcccaaaagcgattctccattgagagtacatatcttgaacttaagaaattcatttgctctgatttttaatcttgtaaagtttttgctaaactcaaaacaagtcccaggcacaccagaaggagctgaccaccttaggtgttcttgtgatttatccttacttccctatgttgtcatagttgcttctaaactcagctgcactatggctgtcaacatttctgatacttattgggatatgtgccatccagtcatttagtactttgaatggaacatgagatttataacacaggtaatagctgaaggtaccagtatggtggtgagactcacacttagtgatccagctaaggtaactgatgttataatggaacagagaagaggccaactagatagctaagttcttctgaacctatgtgtatatgtaagtacaaatcatgcgtccttatggggttaaacttaatctgaaatttacatttttcatagtaaaaggaaaccaattgttgcagatttcttttcttgtgaggaaatacatggcctttgatgctctggcgtctactgcatttcccagtctgttctgctcgagaagccagaatgtgttgttaacatttttccgtgaatgttgtgttaaaatgattaaatgcatcagccaatggcaagtgaaggaattgggtgtcctgatgcagactgagcagtttctctcaattgtagcctcatactcataaggtgcttaccagctagaacattgagcacgtgaggtgagattttttttctctgatggcattaactttgtaatgcaatatgatggatgcagaccctgttcttgtttccctctggaagtccttagtggctgcatccttggtgcactgtgatggagatattaaatgtgttctttgtgagctttcgttctatgattgtcaaaagtacgatgtggttccttttttatttttattaaacaatgagctgaggctttattacagctggttttcaagttaaaattgttgaatactgatgtctttctcccacctacaccaaatattttagtctatttaaagtacaaaaaaagttctgcttaagaaaacattgcttacatgtcctgtgatttctggtcaatttttatatatatttgtgtgcatcatctgtatgtgctttcactttttaccttgtttgctcttacctgtgttaacagccctgtcaccgttgaaaggtggacagttttcctagcattaaaagaaagccatttgagttgtttaccatgttactatgggactaatttttaattgttttaatttttatttaaactgatctttttttatatgggattacattttggtgttcactccctaaattatatggaaaccaaaaaaagtgattgtatttcacatatggacatatgattttaagagtacatgtttttgtttttttaatttggtgttacataaaagattatcctatccccccgggagataaatttatactacttaatataaccccacaacaggcgcacaccacacactgcacagtgctatttatacatttttatttatttcagagtttgcctatgctacattagcgctctaatacataagatctatgctgtaaacaaaaacatcttcaaagttgaaatttgctgaaatatacttttaacaaaataacatttttaaggctccattgaaaaatactagataagatataatctcatataatcagtatgaataattttaaaaatgagaaatatttaggtcagccacacttcctttgtgccttgcaagaattcagttctgtggatgaatcagtactggttagcagactgttttctgcaaaccattttaaacatgctttagtatgcaacaaaaagggacctcaaatgctaaaatacactattttacgtggcattgaatagccttgggactggtgtagttttatcaacacttttttattaggaagaaacccaagaaaatttactgtaattgctaccacctgccactgtataaataatctaaaagggacttcccaacattgaacaacaacattgagggctgactcgagatccttctacattgtcacctcagcctggctttgcctgtcactgcttagcttgaagtagtgacactgttctgtatcaggagatttttataatggccctagcatccataattccacatgttcatcaaatggctgaagagtatgagagaagtattaaggtctatgtttgggctgtctccccacttggcatattctgtttttccctcttcaaaatagattgaaagcctcttagtgcaggaagcaggcatcagtatcaaactgatgtcatccaatgtaattattttaagctccaggtttgtctaagtttgggtgaagaatgttcaggaacatgtttgcaacatacagttatccagcttaccctttgacagattcacccttctcatcaaaatagtaagcccaacctaaaaattataagtttacaaataaaggaatagaaaaacccaaaaagctaatttacacataaaaattatcttttgctgcaataaataggtatggaaatatttgtagaattggtttaactgattttgtaaaacaaatgtcatgctattttgccatagtgagacatgcagtaattcttaaaatcacattaatagaaggcaagaacattgaatcagacttagcagataacagattcagtgataaatgaacaatagactaagcatacttaggaagctacatgagaacagaatgtattactgtgctcccgtccaaactgcatgactttattggttatagaataaatggaatttgagatgggga

SEQ ID NO: 294732 - DNA, 10531 bp, Artificial Sequence
  derived and/or modified sequence
gggaggcggggcgggccgtaggcaaagggaggtggggaggcggtggccggcgactccccgcgccccgctcgccccccggcccttcccgcggtgctcggcctcgttcctttcctcctccgctccctccgtcttccatacccgccccgcgcggctttcggccggcgtgcctcgcgccctaacgggcggctggaggcgccaatcagcgggcggcagggtgccagccccggggctgcgccggcgaatcggcggggcccgcggcccagggtggcaggcgggtctacccgcgcggccgcggcggcggagaagcagctcgccagccagcagcccgccagccgccgggaggttcgatacaagaggctgttttcctagcgtggcttgctgcctttggtaagaacatgtcgtccatcttgccattcacgccgccagttgtgaagagactgctgggatggaagaagtcagctggtgggtctggaggagcaggcggaggagagcagaatgggcaggaagaaaagtggtgtgagaaagcagtgaaaagtctggtgaagaagctaaagaaaacaggacgattagatgagcttgagaaagccatcaccactcaaaactgtaatactaaatgtgttaccataccaagcacttgctctgaaatttggggactgagtacaccaaatacgatagatcagtgggatacaacaggcctttacagcttctctgaacaaaccaggtctcttgatggtcgtctccaggtatcccatcgaaaaggattgccacatgttatatattgccgattatggcgctggcctgatcttcacagtcatcatgaactcaaggcaattgaaaactgcgaatatgcttttaatcttaaaaaggatgaagtatgtgtaaacccttaccactatcagagagttgagacaccagttttgcctccagtattagtgccccgacacaccgagatcctaacagaacttccgcctctggatgactatactcactccattccagaaaacactaacttcccagcaggaattgagccacagagtaattatattccagaaacgccacctcctggatatatcagtgaagatggagaaacaagtgaccaacagttgaatcaaagtatggacacaggctctccagcagaactatctcctactactctttcccctgttaatcatagcttggatttacagccagttacttactcagaacctgcattttggtgttcgatagcatattatgaattaaatcagagggttggagaaaccttccatgcatcacagccctcactcactgtagatggctttacagacccatcaaattcagagaggttctgcttaggtttactctccaatgttaaccgaaatgccacggtagaaatgacaagaaggcatataggaagaggagtgcgcttatactacataggtggggaagtttttgctgagtgcctaagtgatagtgcaatctttgtgcagagccccaattgtaatcagagatatggctggcaccctgcaacagtgtgtaaaattccaccaggctgtaatctgaagatcttcaacaaccaggaatttgctgctcttctggctcagtctgttaatcagggttttgaagccgtctatcagctaactagaatgtgcaccataagaatgagttttgtgaaagggtggggagcagaataccgaaggcagacggtaacaagtactccttgctggattgaacttcatctgaatggacctctacagtggttggacaaagtattaactcagatgggatccccttcagtgcgttgctcaagcatgtcataaagcttcaccaatcaagtcccatgaaaagacttaatgtaacaactcttctgtcatagcattgtgtgtggtccctatggactgtttactatccaaaagttcaagagagaaaacagcacttgaggtctcatcaattaaagcaccttgtggaatctgtttcctatatttgaatattagatgggaaaattagtgtctagaaatactctcccattaaagaggaagagaagattttaaagacttaatgatgtcttattgggcataaaactgagtgtcccaaaggtttattaataacagtagtagttatgtgtacaggtaatgtatcatgatccagtatcacagtattgtgctgtttatatacatttttagtttgcatagatgaggtgtgtgtgtgcgctgcttcttgatctaggcaaacctttataaagttgcagtacctaatctgttattcccacttctctgttatttttgtgtgtcttttttaatatataatatatatcaagattttcaaattatttagaagcagattttcctgtagaaaaactaatttttctgccttttaccaaaaataaactcttgggggaagaaaagtggattaacttttgaaatccttgaccttaatgtgttcagtggggcttaaacagtcattctttttgtggttttttgtttttttttgtttttttttttaactgctaaatcttattataaggaaaccatactgaaaacctttccaagcctcttttttccattcccatttttgtcctcataatcaaaacagcataacatgacatcatcaccagtaatagttgcattgatactgctggcaccagttaattctgggatacagtaagaattcatatggagaaagtccctttgtcttatgcccaaatttcaacaggaataattggcttgtataatctagcagtctgttgatttatccttccacctcataaaaaatgcataggtggcagtataattattttcagggatatgctagaattacttccacatatttatccctttttaaaaaagctaatctataaataccgtttttccaaaggtattttacaatatttcaacagcagaccttctgctcttcgagtagtttgatttggtttagtaaccagattgcattatgaaatgggccttttgtaaatgtaattgtttctgcaaaatacctagaaaagtgatgctgaggtaggatcagcagatatgggccatctgtttttaaagtatgttgtattcagtttataaattgattgttattctacacataattatgaattcagaattttaaaaattgggggaaaagccatttatttagcaagttttttagcttataagttacctgcagtctgagctgttcttaactgatcctggttttgtgattgacaatatttcatgctctgtagtgagaggagatttccgaaactctgttgctagttcattctgcagcaaataattattatgtctgatgttgactcattgcagtttaaacatttcttcttgtttgcatcttagtagaaatggaaaataaccactcctggtcgtcttttcataaattttcatatttttgaagctgtctttggtacttgttctttgaaatcatatccacctgtctctataggtatcattttcaatactttcaacatttggtggttttctattgggtactccccattttcctatatttgtgtgtatatgtatgtgttcatgtaaatttggtatagtaattttttattcattcaacaaatatttattgttcacctgtttgtaccaggaacttttcttagtctttgggtaaaggtgaacaagacaactacagttcctgcctttgctgagacagcagttacactaacccttaattatcttacttgtctatgaaggagataaacagggtactgtactggagaataacagatgggatgcttcaggtaggacatcaaggaaagcctctaaggaaaggatgcatgagctaacacctgacattaaagaagcaagccaagtgaggagccaggggagataagcattcctggcaaagagaatagcatcaaatgcaaaaaggttcacactaaaggaaactcctgattaggtattaatgctttatacagaaacctctatacaaatccaaacttgaagatcagaatggttctacagttcataacattttgaaggtggccttattttgtgatagtctgcttcatgtgattctcactaacatatctccttcctcaacctttgctgtaaaaatttcatttgcaccacatcagtactacttaatttaacaagcttttgttgtgtaagctctcactgttttagtgccctgctgcttgcttccagactttgtgctgtccagtaattatgtcttccactacccatcttgtgagcagagtaaatgtcctaggtaataccactatcaggcctgtaggagatactcagtggagcctctgcccttctttttcttacttgagaacttgtaatggtgttagggaacagttgtaggggcagaaaacaactctgaaagtggtagaaggtcctgatcttggtggttactcttgcattactgtgttaggtcaagcagtgcctactatgctgtttcagtagtggagcgcatctctacagttctgatgcgatttttctgtacagtatgaaattgggactcaactctttgaaaacacctattgagcagttatacctgttgagcagtttacttcctggttgtaattacatttgtgtgaatgtgtttgatgctttttaacgagatgatgttttttgtattttatctactgtggcctgattttttttttgttttctgcccctccccccatttataggtgtggttttcatttttctaagtgatagaatcccctctttgttgaatttttgtctttatttaaattagcaacattacttaggatttattcttcacaatactgttaattttctaggaatgatgacctgagaaccgaatggccatgctttctatcacatttctaagatgagtaatattttttccagtaggttccacagagacaccttgggggctggcttaggggaggctgttggagttctcactgacttagtggcatatttattctgtactgaagaactgcatggggtttcttttggaaagagtttcattgctttaaaaagaagctcagaaagtctttataaccactggtcaacgattagaaaaatataactggatttaggcctaccttctggaataccgctgattgtgctctttttatcctactttaaagaagctttcatgattagatttgagctatatcagttataccgattataccttataatacacattcagttagtaaacatttattgatgcctgttgtttgcccagccactgtgatggatattgaataataaaaagatgactaggacggggccctgacccttgagctgtgcttggtcttgtagaggttgtgttttttttcctcaggacctgtcactttggcagaaggaaatctgcctaatttttcttgaaagctaaattttctttgtaagtttttacaaattgtttaatacctagttgtattttttaccttaagccacattgagttttgcttgatttgtctgtcttttaaacactgtcaaatgctttcccttttgttaaaattattttaatttcactttttttgtgcccttgtcaatttaagactaagactttgaaggtaaaacaaacaaacaaacatcagtcttagtctcttgctagttgaaatcaaataaaagaaaatatatacccagttggtttctctacctcttaaaagcttcccatatatacctttaagatccttctcttttttctttaactactaaataggttcagcatttattcagtgttagataccctcttcgtctgagggtggcgtaggtttatgttgggatataaagtaacacaagacaatcttcactgtacataaaatatgtcttcatgtacagtctttactttaaaagctgaacattccaatttgcgccttccctcccaagcccctgcccaccaagtatctctttagatatctagtctgtggacatgaacaatgaatacttttttcttactctgatcgaaggcattgatacttagacatatcaaacatttcttcctttcatatgctttactttgctaaatctattatattcattgcctgaattttattcttcctttctacctgacaacacacatccaggtggtacttgctggttatcctctttcttgttagccttgttttttgttttttttttttttttttgagagggagtctcgctctgttgcccaacctggagtgcagtggtgcgatcttggttcactgcaagctccgcctcccgggttcacgccatgcttctgcctcagcctcccaagtagctgggactacaggcgcccaccaccacactcggctaattttttgtatttttagtagagacggggtttcaccgtgttggccaggatggtctcgatctcctgacctcgtgatctgtccacctcggcttcccaaagtgctgggattacaggcatgagccaccgcgcccagcctagccatatttttatctgcatatatcagaatgtttctctcctttgaacttattaacaaaaaaggaacatgcttttcatacctagagtcctaatttcttcatcatgaaggttgctattcaaattgatcaatcattttaattttacaaatggctcaaaaattctgttcagtaaatgtctttgtgactggcaaatggcataaattatgtttaagattatgaacttttctgacagttgcagccaatgttttccctacgataccagatttccatcttggggcatattggattgttgtatttaagacagtcagaataatgatagtgtgtggtctccagaggtagtcagaatcctgctattgagttctttttatatcttccttttcaattttttattaccattttgtttgtttagactacactttgtagggattgaggggcaaattatctcttggagtggaattcctgtgttttgagccttacaaccaggaaatatgagctatactagatagcctcatgatagcatttacgataagaacttatctcgtgtgttcatgtaattttttgagtaggaactgttttatcttgaatattgtagctaactatatatagcagaactgcctcagtctttttaagaaggaaataaataatatatgtgtatgaatttatatatacatatacactcatagacaaacttaacagttggggtcattctaacagttaaaacaattgttccattgtttaaatctcagatcctggtaaaatgttcttaatttgtctgtgtacattttcctttcatggacagaccattggagtacattaattttcttaatctgccatttggcagttcatttaatataccattttttggcaacttggtaactaagaatcacagccaaaatttgttaacatcaaagaaagctctgccatataccccgttactaaattattatacatccagcagattctgggatgtactaacttagggttaactttgttgttgttgataatactagattgctccctctttaattcttcttctggtgcaaggttgctgcttaagttaccctgggaaatactactacaaggtcaaattttctagtatcttacagcctgattgaaggtgattcagatctttgctcaatataaatggattttccaagattctctgggccatccttgacccacaggtgatctcgctggagtatattaacttaacttcagtgccagttggtttggtgccatgagatccataatgaatccagaacttcaccattgcttagatataagagtcccttggaagaataatgccactgatgatgggggtcagaaggtgtattaactcaacatagagggcttttagatttttcttcaaaaaaatttcgagaaaagtattcttttaccctccaaacagttaacagctcttagtttctccaaatatgctctttgatttacttatttttaattaaagatggtaatttattgaacaatgaaatccgtaatatattgatttaaggacaaaagtgaagttttagaattataaaagtacttaaatattatatattttccatttcataattgttttcctttctctgtggctttaaagtttttgactattttacaatgttaatcactaggtaacttgccatatttctggttctatattaagttctatcctttataatgctgttattataaagctggtttttagcatttgtctgtagcaatagaaattttactaagtctctgttctcccagtaagttttttcttttctcagtaagtccctaagaaaacatttgtttgccactcttactattcccaatcttggattgttcgagctgaaaaaaaatttgatgagaaacaggaggatccttttctggtgaatataggttcctgctttaagaatgtggaaatccattgctttatataactaatatacacacagattaattaaaattgtgagaaataattcacacatgacaagtaggtaacatgcatgagttttgaatttttttaaaaacccaactgtttgacaaaatatagaacccaaattggtactttcttagaccagtgtaacctcacacctcagttttgcttttccaaccctgacttgaaaggcatatttgtatctttttattagtgatagtgaagctgtgacactaaccttttatacaaaagagtaaagaaagaaaaactacagcgattaagatgagaacagttctgcagttgttgaactagatcacagcattgtaggcagaataaaaaatgttcatatctgagaatattcctttcgccatcttttcccaaggccagacctcctggtggagcacagttaaaagtaacattctgggcctttgtaatcggagggctgtgtctccagctggcagcctttgttttaatatataatgcaggactgtggaaaacagttggcatagaatattttcacctaaaaaagaaagaaaagacatacaaaactggattaattgcaaaaagagaatacagtaaaataccatataactggacaaagctagaagaacctttagaagatttgtctgaaaacagatttcaagagtgagcttttatacactgctcactaatttgcttgattactaccaactcttcttaaagttaacacgtttaaggtatttctggacttcctagccttttagcaagcttagaggaactagccattagctagtgatgtaaaaatattttggggactgatgcccttaaaggttatgcccttgaaagttcttaccttttctctagtgatattaaggaacgagtgggtagtgttctcagggtgaccagctgccctaaagtgcctgggattgagggtttccctggatgcgggactttccctggatacaaaacttttagcagagttttgtatatatgtggatttttctgataagtagcacatcagaggccttaaccactgcccaaaagcgattctccattgagagtacatatcttgaacttaagaaattcatttgctctgatttttaatcttgtaaagtttttgctaaactcaaaacaagtcccaggcacaccagaaggagctgaccaccttaggtgttcttgtgatttatccttacttccctatgttgtcatagttgcttctaaactcagctgcactatggctgtcaacatttctgatacttattgggatatgtgccatccagtcatttagtactttgaatggaacatgagatttataacacaggtaatagctgaaggtaccagtatggtggtgagactcacacttagtgatccagctaaggtaactgatgttataatggaacagagaagaggccaactagatagctaagttcttctgaacctatgtgtatatgtaagtacaaatcatgcgtccttatggggttaaacttaatctgaaatttacatttttcatagtaaaaggaaaccaattgttgcagatttcttttcttgtgaggaaatacatggcctttgatgctctggcgtctactgcatttcccagtctgttctgctcgagaagccagaatgtgttgttaacatttttccgtgaatgttgtgttaaaatgattaaatgcatcagccaatggcaagtgaaggaattgggtgtcctgatgcagactgagcagtttctctcaattgtagcctcatactcataaggtgcttaccagctagaacattgagcacgtgaggtgagattttttttctctgatggcattaactttgtaatgcaatatgatggatgcagaccctgttcttgtttccctctggaagtccttagtggctgcatccttggtgcactgtgatggagatattaaatgtgttctttgtgagctttcgttctatgattgtcaaaagtacgatgtggttccttttttatttttattaaacaatgagctgaggctttattacagctggttttcaagttaaaattgttgaatactgatgtctttctcccacctacaccaaatattttagtctatttaaagtacaaaaaaagttctgcttaagaaaacattgcttacatgtcctgtgatttctggtcaatttttatatatatttgtgtgcatcatctgtatgtgctttcactttttaccttgtttgctcttacctgtgttaacagccctgtcaccgttgaaaggtggacagttttcctagcattaaaagaaagccatttgagttgtttaccatgtta

SEQ ID NO: 294733 - protein, 172 aa, Artificial Sequence
  derived and/or modified sequence
MALIILLILTEDDGFNRSIHEVILKNITWYSERVLTEISLGSLLILVVIRTIQYNMTRTRDKYLHTNCLAALANMSAQFRSLHQYAAQRIISYTCRHLRRYVYVLDKLYFPHSHCSTLQHCFSTLSDNGEELLSLTCSHILRSYASSLFSLLSKKHNKVLEQATQSLRGSLS

SEQ ID NO: 294734 - DNA, 519 bp, Artificial Sequence
  derived and/or modified sequence
atggctctgatcatactcctgattttaaccgaggacgacgggttcaaccggtctattcatgaagtaatcttgaagaatattacttggtactctgaacgggtgcttacggaaatctcccttggctccctcctgattttggtggtgattaggacaatccaatataacatgacccgaacacgtgacaagtatttgcacactaattgtctggcagccctggcaaatatgagtgctcaattcaggtccctccaccagtacgccgcacagcgaataatctcctacacatgtcggcacttgcggcgatacgtttatgtcttggacaagctctacttcccccactctcattgttccaccctgcaacactgtttcagcactctgtcagataacggtgaagaactgttgtctctgacatgtagccacattctgaggtcatacgctagctcacttttcagtttgctatcaaagaagcataataaggtcctggaacaggcaacgcaaagcctgcgcggatctctaagctag

SEQ ID NO: 294735 - DNA, 519 bp, Artificial Sequence
  derived and/or modified sequence
atggccctgatcatcctgctgatcctgacagaagatgatggcttcaacagaagcatccacgaggtgatcctgaagaacatcacctggtacagcgagcgggtgctgacagagatcagcctgggcagcctgctgatcctggtggtgatccgcaccatccagtacaacatgaccaggacccgggacaagtacctgcacaccaactgcctggccgccctggccaacatgtctgcccagttccgcagcctgcaccagtatgctgcccagaggatcatctcctacacctgccgccacctgcggcgctacgtgtatgtgctggacaagctgtacttcccccacagccactgcagcaccctgcagcactgcttcagcaccctgagtgacaacggggaggagctgctgagcctgacctgcagccacatcctgcggagctatgccagcagcctcttcagcctgctgagcaagaagcacaacaaggtgctggagcaggccacccagagcctgcggggcagcctgtcctag

SEQ ID NO: 294736 - DNA, 519 bp, Artificial Sequence
  derived and/or modified sequence
atggccctgatcatcctgctgatcctgaccgaggacgacggcttcaaccggtccatccacgaggtaatccttaagaatatcacttggtattctgagcgagtgctgacggaaatctctctcgggtctctcctcatcctggtcgtgatcagaacgattcagtacaacatgacgaggactcgtgataagtacctccacactaactgcctcgcagccctggcaaatatgagtgcccagtttcggagcctccatcagtacgccgcccaacggataatttcatatacctgccgccatctgcgtaggtatgtgtacgtcctggacaagctgtacttccctcatagtcattgctccactttgcagcactgttttagtactctgagtgataacggagaagaattgctatcgctgacatgttctcacatccttagatcctatgcaagcagcctcttcagtctcctgtcgaagaagcataacaaggtcctggaacaggctactcaatctctgaggggctccctgtcctag

SEQ ID NO: 294737 - DNA, 519 bp, Artificial Sequence
  derived and/or modified sequence
atggccctcataatcttattgatcctgactgaggatgacggttttaacaggtccatccatgaggtgatcctgaaaaatatcacttggtacagtgagagagtgctgaccgagataagcctgggctctctgctaatcctagtggtgataaggacgatccagtacaacatgactcgtactagggacaagtacttgcacaccaactgcctggcagcactggctaacatgtcagcccaatttagaagcctgcatcaatatgcagctcaaaggataatatcttacacttgcagacatcttcgcaggtatgtttacgtcctggacaagctgtactttccacacagccactgctcaactctccagcattgtttttcaaccctaagtgacaatggcgaggagctgctgagcttgacctgctcccacatactgaggtcatacgcgagctccctgttctcactactaagcaagaaacataacaaagtgttagaacaagcgacacagagtcttcgagggtccttgtcctag

SEQ ID NO: 294738 - DNA, 519 bp, Artificial Sequence
  derived and/or modified sequence
atggccctgatcatcctgctgatcctgaccgaggacgacggcttcaacagaagcatccacgaggtgatcctgaagaacatcacctggtacagcgagagagtgctgaccgagatcagcctgggcagcctgctgatcctggtggtgatcagaaccatccagtacaacatgaccagaaccagagacaagtacctgcacaccaactgcctggccgccctggccaacatgagcgcccagttcagaagcctgcaccagtacgccgcccagagaatcatcagctacacctgcagacacctgagaagatacgtgtacgtgctggacaagctgtacttcccccacagccactgcagcaccctgcagcactgcttcagcaccctgagcgacaacggcgaggagctgctgagcctgacctgcagccacatcctgagaagctacgccagcagcctgttcagcctgctgagcaagaagcacaacaaggtgctggagcaggccacccagagcctgagaggcagcctgagctag

SEQ ID NO: 294739 - protein, 897 aa, Artificial Sequence
  derived and/or modified sequence
MNISGSSCGSPNSADTSSDFKDLWTKLKECHDREVQGLQVKVTKLKQERILDAQRLEEFFTKNQQLREQQKVLHETIKVLEDRLRAGLCDRCAVTEEHMRKKQQEFENIRQQNLKLITELMNERNTLQEENKKLSEQLQQKIENDQQHQAAELECEEDVIPDSPITAFSFSGVNRLRRKENPHVRYIEQTHTKLEHSVCANEMRKVSKSSTHPQHNPNENEILVADTYDQSQSPMAKAHGTSSYTPDKSSFNLATVVAETLGLGVQEESETQGPMSPLGDELYHCLEGNHKKQPFEESTRNTEDSLRFSDSTSKTPPQEELPTRVSSPVFGATSSIKSGLDLNTSLSPSLLQPGKKKHLKTLPFSNTCISRLEKTRSKSEDSALFTHHSLGSEVNKIIIQSSNKQILINKNISESLGEQNRTEYGKDSNTDKHLEPLKSLGGRTSKRKKTEEESEHEVSCPQASFDKENAFPFPMDNQFSMNGDCVMDKPLDLSDRFSAIQRQEKSQGSETSKNKFRQVTLYEALKTIPKGFSSSRKASDGNCTLPKDSPGEPCSQECIILQPLNKCSPDNKPSLQIKEENAVFKIPLRPRESLETENVLDDIKSAGSHEPIKIQTRSDHGGCELASVLQLNPCRTGKIKSLQNNQDVSFENIQWSIDPGADLSQYKMDVTVIDTKDGSQSKLGGETVDMDCTLVSETVLLKMKKQEQKGEKSSNEERKMNDSLEDMFDRTTHEEYESCLADSFSQAADEEEELSTATKKLHTHGDKQDKVKQKAFVEPYFKGDERETSLQNFPHIEVVRKKEERRKLLGHTCKECEIYYADMPAEEREKKLASCSRHRFRYIPPNTPENFWEVGFPSTQTCMERGYIKEDLDPCPRPKRRQPYNAIFSPKGKEQKT

SEQ ID NO: 294740 - protein, 902 aa, Artificial Sequence
  derived and/or modified sequence
MNISGSSCGSPNSADTSSDFKDLWTKLKECHDREVQGLQVKVTKLKQERILDAQRLEEFFTKNQQLREQQKVLHETIKVLEDRLRAGLCDRCAVTEEHMRKKQQEFENIRQQNLKLITELMNERNTLQEENKKLSEQLQQKIENDQQHQAAELECEEDVIPDSPITAFSFSGVNRLRRKENPHVRYIEQTHTKLEHSVCANEMRKVSKSSTHPQHNPNENEILVADTYDQSQSPMAKAHGTSSYTPDKSSFNLATVVAETLGLGVQEESETQGPMSPLGDELYHCLEGNHKKQPFEESTRNTEDSLRFSDSTSKTPPQEELPTRVSSPVFGATSSIKSGLDLNTSLSPSLLQPGKKKHLKTLPFSNTCISRLEKTRSKSEDSALFTHHSLGSEVNKIIIQSSNKQILINKNISESLGEQNRTEYGKDSNTDKHLEPLKSLGGRTSKRKKTEEESEHEVSCPQASFDKENAFPFPMDNQFSMNGDCVMDKPLDLSDRFSAIQRQEKSQGSETSKNKFRQVTLYEALKTIPKGFSSSRKASDGNCTLPKDSPGEPCSQECIILQPLNKCSPDNKPSLQIKEENAVFKIPLRPRESLETENVLDDIKSAGSHEPIKIQTRSDHGGCELASVLQLNPCRTGKIKSLQNNQDVSFENIQWSIDPGADLSQYKMDVTVIDTKDGSQSKLGGETVDMDCTLVSETVLLKMKKQEQKGEKSSMLFYIDEERKMNDSLEDMFDRTTHEEYESCLADSFSQAADEEEELSTATKKLHTHGDKQDKVKQKAFVEPYFKGDERETSLQNFPHIEVVRKKEERRKLLGHTCKECEIYYADMPAEEREKKLASCSRHRFRYIPPNTPENFWEVGFPSTQTCMERGYIKEDLDPCPRPKRRQPYNAIFSPKGKEQKT

SEQ ID NO: 294741 - DNA, 2694 bp, Artificial Sequence
  derived and/or modified sequence
atgaacatcagcggcagcagctgcggcagccccaacagcgccgacaccagcagcgacttcaaggacctgtggaccaagctgaaggagtgccacgacagagaggtgcagggcctgcaggtgaaggtgaccaagctgaagcaggagagaatcctggacgcccagagactggaggagttcttcaccaagaaccagcagctgagagagcagcagaaggtgctgcacgagaccatcaaggtgctggaggacagactgagagccggcctgtgcgacagatgcgccgtgaccgaggagcacatgagaaagaagcagcaggagttcgagaacatcagacagcagaacctgaagctgatcaccgagctgatgaacgagagaaacaccctgcaggaggagaacaagaagctgagcgagcagctgcagcagaagatcgagaacgaccagcagcaccaggccgccgagctggagtgcgaggaggacgtgatccccgacagccccatcaccgccttcagcttcagcggcgtgaacagactgagaagaaaggagaacccccacgtgagatacatcgagcagacccacaccaagctggagcacagcgtgtgcgccaacgagatgagaaaggtgagcaagagcagcacccacccccagcacaaccccaacgagaacgagatcctggtggccgacacctacgaccagagccagagccccatggccaaggcccacggcaccagcagctacacccccgacaagagcagcttcaacctggccaccgtggtggccgagaccctgggcctgggcgtgcaggaggagagcgagacccagggccccatgagccccctgggcgacgagctgtaccactgcctggagggcaaccacaagaagcagcccttcgaggagagcaccagaaacaccgaggacagcctgagattcagcgacagcaccagcaagacccccccccaggaggagctgcccaccagagtgagcagccccgtgttcggcgccaccagcagcatcaagagcggcctggacctgaacaccagcctgagccccagcctgctgcagcccggcaagaagaagcacctgaagaccctgcccttcagcaacacctgcatcagcagactggagaagaccagaagcaagagcgaggacagcgccctgttcacccaccacagcctgggcagcgaggtgaacaagatcatcatccagagcagcaacaagcagatcctgatcaacaagaacatcagcgagagcctgggcgagcagaacagaaccgagtacggcaaggacagcaacaccgacaagcacctggagcccctgaagagcctgggcggcagaaccagcaagagaaagaagaccgaggaggagagcgagcacgaggtgagctgcccccaggccagcttcgacaaggagaacgccttccccttccccatggacaaccagttcagcatgaacggcgactgcgtgatggacaagcccctggacctgagcgacagattcagcgccatccagagacaggagaagagccagggcagcgagaccagcaagaacaagttcagacaggtgaccctgtacgaggccctgaagaccatccccaagggcttcagcagcagcagaaaggccagcgacggcaactgcaccctgcccaaggacagccccggcgagccctgcagccaggagtgcatcatcctgcagcccctgaacaagtgcagccccgacaacaagcccagcctgcagatcaaggaggagaacgccgtgttcaagatccccctgagacccagagagagcctggagaccgagaacgtgctggacgacatcaagagcgccggcagccacgagcccatcaagatccagaccagaagcgaccacggcggctgcgagctggccagcgtgctgcagctgaacccctgcagaaccggcaagatcaagagcctgcagaacaaccaggacgtgagcttcgagaacatccagtggagcatcgaccccggcgccgacctgagccagtacaagatggacgtgaccgtgatcgacaccaaggacggcagccagagcaagctgggcggcgagaccgtggacatggactgcaccctggtgagcgagaccgtgctgctgaagatgaagaagcaggagcagaagggcgagaagagcagcaacgaggagagaaagatgaacgacagcctggaggacatgttcgacagaaccacccacgaggagtacgagagctgcctggccgacagcttcagccaggccgccgacgaggaggaggagctgagcaccgccaccaagaagctgcacacccacggcgacaagcaggacaaggtgaagcagaaggccttcgtggagccctacttcaagggcgacgagagagagaccagcctgcagaacttcccccacatcgaggtggtgagaaagaaggaggagagaagaaagctgctgggccacacctgcaaggagtgcgagatctactacgccgacatgcccgccgaggagagagagaagaagctggccagctgcagcagacacagattcagatacatcccccccaacacccccgagaacttctgggaggtgggcttccccagcacccagacctgcatggagagaggctacatcaaggaggacctggacccctgccccagacccaagagaagacagccctacaacgccatcttcagccccaagggcaaggagcagaagacctag

SEQ ID NO: 294742 - DNA, 2709 bp, Artificial Sequence
  derived and/or modified sequence
atgaacatcagcggcagcagctgcggcagccccaacagcgccgacaccagcagcgacttcaaggacctgtggaccaagctgaaggagtgccacgacagagaggtgcagggcctgcaggtgaaggtgaccaagctgaagcaggagagaatcctggacgcccagagactggaggagttcttcaccaagaaccagcagctgagagagcagcagaaggtgctgcacgagaccatcaaggtgctggaggacagactgagagccggcctgtgcgacagatgcgccgtgaccgaggagcacatgagaaagaagcagcaggagttcgagaacatcagacagcagaacctgaagctgatcaccgagctgatgaacgagagaaacaccctgcaggaggagaacaagaagctgagcgagcagctgcagcagaagatcgagaacgaccagcagcaccaggccgccgagctggagtgcgaggaggacgtgatccccgacagccccatcaccgccttcagcttcagcggcgtgaacagactgagaagaaaggagaacccccacgtgagatacatcgagcagacccacaccaagctggagcacagcgtgtgcgccaacgagatgagaaaggtgagcaagagcagcacccacccccagcacaaccccaacgagaacgagatcctggtggccgacacctacgaccagagccagagccccatggccaaggcccacggcaccagcagctacacccccgacaagagcagcttcaacctggccaccgtggtggccgagaccctgggcctgggcgtgcaggaggagagcgagacccagggccccatgagccccctgggcgacgagctgtaccactgcctggagggcaaccacaagaagcagcccttcgaggagagcaccagaaacaccgaggacagcctgagattcagcgacagcaccagcaagacccccccccaggaggagctgcccaccagagtgagcagccccgtgttcggcgccaccagcagcatcaagagcggcctggacctgaacaccagcctgagccccagcctgctgcagcccggcaagaagaagcacctgaagaccctgcccttcagcaacacctgcatcagcagactggagaagaccagaagcaagagcgaggacagcgccctgttcacccaccacagcctgggcagcgaggtgaacaagatcatcatccagagcagcaacaagcagatcctgatcaacaagaacatcagcgagagcctgggcgagcagaacagaaccgagtacggcaaggacagcaacaccgacaagcacctggagcccctgaagagcctgggcggcagaaccagcaagagaaagaagaccgaggaggagagcgagcacgaggtgagctgcccccaggccagcttcgacaaggagaacgccttccccttccccatggacaaccagttcagcatgaacggcgactgcgtgatggacaagcccctggacctgagcgacagattcagcgccatccagagacaggagaagagccagggcagcgagaccagcaagaacaagttcagacaggtgaccctgtacgaggccctgaagaccatccccaagggcttcagcagcagcagaaaggccagcgacggcaactgcaccctgcccaaggacagccccggcgagccctgcagccaggagtgcatcatcctgcagcccctgaacaagtgcagccccgacaacaagcccagcctgcagatcaaggaggagaacgccgtgttcaagatccccctgagacccagagagagcctggagaccgagaacgtgctggacgacatcaagagcgccggcagccacgagcccatcaagatccagaccagaagcgaccacggcggctgcgagctggccagcgtgctgcagctgaacccctgcagaaccggcaagatcaagagcctgcagaacaaccaggacgtgagcttcgagaacatccagtggagcatcgaccccggcgccgacctgagccagtacaagatggacgtgaccgtgatcgacaccaaggacggcagccagagcaagctgggcggcgagaccgtggacatggactgcaccctggtgagcgagaccgtgctgctgaagatgaagaagcaggagcagaagggcgagaagagcagcatgctgttctacatcgacgaggagagaaagatgaacgacagcctggaggacatgttcgacagaaccacccacgaggagtacgagagctgcctggccgacagcttcagccaggccgccgacgaggaggaggagctgagcaccgccaccaagaagctgcacacccacggcgacaagcaggacaaggtgaagcagaaggccttcgtggagccctacttcaagggcgacgagagagagaccagcctgcagaacttcccccacatcgaggtggtgagaaagaaggaggagagaagaaagctgctgggccacacctgcaaggagtgcgagatctactacgccgacatgcccgccgaggagagagagaagaagctggccagctgcagcagacacagattcagatacatcccccccaacacccccgagaacttctgggaggtgggcttccccagcacccagacctgcatggagagaggctacatcaaggaggacctggacccctgccccagacccaagagaagacagccctacaacgccatcttcagccccaagggcaaggagcagaagacctag

SEQ ID NO: 294743 - DNA, 2694 bp, Artificial Sequence
  derived and/or modified sequence
atgaacatctccggcagcagctgtggttcccctaattcggccgacaccagttctgacttcaaggacctatggactaagttaaaagaatgccatgaccgcgaagtgcagggcctgcaggttaaggtcacgaaactgaaacaggagaggatactggacgcacaacgactggaagagttcttcacaaagaatcagcagcttagggagcaacagaaggtgctgcacgagacgattaaagtgctagaggatcgcttgcgcgcgggcctctgtgaccgctgtgctgtgaccgaggagcacatgcgcaaaaaacaacaggaatttgagaacattagacagcagaaccttaagttaatcaccgaacttatgaatgaacgaaacaccctccaggaagaaaacaagaagctgtctgaacaacttcagcagaagattgaaaatgaccagcagcatcaggcggcggagctcgaatgcgaagaggatgttatcccagactcccctattacggcgttttccttctcgggagtgaaccggctcagacgaaaggaaaatccccatgtgcgatacatcgagcaaacccacacgaaactcgagcactctgtttgcgcaaacgagatgaggaaggtcagcaaaagctccacacacccccaacacaatcccaacgagaatgagatcctggtggccgacacttacgaccaaagtcaaagccctatggccaaggcccatgggacttcatcttatacaccagataagagtagtttcaatcttgccacggttgtcgcagagacgctaggcctgggcgtccaagaagaatccgagacccaggggccgatgagcccactgggcgacgagctttatcattgtctggagggcaaccacaagaagcaaccgttcgaggagtcgacacgaaatacagaggattctctgcgatttagcgacagcactagtaagacccctccccaggaggagttgcccacccgagtgtcttctccagtgttcggagccacctcgtccataaaaagtggcttggatctcaacacctctctctcacccagtctactccagccagggaagaaaaagcatcttaagaccttaccctttagtaatacttgtatcagcaggcttgagaaaacaaggagtaagtcagaggactctgccctgtttacacatcactccctcggcagcgaggtcaataagatcatcatccagagcagtaacaaacaaatcctcattaataaaaacatctcggagtcccttggcgagcaaaaccgcacagagtatggaaaggactccaataccgacaagcatttggagccactcaagtcgctgggtggccggacctcaaagagaaagaaaaccgaagaggagtcagaacatgaggtaagctgtcctcaagcttcgtttgacaaagagaatgcttttccattcccaatggacaaccagttctctatgaatggagattgcgtgatggacaaaccgcttgacctgtccgatcgcttcagcgccatacagcggcaggagaagtcccagggaagcgagacttccaagaacaagttccgacaggtgactctgtacgaggccctgaagaccatccctaagggcttcagctcctctcgaaaggcttcggatgggaattgcacattgccaaaggactcacccggcgaaccgtgctcacaagaatgcattattctccagccactgaacaagtgctccccggataacaagccgtccctccagattaaggaagaaaatgcagtgtttaaaatccccctgcgcccccgcgagtcactcgaaaccgagaatgtcctcgatgatattaagtctgccggctcccatgagcctatcaaaatccagacaaggtccgatcacggtggctgtgaactcgcttctgtactccagctcaacccttgtcgcacaggaaaaatcaagagtcttcagaataaccaggacgtgtcctttgaaaatatccagtggtcgattgacccgggcgctgatctgtcccagtacaagatggacgtgaccgttattgatacaaaggatggtagtcaatctaaactgggaggggagacagttgacatggattgcaccctcgtatctgaaacagttctcctgaaaatgaagaagcaagaacagaaaggagagaagagctccaacgaggagcggaaaatgaacgacagccttgaagatatgttcgaccggaccacccatgaagaatatgagtcatgtttggccgactccttcagtcaagcggccgacgaagaagaggaactttcaactgcaactaaaaagttgcatactcacggtgacaagcaggataaagttaagcagaaggcctttgtcgagccctattttaaaggagacgagcgggaaactagtttgcagaattttcctcacattgaggtggtgcgcaaaaaagaagaacggcggaagttgttgggccatacttgtaaggaatgtgaaatttactacgcggacatgccggcagaagagagagagaagaaattggcaagctgttcacgccaccgattcaggtacattccaccaaataccccagagaacttttgggaagttgggtttccatctacccagacttgcatggaacgcggatacatcaaggaggacctcgatccatgtcccaggccgaagcgccggcagccttacaacgccatcttttcacccaagggcaaagaacagaagacctag

SEQ ID NO: 294744 - DNA, 2709 bp, Artificial Sequence
  derived and/or modified sequence
atgaatataagcggctcgtcgtgtggttctccgaacagcgcggacacaagcagcgatttcaaagatttgtggactaagctgaaggagtgccacgaccgagaagttcagggcctgcaggtgaaagtgacaaaactgaagcaggagcggatcctggacgcccagaggctggaagaattctttactaaaaatcagcagctacgggagcagcaaaaagtattacacgaaaccattaaggtgcttgaagaccgcctccgagcagggctctgtgatagatgcgccgtgaccgaagagcatatgagaaaaaaacagcaagaattcgaaaacattcgccagcaaaacctcaaacttataaccgagctgatgaacgagcggaatacactgcaggaagagaacaaaaagctgtcagagcaactgcagcagaaaatcgaaaacgatcagcagcatcaagctgcagagctggagtgtgaagaggacgtcatcccagacagccccattactgcattcagtttctctggcgtaaaccgattgcggagaaaagaaaaccctcacgttcggtacatcgaacagacccataccaaattggaacactctgtctgtgctaacgagatgaggaaggtttccaagagctccacccaccctcagcacaaccccaatgaaaatgaaatactagtcgccgacacttatgatcagtcccaatcccctatggctaaggcacacggaacaagctcatacacacctgacaagagctcctttaatctagctacagtggtggcagagaccctgggccttggagtgcaggaagaaagcgagacgcagggaccaatgtcacctctaggggacgaactctatcattgccttgaaggcaatcacaaaaagcagcctttcgaagagtcaaccaggaatacagaggatagcctccggttctccgactcaacaagcaagactcccccccaggaagaactgcccacgagagtgtcctctccggtgttcggcgccacatcctcgatcaaaagcggtctggacctgaacaccagcctgtcccctagtttgctgcaacccggcaagaagaaacacctgaaaaccctgcccttctcgaatacgtgtataagcaggttggaaaagactagaagtaagagcgaggattccgccctcttcactcaccacagccttggcagtgaagttaacaaaattatcatccagagctctaataaacagatcctaatcaacaaaaacatttccgaatctttaggggagcagaataggacagagtacggaaaagattcaaacaccgataagcatctggaacccctaaaatcactaggcgggaggacatccaagaggaaaaaaacagaagaagagtcagaacatgaggttagctgcccccaggcatcatttgacaaagagaacgcattcccttttccaatggataaccagttcagtatgaacggggactgtgtcatggataaaccactggacctgtctgatagattctcagctatccagaggcaggagaagtctcagggtagcgaaacctccaaaaacaaatttcgccaggtgactctgtacgaggcactcaagacgatccctaaagggttttcgagctcaagaaaagccagtgatggaaattgtacactgccaaaagacagtccaggtgagccgtgtagtcaggagtgcatcattctgcagcctcttaataaatgcagtcccgataataaaccatcattgcaaatcaaggaggagaacgcggtgtttaagattcccctgcgcccaagagagagtcttgaaaccgaaaatgtgctcgacgacatcaaaagcgcgggcagtcacgaacccattaaaattcagacccgctctgaccatggcgggtgtgagttggcatccgtactccagctgaatccttgtagaaccggaaaaattaaaagcctgcagaacaaccaggacgttagctttgagaacattcagtggtctattgacccgggagctgatctctcccaatataaaatggatgtgacggtaatagacaccaaggatgggagccagtccaagcttggtggagagaccgttgatatggattgtaccctagtctccgaaacagtcctgcttaagatgaagaagcaggagcagaaaggagaaaagtcctctatgctattttacatcgatgaggagagaaagatgaacgactcccttgaagatatgttcgataggaccacacacgaagaatatgaaagttgtctggctgactcgttcagccaggcggccgatgaggaagaagaactctccacagcaaccaaaaaacttcacacacacggcgacaaacaggataaggtgaagcagaaagctttcgtggagccctatttcaaaggagatgagcgagagacgagcctgcagaactttcctcacatcgaagtggtgcgcaaaaaggaggagagaaggaaattactagggcatacatgcaaagaatgcgaaatttattacgcggacatgcccgctgaggagagggaaaagaagcttgcaagctgcagtcggcacagatttagatacatcccacccaacacaccggaaaacttttgggaagttggcttcccttcaacacagacctgcatggagagaggctatattaaggaagacctggacccatgtcccagacccaaaagacgtcagccttacaatgccatattctcccccaaaggcaaggaacaaaagacatag

SEQ ID NO: 294745 - DNA, 2694 bp, Artificial Sequence
  derived and/or modified sequence
atgaacatctcaggaagcagttgcggatcaccgaattccgcagacacaagtagcgattttaaggatctgtggactaagctgaaagaatgtcatgatcgcgaggtgcaggggctgcaagtcaaagtgactaaactgaagcaggagcgtatactggatgcacaacgactcgaagagttttttacaaagaatcagcagctccgagagcaacagaaagtgctgcatgagacgatcaaagttctggaggacaggctccgcgctggattatgtgatagatgcgcagtaacagaggagcatatgcgtaagaagcaacaggaatttgagaacataagacaacagaatctgaaattgattactgaactaatgaacgagcgcaataccctacaggaagaaaataagaaactgtccgagcagctccaacagaaaattgagaacgatcagcagcatcaagctgcagagctggagtgtgaggaggacgtaatccctgactcccctatcacggccttcagcttcagtggggtgaacagactccggcggaaagagaatccacacgtacgttatatcgaacagacccataccaaactcgagcatagtgtctgcgccaacgagatgcgtaaggttagcaagtcctcgacacacccccagcataacccgaacgaaaatgagatcctagttgcggatacctacgatcagtcgcagagccctatggctaaggcacacgggacaagtagttatacaccggataagtcctccttcaacctggcaacggtggtggcagagacactcggactgggcgtgcaggaggagtccgagactcagggacctatgtcacctctcggcgatgaattgtaccattgtctcgaaggcaaccacaagaagcagccctttgaggaatctacacgtaacactgaggatagtttgcgatttagtgactccaccagcaagacgcctccgcaagaagagctacccaccagagtgagcagcccagtgtttggcgccacgagctcaattaagtcagggctggatctaaacacctcactgtcccccagcctgctgcaacctggaaagaagaagcatttaaaaacactcccattcagcaatacatgcatttcacgactggaaaaaacccgtagcaagtccgaggattcggccctgttcacccaccactctctaggcagcgaagtcaataaaattatcatccagagttccaataaacagatactaattaataaaaatattagcgagagtttaggggagcagaaccgaaccgaatatggtaaagactccaatactgataaacacctggagccgttaaaatccctcggagggcgcacgagtaagcgtaagaagacagaggaagaatccgagcacgaggtcagctgccctcaggcaagctttgacaaggaaaatgcattcccgtttccaatggacaatcagttctccatgaacggtgattgtgttatggataagcctctggacttgtccgataggttcagcgccatccagcgacaggagaagtctcagggctcggagacctcgaagaacaaattccgacaggtgaccctgtacgaggcactgaaaaccatccctaagggatttagctcttcacgcaaagccagcgatggcaattgcactctgccaaaggacagtccgggcgaaccctgttctcaggagtgtattattctgcagcccttgaacaagtgtagcccagacaataagccgagcctccagattaaggaggagaatgccgtgtttaaaatcccattgagaccccgcgaatcactagaaactgaaaatgtgttggatgacatcaaaagtgcaggatcacatgagccaattaagatccagaccagaagtgatcacggtgggtgcgagctggcgagcgtcctgcaactgaatccatgtaggacaggcaaaattaagtctctgcagaataatcaggatgtgtctttcgagaatattcagtggtccatagaccctggcgcagatctctcgcagtacaaaatggacgtcactgtgatcgataccaaggatggctcccagtcgaagctgggaggagagaccgttgatatggattgtaccctggtcagcgaaaccgtgctgctcaaaatgaagaagcaagaacagaagggcgagaagagtagcaacgaggaaagaaaaatgaacgactccctggaggacatgttcgataggactacacacgaggaatacgaatcttgcttggcagactcgtttagccaggcagccgacgaggaagaggagctgagcactgctaccaaaaagctccacacacacggcgataagcaagacaaggtaaaacaaaaagctttcgtggagccttactttaaaggcgacgaaagggagacctccttacaaaactttccacatattgaagtggtgcggaaaaaagaggaacgccggaaactgttgggccacacatgtaaagagtgcgagatttactatgcagatatgcctgcagaagagcgcgagaaaaaattggcctcatgctctcggcacagatttcgatacatcccaccaaatactccagagaacttttgggaagtcggattcccctcaacgcagacctgtatggaacgaggttacatcaaggaggatctggatccgtgccctaggccaaagaggcgccagccctataacgccatcttttctcctaagggcaaggaacagaaaacctag

SEQ ID NO: 294746 - DNA, 2694 bp, Artificial Sequence
  derived and/or modified sequence
atgaacatcagcggcagcagctgtggcagccccaacagcgctgacaccagcagtgacttcaaggacctgtggaccaagctgaaggaatgtcatgaccgggaggtgcagggcctgcaggtgaaggtgaccaagctgaagcaggagcgcatcctggatgcccagaggctggaggagttcttcaccaagaaccagcagctgcgggagcagcagaaggtgctgcacgagaccatcaaggtgctggaggaccggctgcgggccggcctgtgtgacagatgtgctgtgacagaggagcacatgaggaagaagcagcaggagtttgagaacatccggcagcagaacctgaagctgatcacagagctgatgaatgaaagaaacaccctgcaggaggagaacaagaagctgtctgagcagctgcagcagaagattgaaaatgaccagcagcaccaggccgctgagctggagtgtgaagaagatgtgatcccagacagccccatcacagccttctccttctctggagtgaaccggctgcggaggaaggagaacccccacgtgcgctacatcgagcagacccacaccaagctggagcacagcgtgtgtgccaatgagatgaggaaggtgtccaagagcagcacccacccccagcacaaccccaatgaaaatgagatcctggtggccgacacctatgaccagagccagagccccatggccaaggcccacggcaccagcagctacaccccagacaagagcagcttcaacctggccaccgtggtggccgagaccctgggcctgggcgtgcaggaggagagcgagacccagggccccatgagccccctgggagatgagctgtaccactgcctggagggcaaccacaagaagcagccctttgaggagagcaccaggaacacagaggacagcctgcgcttcagtgacagcaccagcaagaccccaccccaggaggagctgcccaccagggtgagcagccctgtgtttggagccaccagcagcatcaagagcggcctggacctgaacaccagcctgagccccagcctgctgcagcccgggaagaagaagcacctgaagaccctgcccttcagcaacacctgcatcagccggctggagaagaccaggagcaagtctgaggacagcgccctcttcacccaccacagcctgggcagcgaggtgaacaagatcatcatccagagcagcaacaagcagatcctgatcaacaagaacatcagcgagagcctgggggagcagaacagaacagaatatggcaaggacagcaacacagacaagcacctggagcccctgaagagcctgggcggccgcaccagcaagaggaagaagacagaggaggagagcgagcacgaggtgtcctgcccccaggccagctttgacaaggaaaatgccttccccttccccatggacaaccagttctccatgaatggagactgtgtgatggacaagcccctggacctgagtgaccgcttcagcgccatccagaggcaggagaagagccagggcagcgagaccagcaagaacaagttccggcaggtgaccctgtatgaggccctgaagaccatccccaagggcttcagcagcagcaggaaggccagtgatggcaactgcaccctgcccaaggacagccctggagagccctgcagccaggagtgcatcatcctgcagcccctgaacaagtgcagcccagacaacaagcccagcctgcagatcaaggaggagaatgctgtgttcaagatccccctgcggccccgggagagcctggagacagaaaatgtgctggatgacatcaagtctgctggcagccatgagcccatcaagatccagaccaggagtgaccacggcggctgtgagctggcctctgtgctgcagctgaacccctgcaggacaggcaagatcaagagcctgcagaacaaccaggatgtgtcctttgagaacatccagtggagcattgatcctggagctgacctgagccagtacaagatggatgtgacagtgattgacaccaaggatggcagccagagcaagctgggcggggagaccgtggacatggactgcaccctggtgtctgagaccgtgctgctgaagatgaagaagcaggagcagaagggggagaagagcagcaatgaggagaggaagatgaatgacagcctggaggacatgtttgacaggaccacccatgaggagtatgagagctgcctggccgacagcttcagccaggccgcagatgaggaggaggagctgagcacagccaccaagaagctgcacacccacggggacaagcaggacaaggtgaagcagaaggcctttgtggagccctacttcaagggagatgagcgggagaccagcctgcagaacttcccccacatcgaggtggtgaggaagaaggaggagaggaggaagctgctgggccacacctgcaaggaatgtgagatctactatgctgacatgcctgctgaggagcgggagaagaagctggccagctgcagccgccaccgcttccgctacatcccccccaacaccccagagaacttctgggaggtgggcttccccagcacccagacctgcatggagcggggctacatcaaggaggacctggacccctgcccccggcccaagaggcggcagccctacaatgccatcttcagccccaagggcaaggagcagaagacctag

SEQ ID NO: 294747 - DNA, 2709 bp, Artificial Sequence
  derived and/or modified sequence
atgaacatcagcggcagcagctgtggcagccccaacagcgctgacaccagcagtgacttcaaggacctgtggaccaagctgaaggaatgtcatgaccgggaggtgcagggcctgcaggtgaaggtgaccaagctgaagcaggagcgcatcctggatgcccagaggctggaggagttcttcaccaagaaccagcagctgcgggagcagcagaaggtgctgcacgagaccatcaaggtgctggaggaccggctgcgggccggcctgtgtgacagatgtgctgtgacagaggagcacatgaggaagaagcagcaggagtttgagaacatccggcagcagaacctgaagctgatcacagagctgatgaatgaaagaaacaccctgcaggaggagaacaagaagctgtctgagcagctgcagcagaagattgaaaatgaccagcagcaccaggccgctgagctggagtgtgaagaagatgtgatcccagacagccccatcacagccttctccttctctggagtgaaccggctgcggaggaaggagaacccccacgtgcgctacatcgagcagacccacaccaagctggagcacagcgtgtgtgccaatgagatgaggaaggtgtccaagagcagcacccacccccagcacaaccccaatgaaaatgagatcctggtggccgacacctatgaccagagccagagccccatggccaaggcccacggcaccagcagctacaccccagacaagagcagcttcaacctggccaccgtggtggccgagaccctgggcctgggcgtgcaggaggagagcgagacccagggccccatgagccccctgggagatgagctgtaccactgcctggagggcaaccacaagaagcagccctttgaggagagcaccaggaacacagaggacagcctgcgcttcagtgacagcaccagcaagaccccaccccaggaggagctgcccaccagggtgagcagccctgtgtttggagccaccagcagcatcaagagcggcctggacctgaacaccagcctgagccccagcctgctgcagcccgggaagaagaagcacctgaagaccctgcccttcagcaacacctgcatcagccggctggagaagaccaggagcaagtctgaggacagcgccctcttcacccaccacagcctgggcagcgaggtgaacaagatcatcatccagagcagcaacaagcagatcctgatcaacaagaacatcagcgagagcctgggggagcagaacagaacagaatatggcaaggacagcaacacagacaagcacctggagcccctgaagagcctgggcggccgcaccagcaagaggaagaagacagaggaggagagcgagcacgaggtgtcctgcccccaggccagctttgacaaggaaaatgccttccccttccccatggacaaccagttctccatgaatggagactgtgtgatggacaagcccctggacctgagtgaccgcttcagcgccatccagaggcaggagaagagccagggcagcgagaccagcaagaacaagttccggcaggtgaccctgtatgaggccctgaagaccatccccaagggcttcagcagcagcaggaaggccagtgatggcaactgcaccctgcccaaggacagccctggagagccctgcagccaggagtgcatcatcctgcagcccctgaacaagtgcagcccagacaacaagcccagcctgcagatcaaggaggagaatgctgtgttcaagatccccctgcggccccgggagagcctggagacagaaaatgtgctggatgacatcaagtctgctggcagccatgagcccatcaagatccagaccaggagtgaccacggcggctgtgagctggcctctgtgctgcagctgaacccctgcaggacaggcaagatcaagagcctgcagaacaaccaggatgtgtcctttgagaacatccagtggagcattgatcctggagctgacctgagccagtacaagatggatgtgacagtgattgacaccaaggatggcagccagagcaagctgggcggggagaccgtggacatggactgcaccctggtgtctgagaccgtgctgctgaagatgaagaagcaggagcagaagggggagaagagctccatgctgttctacattgatgaggagaggaagatgaatgacagcctggaggacatgtttgacaggaccacccatgaggagtatgagagctgcctggccgacagcttcagccaggccgcagatgaggaggaggagctgagcacagccaccaagaagctgcacacccatggagacaagcaggacaaggtgaagcagaaggcctttgtggagccctacttcaagggagatgagcgggagaccagcctgcagaacttcccccacatcgaggtggtgaggaagaaggaggagaggaggaagctgctgggccacacctgcaaggaatgtgagatctactatgctgacatgcctgctgaggagcgggagaagaagctggccagctgcagccgccaccgcttccgctacatcccccccaacaccccagagaacttctgggaggtgggcttccccagcacccagacctgcatggagcggggctacatcaaggaggacctggacccctgcccccggcccaagaggcggcagccctacaatgccatcttcagccccaagggcaaggagcagaagacctag

SEQ ID NO: 294748 - DNA, 2694 bp, Artificial Sequence
  derived and/or modified sequence
atgaacatcagcggcagcagctgcggcagccccaacagcgccgacacctcgagtgattttaaggacctatggactaagctgaaagaatgccatgatagggaggtgcaaggccttcaggtaaaagtcaccaaactgaagcaagagaggatcctggatgcccaaaggttggaggaattctttacgaagaaccaacagttacgcgagcagcagaaggtactgcacgaaacgatcaaggtcttggaagaccgtcttcgtgccggcctttgcgatcgatgtgctgtgaccgaggagcacatgcgaaagaaacagcaggagttcgaaaatatcagacagcagaacctgaagctgattactgaactcatgaatgagcggaacacccttcaagaggagaataagaagctgtcagagcagctgcagcagaaaatcgaaaacgaccagcagcaccaagccgccgagctggagtgcgaagaggacgtgatacccgactctcccattacagctttcagtttttcgggggtgaatcgcctccgtcggaaagagaatcctcatgttcgctacattgagcagacgcatacgaaactggagcattctgtgtgcgccaacgagatgcgaaaggttagcaaatccagcactcatccgcaacacaatccgaacgaaaatgagatcctcgtggccgatacttatgatcaatctcagtcacccatggctaaagcacatggcaccagctcctacacaccagataagtcatcttttaacctggctacagttgtggccgaaacactgggcctcggagtgcaagaagagagcgaaacccagggtcctatgtcgcctctgggcgacgaactgtaccactgcttggaaggcaaccacaagaagcaaccgtttgaagagagcacccgaaacacagaggattctttacggttttctgactcgaccagcaagacgccaccacaggaggaacttccgactcgtgtctcatcccccgtatttggcgccacctcgagcattaagtctgggttggacttgaatactagcttgtccccatcactgctgcagcccggaaagaagaagcacctgaagaccctccctttctctaacacctgcatctcacgcctcgagaagacccgctctaaatctgaggactcagcactgttcactcaccattccctaggttcagaggtgaacaagattatcattcagagcagtaacaaacaaatcctcatcaacaagaacatctcagagagcctgggagagcagaatagaaccgaatatggtaaggatagcaacaccgacaagcatttagagccactcaagtctctgggggggaggaccagcaagcggaagaagacagaggaggagtctgagcacgaggtgtcatgcccacaggcatcctttgacaaagagaacgccttcccttttccgatggacaaccagttttctatgaatggcgattgtgtgatggacaagcccttagacctgtctgaccggttttctgcaattcagcggcaggagaagagccaggggagcgaaaccagtaagaacaagtttaggcaggtcaccctttacgaagccctcaagacaatccctaagggcttttcttcgtctcgaaaagcctccgacggcaactgtaccttgcctaaagacagcccaggcgagccctgctcacaagaatgtataattttacagcccttgaacaagtgttcacccgacaacaaaccctctctgcagatcaaagaagaaaacgccgttttcaagatacctttacgaccacgggaatctcttgagaccgagaatgtactagacgacatcaaatctgctggtagccacgaacctataaaaattcaaacccgcagtgaccacggcgggtgtgaactggcttctgtgctgcagctgaacccttgtaggaccggcaaaattaagtcactgcaaaacaatcaggacgtctcctttgagaatatacagtggtccattgatccgggagcagacctaagccagtataaaatggacgtgacagtcattgacacaaaagatgggagccaatcaaaactgggcggcgaaacagtggacatggactgcactctcgtaagcgaaaccgttttactgaagatgaaaaaacaggaacagaaaggagagaaatccagtaacgaggagcgtaagatgaatgacagcttagaggacatgtttgatcgcaccacacatgaggaatatgagtcctgtctcgcagactcctttagccaagccgccgatgaggaggaggaactcagcaccgccaccaagaaactgcatacacacggcgacaaacaggataaagtgaaacaaaaagcatttgttgagccatactttaagggggatgaaagggagacatctctgcaaaattttccacatattgaagtggtgcggaagaaggaggaaaggagaaagctgcttggtcatacgtgtaaagaatgtgaaatttactatgctgacatgccagccgaggagagggagaaaaaacttgcctcttgctctaggcaccgctttagatacatacctcctaacacgccagagaacttttgggaggtaggctttccgagcacgcaaacttgtatggagcggggatacattaaggaagacctggacccttgtcctcgccccaaacggcgccagccatataatgccattttctctcctaagggtaaggaacagaagacctag

SEQ ID NO: 294749 - DNA, 2709 bp, Artificial Sequence
  derived and/or modified sequence
atgaacatcagcggcagcagctgcggcagccccaacagcgccgacacgtcctccgacttcaaggacctgtggacaaaactcaaagagtgtcatgatcgagaagtgcaggggttacaggttaaagtcacgaaactgaaacaagaaagaatcttggacgcgcagcggctggaggaattcttcacaaagaaccagcagctgcgcgaacagcagaaggttcttcatgaaacaatcaaggttctggaggatcggttgcgcgccgggctctgcgataggtgcgcggtgacagaggaacacatgcggaaaaaacaacaagaattcgaaaatattcgacaacagaatctcaagcttatcaccgagctgatgaacgaacggaacactcttcaggaggaaaataagaaacttagcgagcaactgcagcagaaaatagaaaatgatcagcagcatcaagcagcagagctggagtgcgaggaagacgtgataccggactcgccgattaccgcattttcttttagcggggtcaatcgacttaggcgaaaagagaacccacacgtcagatatatcgagcaaacccatactaagctagaacactcagtatgcgcaaacgagatgcgaaaggtgagcaaatcatccacccatccgcaacacaacccaaacgaaaacgagatcctggtagctgacacttacgaccaatcacagtctccaatggctaaggcccacgggaccagcagctatacccctgacaagtcatccttcaacttggccaccgtcgtcgccgaaactctaggcctcggcgttcaggaagagagtgagacacaaggccccatgtcacctctgggggatgagctctatcattgcctcgagggaaaccacaaaaagcagccttttgaagagtctacacgaaacacggaggactccctgaggttctccgatagcaccagtaaaactcctccacaggaggaactgccaacaagagtctcttcccccgttttcggagccacttcaagtatcaagtccggactggatctcaatacgtcattgtctccgtcacttctccagccaggtaagaagaagcacctcaaaaccctgccgttctctaatacctgcatctcccggctggagaaaacccgcagcaagagtgaggacagtgccctgttcactcatcacagtctcggttcggaggtcaataagatcataatccagtcctccaataagcagattctgattaataagaatattagcgaaagcctaggcgagcagaatcgcacagagtacggcaaagattccaataccgataagcaccttgaaccgctaaagagtttagggggccgtaccagtaaacggaaaaagaccgaggaagaatccgaacacgaagtgtcttgcccccaggccagctttgacaaggagaacgcctttccgtttccaatggacaaccagttcagtatgaatggagactgcgtgatggataagccgcttgatttgagcgataggttctcagcgattcagaggcaggaaaaaagccagggctctgagacgtccaaaaataaatttagacaggtgacactgtacgaggccttgaaaacaattcctaaggggttttcaagttcacgcaaagccagcgatggtaattgcacacttcctaaagattcgcccggggagccctgttcacaagagtgcatcattctgcaacctttgaacaaatgcagccctgataataaaccgagtctccagatcaaagaggagaacgcagtctttaaaatacccttgcgacctcgagaaagcctcgagactgagaacgtcctggacgacattaagtccgccggaagccacgaaccaattaagatacagactcgatcagatcacgggggctgtgagttggcttccgtgctacagcttaatccctgcaggaccgggaagataaagtctctccaaaataatcaggatgtcagtttcgagaacatacagtggtctattgatcccggcgcggatctgagccagtataagatggacgtgaccgtcatcgacaccaaggacggtagtcagtcgaaactggggggcgaaacagtggatatggactgtacactggttagtgagaccgtgctgctgaaaatgaagaagcaggaacagaagggcgaaaaatcctccatgcttttctacatcgacgaggaaagaaagatgaatgactccttagaggacatgtttgatcgcacaacgcacgaagagtacgaaagttgccttgcggattcgttcagtcaggctgccgacgaggaggaagagctaagcacagcaaccaagaaactccatactcacggggacaagcaggacaaggtaaagcaaaaagcttttgtcgaaccgtactttaagggcgatgagagagaaactagtctacagaactttccccacatcgaagttgtgcgcaagaaggaagaaaggaggaagctgctgggccacacttgtaaggagtgtgagatttactacgccgacatgccagccgaagagagggaaaagaagcttgcttcctgttcccggcataggttcaggtatatcccacccaatacgccagagaacttctgggaggtcgggtttccctcaactcaaacgtgcatggagagaggctatatcaaagaagatcttgatccctgccctcggcccaagcgccgacagccctataatgcgatattctcccctaaggggaaagaacagaaaacttag

SEQ ID NO: 294750 - DNA, 2694 bp, Artificial Sequence
  derived and/or modified sequence
atgaacatcagcggcagcagctgcggcagccccaacagcgccgacacttcctctgactttaaagacttatggacaaaactaaaggagtgtcatgaccgggaggttcagggcctccaagtgaaagtgaccaagttgaaacaagagagaatcctggacgctcaacggctggaggaatttttcacaaagaatcagcagctccgagaacagcaaaaggtgctgcatgagacgatcaaggtgcttgaggacagactgcgagccgggctatgtgacagatgcgccgtcactgaagagcatatgcgtaagaaacaacaagagttcgagaacattaggcagcagaatctgaagctgattactgagctaatgaacgaaaggaataccctgcaggaggagaataagaagctttcggaacagctgcaacaaaaaatcgaaaacgaccagcagcatcaggcagctgaactggagtgcgaagaagacgttatccccgactccccaattactgccttcagctttagcggtgtcaatcgtttacggaggaaagagaaccctcacgtgaggtatattgagcagacccacaccaagctggaacactccgtgtgcgccaacgagatgcgtaaggttagcaaatctagcacccatccccaacataaccccaatgagaacgagatcctggttgccgatacttacgatcaatcccagagtcctatggccaaagctcacgggaccagttcctacacgcccgacaagagtagttttaatttggcaacagttgtagcagagacgcttgggttaggcgtgcaggaggagtcggagacccaaggtccaatgagccccctcggcgacgaattatatcactgcctggaaggcaaccacaagaaacaacctttcgaagaaagtacaaggaatacggaagatagcctgcggtttagcgattctaccagtaagactcctcctcaggaggagctgcccacacgggtgtcttcccctgtgttcggcgccacctcctctatcaagagcggcctcgacttgaatacaagcttgagcccatcactcttacagccaggaaagaaaaaacatctgaagacattgcctttcagtaacacttgtatcagccgactggaaaagacgcgttctaaatctgaggatagcgctctgttcactcaccactcactggggtccgaggtgaataaaatcatcatacagtcttccaacaaacagatcctgattaacaaaaatatctccgagtccctcggggagcagaacaggactgagtacggcaaggatagcaacactgataaacacttggagccactgaaaagcttaggcggtcggacctctaagaggaagaagacagaggaagagtccgaacacgaggtgtcttgccctcaagcgtcattcgacaaggagaatgcttttccattcccaatggacaatcagttttccatgaatggagattgtgtgatggataaaccactggacctctctgatcgcttcagcgccatacagcggcaggaaaaatctcagggcagcgagactagtaagaacaaatttaggcaggtgactttgtacgaagcattaaagacaatccccaaggggttttcctcaagcagaaaggccagtgacggaaattgtacactcccaaaagacagcccgggcgagccttgcagtcaagagtgcatcatcttgcagcccctcaacaagtgtagtcccgataacaaacccagtttacagataaaagaggagaacgccgtgttcaagattcctctgcgaccgcgtgaaagtttagaaactgagaatgtgctcgacgacattaaatcggctggcagtcacgagcctatcaagatccagacaagatctgaccacggtggttgcgaactggcaagcgtgctacagcttaatccgtgcaggacaggcaagattaaaagcctgcagaataaccaggacgtgtcattcgagaatatccaatggtctatcgaccccggggccgatctaagtcagtacaaaatggatgtgaccgtgattgacaccaaagatgggtcacagtctaagctcggaggagaaaccgtagatatggattgtaccttggtcagcgaaacagtcttactgaagatgaagaagcaggagcagaaaggagagaaatctagcaacgaggagcgcaagatgaacgatagccttgaggacatgttcgacagaacaactcacgaggaatacgaaagttgcctcgcagacagtttcagccaagccgccgatgaagaagaggagctatcaaccgccaccaagaaacttcatacacacggtgacaagcaggataaagtgaagcaaaaagcgttcgtggaaccttatttcaaaggcgacgagagagagacatctctgcagaatttccctcatatcgaggtcgtgcggaagaaggaagagcggaggaaactccttgggcacacctgtaaggaatgcgagatctactacgccgatatgcctgcagaagagagggagaaaaaactagctagttgctcaaggcatagatttcgctacatcccacccaacacaccggagaacttctgggaggtcggctttccctcaacgcagacgtgcatggaaagggggtacattaaagaggatctcgatccttgtccgaggccgaaacgccggcagccttacaatgcaatcttctccccgaaagggaaggagcaaaagacttag

SEQ ID NO: 294751 - DNA, 2694 bp, Artificial Sequence
  derived and/or modified sequence
atgaatatcagtggtagcagctgtggatcccctaatagcgccgatacttcctcggattttaaggacttatggaccaagctgaaggagtgtcatgatagggaggttcagggcctccaggttaaagtgactaaactgaaacaggagaggatcctagatgcacagcgcctggaggagttcttcacaaagaaccagcagcttcgagagcaacagaaagtattacatgaaactattaaggtgctggaggaccgactgcgcgcagggctctgcgacagatgcgcagtgacagaagagcacatgcggaaaaaacagcaggaatttgagaacatccgccagcagaacttgaagctgattaccgagctgatgaacgaacggaacaccttacaggaggagaacaaaaagctgtctgagcagttgcagcagaagattgagaacgaccagcaacaccaggccgctgaactggagtgtgaagaggatgtgataccagacagccctataacggcattctcctttagcggagttaatcggctcagacgcaaggagaatcctcacgtccgttatatcgaacagacccacactaaactggagcattcagtgtgcgcaaacgaaatgcgtaaggtcagtaaatcaagcactcatcctcagcacaaccctaatgagaatgaaattcttgttgcagatacctatgaccaatcccagagccccatggctaaggcccacggtactagtagttacaccccggataaaagctctttcaacttagccacggtggtcgcggagacgcttgggctcggcgtgcaggaagagtctgaaactcaggggccaatgtctcccctgggtgatgagttatatcactgtctcgaaggaaaccataaaaagcagccttttgaagaaagtacgcggaataccgaggactccctgcggttcagtgacagcacctcgaaaacacccccacaagaggagctcccgacccgcgtgtcctctcccgtgttcggcgcaacgagcagcattaagtcgggacttgacctgaacaccagcctgtccccgtcacttctccagcctggaaaaaagaagcaccttaagacactccccttctcaaacacctgcataagccgcctggaaaaaactcgctccaaaagtgaggacagcgcactgttcacacatcatagtctgggctcagaggtgaataaaatcatcatacagagtagcaataagcagattctaattaacaagaacattagcgaaagtctcggggagcagaatcggaccgagtacgggaaagacagtaacactgataaacaccttgaaccactgaaatccctgggtggacggacttcaaagcgtaagaaaactgaggaagaatcagaacacgaagtgtcctgcccgcaagcctcctttgataaagagaatgcctttccttttcctatggataatcagttcagcatgaatggggattgtgtgatggataagcctctggatctttccgaccgatttagtgcaatccagagacaagaaaaatcccagggttcagagaccagtaaaaacaaatttagacaggtaacactatacgaagccctgaagacaatccccaagggattttcctctagccgaaaagcctcagatggcaattgcactcttcctaaggatagtcctggggagccctgtagtcaggaatgtattatactgcagcctctgaataagtgttctccagacaacaagcctagtctgcaaattaaagaggaaaatgcagtctttaaaatccctctgcgtcctcgggagtccctggaaacggagaacgtcctcgacgacatcaagtccgctgggtcccacgagcccataaaaattcaaacaaggtctgaccacggcggatgcgagttggcgagtgtgctgcagctcaatccctgtcggacaggaaaaatcaagagtctccaaaacaaccaggacgtgagctttgagaacatccagtggtctatcgatccgggagctgacttaagccagtataaaatggacgtcacggtgatcgacaccaaggacggatcccagagcaagctggggggtgaaaccgtggacatggattgcacccttgtgtcggagacagttctgctcaagatgaagaagcaggagcagaaaggcgagaagtcctctaatgaagagagaaaaatgaatgattctctggaagacatgttcgaccggaccacacatgaagaatacgaaagctgcctagctgacagtttttctcaggcagctgacgaagaagaagaactgtccactgccactaagaaattacacactcacggagacaagcaggacaaggtcaagcagaaggcatttgtggaaccctactttaagggcgatgagagggagacttcactccaaaattttccgcatattgaggtggtgaggaaaaaggaggaaagacgaaagctgctaggtcacacctgtaaagagtgtgaaatttactacgcagatatgccggctgaagaaagagagaagaagcttgcctcctgcagtaggcaccggttccggtacattccacccaatacacctgagaatttctgggaggtggggttccctagcacccagacttgcatggagcggggatatataaaggaagatttggacccttgtccccgtccgaaaagaaggcagccgtacaacgctattttctctcccaaaggcaaagagcagaaaacctag

SEQ ID NO: 294752 - DNA, 2709 bp, Artificial Sequence
  derived and/or modified sequence
atgaacatcagcggatcatcatgtggaagccctaatagtgccgacacatcttctgattttaaagacttgtggactaaactgaaagagtgccacgatcgcgaagtgcaagggctccaagtgaaagtgaccaagttgaaacaggaaagaatcctggacgcccagcggctggaagaattttttacgaaaaaccaacaactgagagagcagcaaaaggttctgcacgagacaatcaaggttctcgaggaccggcttagagcgggactgtgtgaccgctgcgccgtgacagaagagcacatgcgcaaaaagcagcaggaattcgagaatatcagacagcagaatctgaagctcatcactgaactaatgaacgaaagaaatacacttcaggaagagaacaagaaactcagtgaacagttgcagcagaagatcgagaatgaccagcaacatcaggcagccgagctggagtgcgaagaggatgtgatccctgatagcccaattacagcgttttcatttagcggtgtgaaccgtcttcgtcggaaggagaatcctcacgtaaggtacattgagcagacccataccaaattggagcattcagtctgcgcaaatgaaatgaggaaagtgtccaagtcatccacacaccctcaacataatcccaatgaaaacgaaatcttggtggcggacacctatgatcagagtcagtctcccatggccaaggcacatggaacatcatcttataccccagacaaatcatcttttaatctcgccactgtcgtggctgaaaccctgggtctgggtgttcaagaagaatcagagacccaggggccaatgtcacctcttggggatgagctgtatcactgtttggaggggaatcataagaaacagccatttgaggaatctactcggaacacagaagattccttaagattttcggactcgacctcaaagacacctcctcaggaggagctgccgacaagagtgagttctccagtttttggcgctacatcatctattaaaagtggccttgacctgaacaccagcctcagtccaagcctgctgcagcctggaaagaagaaacacctcaagacactcccatttagcaatacctgcatctccagactggaaaaaacccgaagcaaatcagaagactcagccctgtttacacaccactctctgggcagcgaggtgaacaagataataatccagtcaagcaacaaacagattcttataaataaaaatatcagtgagagcctaggcgaacagaaccgcaccgagtacggaaaagattccaacactgataaacacctagagcccctcaagtccctcgggggacgcacgtcaaagaggaagaaaacagaggaggagtcggagcatgaagtcagctgtccgcaggcctcattcgataaagagaacgcttttccttttcctatggacaatcagttttctatgaatggagactgcgtaatggataaaccactggatctgagtgatcgattcagtgccattcagaggcaagagaaatcccaggggtctgaaacatccaagaataaatttaggcaggtgacgttatacgaggcactcaagacaattccaaaggggttctcctcttccagaaaggcctccgacggcaactgtaccttgcccaaagactctcccggagagccctgtagtcaggagtgtattatccttcagccacttaacaaatgctcccccgacaataagcccagtttgcaaatcaaagaagagaacgcagtgttcaaaattccattacgcccacgggaaagccttgagaccgagaacgtgcttgacgacattaagagcgcagggtcccacgagccaattaagattcagactcgctctgaccacggtgggtgtgagcttgcatcagtccttcagctgaacccatgccgaacaggaaaaatcaaatctttgcagaataatcaagacgtttcttttgaaaacatccaatggagtattgaccctggagcagatctatctcagtacaaaatggatgttaccgtcattgatacgaaagacggctcccaaagtaagctagggggtgagactgtcgacatggactgcacgcttgtgtccgagaccgtgctgctaaagatgaagaaacaggagcaaaaaggggagaagtcctctatgcttttctacatagacgaggagcggaagatgaacgattctctagaggacatgttcgaccgcactacccatgaggaatacgagtcctgcctggcggactcttttagtcaagcagcagacgaggaggaggaactttctactgcaactaaaaaactccacacgcatggggacaagcaagataaagtgaaacagaaagcctttgtggagccttatttcaagggcgatgaacgggagactagtttgcagaactttccccacatcgaggttgtccgtaaaaaggaggaaagacggaaactgcttggacatacgtgcaaagaatgtgaaatttactatgcagatatgccagccgaggagcgggagaaaaagcttgctagctgttcccggcacagatttaggtatatcccacccaacacacccgagaacttttgggaggtcggcttccccagcacacagacgtgtatggaaagaggatatatcaaggaagatctggacccttgtcctaggcccaagaggcggcagccgtacaatgccatcttctcacccaagggaaaggaacaaaagacgtag

SEQ ID NO: 294753 - DNA, 2694 bp, Artificial Sequence
  derived and/or modified sequence
atgaatatctcgggctcgtcctgcggaagccctaactcagccgacacctcaagtgactttaaggatttgtggaccaaattgaaggagtgccacgaccgggaggtgcagggactccaggtgaaggtaaccaaactgaaacaggagcgcattctggacgcccaaaggctagaggagttcttcaccaaaaatcagcagctcagggagcaacagaaggtgctgcacgaaaccatcaaagttttagaagatcgattacgagctgggctgtgcgacaggtgcgccgttacagaagagcacatgcgtaaaaaacaacaggagttcgagaacattagacagcaaaatctcaagctgattactgagctgatgaatgagaggaacaccctgcaagaagagaataaaaaactgagcgagcagctgcagcagaagattgagaacgatcagcagcaccaggcggctgagctggaatgtgaggaagatgtgattcccgatagccctataactgccttcagcttcagcggcgtgaacaggctccgcagaaaagaaaacccccacgtgcgatacatcgagcagactcacactaaactggaacacagcgtttgcgccaacgaaatgcgcaaggtgagcaagtccagcacacaccctcagcacaatcctaacgagaacgagatcctggtcgcagacacgtacgaccagtcccagtccccaatggcaaaggctcacggcaccagctcatacacccccgacaaatcttcctttaacctcgcgacagttgtcgccgagactcttgggcttggcgtgcaggaggagagcgaaacccagggccctatgtctccactgggcgatgagttgtaccattgcttagaggggaaccataaaaagcaaccattcgaggaatccacacgaaacaccgaggacagcttacggttctccgattcaacctcaaagaccccacctcaagaggagctcccaactagagtgtcatctcccgtattcggcgcaacatcatccataaagtctggtcttgatcttaacacaagcctgagtcctagcctcctgcagcccggaaagaaaaagcacctcaaaaccctccctttcagtaatacttgcatcagccgtctcgagaagacgagatccaagtctgaggattccgccctcttcacgcatcattccttgggtagcgaagtgaataagatcataatacagtcttccaacaagcagattcttatcaataagaatatcagcgaatccctgggagaacagaataggaccgagtacggaaaagattccaacacagataagcacctcgaaccactgaaatctctggggggtaggacctccaagcggaagaaaacagaggaggaatccgagcacgaagtctcatgtccacaggcgagctttgacaaggagaatgcctttcctttcccaatggacaaccagttttctatgaacggggattgtgtcatggataaacccctggatttgagtgaccgcttcagtgcgattcaacgtcaggagaagtcgcagggttcagagacttcgaagaacaagttcagacaggtcacgttgtacgaggctctgaaaacaattcccaaggggttttccagttccaggaaagccagtgatggaaattgtaccctccctaaagacagtccgggtgaaccttgctcgcaggaatgtattatcctgcagcctctgaataaatgctcccctgataacaaaccgagtctacagatcaaagaggagaacgccgtattcaaaataccactgcgccctagggagtccctggagacggaaaatgtcctggatgatatcaagtctgccggtagccacgaaccaattaaaatccagacacggtcggatcatggaggctgcgagctggcgtctgtgttgcagctgaatccatgtcgcactgggaaaattaagtcattgcaaaataaccaggatgtaagtttcgagaacattcagtggtctatagaccccggagcagacttatcgcagtataaaatggatgtcacagtgatcgatactaaagacggcagccagagcaaattggggggtgagacagtggatatggactgcaccctcgtaagcgagactgtattactaaaaatgaagaagcaagagcagaagggagaaaaatcaagtaacgaggaaaggaagatgaatgattcactggaagatatgttcgacagaactacccatgaagagtacgagtcctgcctcgcagacagcttctctcaggctgcagatgaagaggaagagttgagcaccgcaaccaaaaagctacacactcatggcgataaacaggataaggtgaaacaaaaggcgtttgtggagccctatttcaagggcgatgaacgcgaaacgtccctgcaaaactttcctcacatagaagtggttagaaagaaagaggagagacggaaattgctcggccatacgtgcaaggaatgcgagatctattatgccgacatgccagccgaagagagagagaagaagctggcatcttgttctcgacacaggtttcgttatattccgccaaatacacctgagaatttctgggaggtgggcttcccctcaacacagacatgtatggagaggggctacattaaagaagatctggacccctgtcctcggccaaagcggcgtcagccctataacgctatctttagcccaaagggaaaggaacagaagacctag

SEQ ID NO: 294754 - DNA, 3276 bp, Artificial Sequence
  derived and/or modified sequence
cgcgtgacgtcgcgcgggctcccgggcggggcgggtccggccgcctccgagcccggccggcagcccccggccttaaagcgcgggctgtccggaggggtcggctttcccaccgaggatttggcactctggtgagggaaaagggcgaaagagaaaagcgagcagccgtcctttcacagcctcagaaagtgctcgcttcccttcgggggctttcgcgaatcccgaggcaatctcggaggcggtatttgacctgtccaaagacgacttgatacctctataatgtaacagaaaaggtcagaaaatattaagcaagtagaagtgtggagcatattaagcaagatgaacatctcgggaagcagctgtggaagccctaactctgcagatacatctagtgactttaaggacctttggacaaaactaaaagaatgtcatgatagagaagtacaaggtttacaagtaaaagtaaccaagctaaaacaggaacgaatcttagatgcacaaagactagaagaattcttcaccaaaaatcaacagctgagggaacagcagaaagtccttcatgaaaccattaaagttttagaagatcggttaagagcaggcttatgtgatcgctgtgcagtaactgaagaacatatgcggaaaaaacagcaagagtttgaaaatatccggcagcagaatcttaaacttattacagaacttatgaatgaaaggaatactctacaggaagaaaataaaaagctttctgaacaactccagcagaaaattgagaatgatcaacagcatcaagcagctgagcttgaatgtgaggaagacgttattccagattcaccgataacagccttctcattttctggcgttaaccggctacgaagaaaggagaacccccatgtccgatacatagaacaaacacatactaaattggagcactctgtgtgtgcaaatgaaatgagaaaagtttccaagtcttcaactcatccacaacataatcctaatgaaaatgaaattctagtagctgacacttatgaccaaagtcaatctccaatggccaaagcacatggaacaagcagctatacccctgataagtcatcttttaatttagctacagttgttgctgaaacacttggacttggtgttcaagaagaatctgaaactcaaggtcccatgagcccccttggtgatgagctctaccactgtctggaaggaaatcacaagaaacagccttttgaggaatctacaagaaatactgaagatagtttaagattttcagattctacttcaaagactcctcctcaagaagaattacctactcgagtgtcatctcctgtatttggagctacctctagtatcaaaagtggtttagatttgaatacaagtttgtccccttctcttttacagcctgggaaaaaaaaacatctgaaaacactcccttttagcaacacttgtatatctagattagaaaaaactagatcaaaatctgaagatagtgcccttttcacacatcacagtcttgggtctgaagtgaacaagatcattatccagtcatctaataaacagatacttataaataaaaatataagtgaatccctaggtgaacagaataggactgagtacggtaaagattctaacactgataaacatttggagcccctgaaatcattgggaggccgaacatccaaaaggaagaaaactgaggaagaaagtgaacatgaagtaagctgcccccaagcttcttttgataaagaaaatgctttcccttttccaatggataatcagttttccatgaatggagactgtgtgatggataaacctctggatctgtctgatcgattttcagctattcagcgtcaagagaaaagccaaggaagtgagacttctaaaaacaaatttaggcaagtgactctttatgaggctttgaagaccattccaaagggcttttcctcaagccgtaaggcctcagatggcaactgcacgttgcccaaagattccccaggggagccctgttcacaggaatgcatcatccttcagcccttgaataaatgctctccagacaataaaccatcattacaaataaaagaagaaaatgctgtctttaaaattcctctacgtccacgtgaaagtttggagactgagaatgttttagatgacataaagagtgctggttctcatgagccaataaaaatacaaaccaggtcagaccatggaggatgtgaacttgcatcagttcttcagttaaatccatgtagaactggtaaaataaagtctctacaaaacaaccaagatgtatcctttgaaaatatccagtggagtatagatccgggagcagacctttctcagtataaaatggatgttactgtaatagatacaaaggatggcagtcagtcaaaattaggaggagagacagtggacatggactgtacattggttagtgaaaccgttctcttaaaaatgaagaagcaagagcagaagggagaaaaaagttcaaatgaagaaagaaaaatgaatgatagcttggaagatatgtttgatcggacaacacatgaagagtatgaatcctgtttggcagacagtttctcccaagcagcagatgaagaggaggaattgtctactgccacaaagaaactacacactcatggtgataaacaagacaaagtcaagcagaaagcgtttgtggagccgtattttaaaggtgatgaaagagagactagcttgcaaaattttcctcatattgaggtggttcggaaaaaagaggagagaagaaaactgcttgggcacacgtgtaaggaatgtgaaatttattatgcagatatgccagcagaagaaagagaaaagaaattggcttcctgctcaagacaccgattccgctacattccacccaacacaccagagaatttttgggaagttggttttccttccactcagacttgtatggaaagaggttatattaaggaagatcttgatccttgtcctcgtccaaaaagacgtcagccttacaacgcaatattttctccaaaaggcaaggagcagaagacatagacgttgaaacagaaacagaaggatgaaggacagttttttccttcttagttatttatagttaaagttggtactaaacattgatttttttgatcttctgtaaatggatttataaatcagttttctattgaaaatgtttgtgatattttgcttttgcacctttaaaacaataaggcgctttcattttgcactctaacttaagagtttttactttatgtagtgatacctaatacaattttgaaaatacaa

SEQ ID NO: 294755 - DNA, 2961 bp, Artificial Sequence
  derived and/or modified sequence
gattgagaacatgcgggctacagagaggtatttgacctgtccaaagacgacttgatacctctataatgtaacagaaaaggtcagaaaatattaagcaagtagaagtgtggagcatattaagcaagatgaacatctcgggaagcagctgtggaagccctaactctgcagatacatctagtgactttaaggacctttggacaaaactaaaagaatgtcatgatagagaagtacaaggtttacaagtaaaagtaaccaagctaaaacaggaacgaatcttagatgcacaaagactagaagaattcttcaccaaaaatcaacagctgagggaacagcagaaagtccttcatgaaaccattaaagttttagaagatcggttaagagcaggcttatgtgatcgctgtgcagtaactgaagaacatatgcggaaaaaacagcaagagtttgaaaatatccggcagcagaatcttaaacttattacagaacttatgaatgaaaggaatactctacaggaagaaaataaaaagctttctgaacaactccagcagaaaattgagaatgatcaacagcatcaagcagctgagcttgaatgtgaggaagacgttattccagattcaccgataacagccttctcattttctggcgttaaccggctacgaagaaaggagaacccccatgtccgatacatagaacaaacacatactaaattggagcactctgtgtgtgcaaatgaaatgagaaaagtttccaagtcttcaactcatccacaacataatcctaatgaaaatgaaattctagtagctgacacttatgaccaaagtcaatctccaatggccaaagcacatggaacaagcagctatacccctgataagtcatcttttaatttagctacagttgttgctgaaacacttggacttggtgttcaagaagaatctgaaactcaaggtcccatgagcccccttggtgatgagctctaccactgtctggaaggaaatcacaagaaacagccttttgaggaatctacaagaaatactgaagatagtttaagattttcagattctacttcaaagactcctcctcaagaagaattacctactcgagtgtcatctcctgtatttggagctacctctagtatcaaaagtggtttagatttgaatacaagtttgtccccttctcttttacagcctgggaaaaaaaaacatctgaaaacactcccttttagcaacacttgtatatctagattagaaaaaactagatcaaaatctgaagatagtgcccttttcacacatcacagtcttgggtctgaagtgaacaagatcattatccagtcatctaataaacagatacttataaataaaaatataagtgaatccctaggtgaacagaataggactgagtacggtaaagattctaacactgataaacatttggagcccctgaaatcattgggaggccgaacatccaaaaggaagaaaactgaggaagaaagtgaacatgaagtaagctgcccccaagcttcttttgataaagaaaatgctttcccttttccaatggataatcagttttccatgaatggagactgtgtgatggataaacctctggatctgtctgatcgattttcagctattcagcgtcaagagaaaagccaaggaagtgagacttctaaaaacaaatttaggcaagtgactctttatgaggctttgaagaccattccaaagggcttttcctcaagccgtaaggcctcagatggcaactgcacgttgcccaaagattccccaggggagccctgttcacaggaatgcatcatccttcagcccttgaataaatgctctccagacaataaaccatcattacaaataaaagaagaaaatgctgtctttaaaattcctctacgtccacgtgaaagtttggagactgagaatgttttagatgacataaagagtgctggttctcatgagccaataaaaatacaaaccaggtcagaccatggaggatgtgaacttgcatcagttcttcagttaaatccatgtagaactggtaaaataaagtctctacaaaacaaccaagatgtatcctttgaaaatatccagtggagtatagatccgggagcagacctttctcagtataaaatggatgttactgtaatagatacaaaggatggcagtcagtcaaaattaggaggagagacagtggacatggactgtacattggttagtgaaaccgttctcttaaaaatgaagaagcaagagcagaagggagaaaaaagttcaatgctcttttacatagatgaagaaagaaaaatgaatgatagcttggaagatatgtttgatcggacaacacatgaagagtatgaatcctgtttggcagacagtttctcccaagcagcagatgaagaggaggaattgtctactgccacaaagaaactacacactcatggtgataaacaagacaaagtcaagcagaaagcgtttgtggagccgtattttaaaggtgatgaaagagagactagcttgcaaaattttcctcatattgaggtggttcggaaaaaagaggagagaagaaaactgcttgggcacacgtgtaaggaatgtgaaatttattatgcagatatgccagcagaagaaagagaaaagaaattggcttcctgctcaagacaccgattccgctacattccacccaacacaccagagaatttttgggaagttggttttccttccactcagacttgtatggaaagaggttatattaaggaagatcttgatccttgtcctcgtccaaaaagacgtcagccttacaacgcaatattttctccaaaaggcaaggagcagaagacatagacgttgaaacagaaacagaaggatgaaggacagttttttccttcttagttatttatagttaaagttggtactaaacattgatttttttgatcttctgtaaatggatttataaatcagttttctattg

SEQ ID NO: 294756 - DNA, 3237 bp, Artificial Sequence
  derived and/or modified sequence
cgcacgcggaaccggcgcgggcacctggggagaaatggatggagaagggacctggctggaaagcctttgccccgctgctctgctccgcccataagaggacccctgaaatgtcccgtgcagtttgttcaagtcccctgtgtgatgaaatgtgcctctcgccttacccgtgtgagaatacctgtggtgtggcagcgagtattttggtatttgacctgtccaaagacgacttgatacctctataatgtaacagaaaaggtcagaaaatattaagcaagtagaagtgtggagcatattaagcaagatgaacatctcgggaagcagctgtggaagccctaactctgcagatacatctagtgactttaaggacctttggacaaaactaaaagaatgtcatgatagagaagtacaaggtttacaagtaaaagtaaccaagctaaaacaggaacgaatcttagatgcacaaagactagaagaattcttcaccaaaaatcaacagctgagggaacagcagaaagtccttcatgaaaccattaaagttttagaagatcggttaagagcaggcttatgtgatcgctgtgcagtaactgaagaacatatgcggaaaaaacagcaagagtttgaaaatatccggcagcagaatcttaaacttattacagaacttatgaatgaaaggaatactctacaggaagaaaataaaaagctttctgaacaactccagcagaaaattgagaatgatcaacagcatcaagcagctgagcttgaatgtgaggaagacgttattccagattcaccgataacagccttctcattttctggcgttaaccggctacgaagaaaggagaacccccatgtccgatacatagaacaaacacatactaaattggagcactctgtgtgtgcaaatgaaatgagaaaagtttccaagtcttcaactcatccacaacataatcctaatgaaaatgaaattctagtagctgacacttatgaccaaagtcaatctccaatggccaaagcacatggaacaagcagctatacccctgataagtcatcttttaatttagctacagttgttgctgaaacacttggacttggtgttcaagaagaatctgaaactcaaggtcccatgagcccccttggtgatgagctctaccactgtctggaaggaaatcacaagaaacagccttttgaggaatctacaagaaatactgaagatagtttaagattttcagattctacttcaaagactcctcctcaagaagaattacctactcgagtgtcatctcctgtatttggagctacctctagtatcaaaagtggtttagatttgaatacaagtttgtccccttctcttttacagcctgggaaaaaaaaacatctgaaaacactcccttttagcaacacttgtatatctagattagaaaaaactagatcaaaatctgaagatagtgcccttttcacacatcacagtcttgggtctgaagtgaacaagatcattatccagtcatctaataaacagatacttataaataaaaatataagtgaatccctaggtgaacagaataggactgagtacggtaaagattctaacactgataaacatttggagcccctgaaatcattgggaggccgaacatccaaaaggaagaaaactgaggaagaaagtgaacatgaagtaagctgcccccaagcttcttttgataaagaaaatgctttcccttttccaatggataatcagttttccatgaatggagactgtgtgatggataaacctctggatctgtctgatcgattttcagctattcagcgtcaagagaaaagccaaggaagtgagacttctaaaaacaaatttaggcaagtgactctttatgaggctttgaagaccattccaaagggcttttcctcaagccgtaaggcctcagatggcaactgcacgttgcccaaagattccccaggggagccctgttcacaggaatgcatcatccttcagcccttgaataaatgctctccagacaataaaccatcattacaaataaaagaagaaaatgctgtctttaaaattcctctacgtccacgtgaaagtttggagactgagaatgttttagatgacataaagagtgctggttctcatgagccaataaaaatacaaaccaggtcagaccatggaggatgtgaacttgcatcagttcttcagttaaatccatgtagaactggtaaaataaagtctctacaaaacaaccaagatgtatcctttgaaaatatccagtggagtatagatccgggagcagacctttctcagtataaaatggatgttactgtaatagatacaaaggatggcagtcagtcaaaattaggaggagagacagtggacatggactgtacattggttagtgaaaccgttctcttaaaaatgaagaagcaagagcagaagggagaaaaaagttcaaatgaagaaagaaaaatgaatgatagcttggaagatatgtttgatcggacaacacatgaagagtatgaatcctgtttggcagacagtttctcccaagcagcagatgaagaggaggaattgtctactgccacaaagaaactacacactcatggtgataaacaagacaaagtcaagcagaaagcgtttgtggagccgtattttaaaggtgatgaaagagagactagcttgcaaaattttcctcatattgaggtggttcggaaaaaagaggagagaagaaaactgcttgggcacacgtgtaaggaatgtgaaatttattatgcagatatgccagcagaagaaagagaaaagaaattggcttcctgctcaagacaccgattccgctacattccacccaacacaccagagaatttttgggaagttggttttccttccactcagacttgtatggaaagaggttatattaaggaagatcttgatccttgtcctcgtccaaaaagacgtcagccttacaacgcaatattttctccaaaaggcaaggagcagaagacatagacgttgaaacagaaacagaaggatgaaggacagttttttccttcttagttatttatagttaaagttggtactaaacattgatttttttgatcttctgtaaatggatttataaatcagttttctattgaaaatgtttgtgatattttgcttttgcacctttaaaacaataaggcgctttcattttgcactctaacttaagagtttttactttatgtagtgatacctaatacaattttgaaaat

SEQ ID NO: 294757 - DNA, 399 bp, Artificial Sequence
  derived and/or modified sequence
atgaaccagcagtactaccccgacggccacaacgactacggctaccagcagcccagctaccccgagcagggctacgacagaccctacgaggacagcagccagcactactacgagggcggcaacagccagtacggccagcagcaggacgcctaccagggcccccccccccagcagggctaccccccccagcagcagcagtaccccggccagcagggctaccccggccagcagcagggctacggccccagccagggcggccccggcccccagtaccccaactacccccagggccagggccagcagtacggcggctacagacccacccagcccggccccccccagcccccccagcagagaccctacggctacgaccagaacagcagatggaccgtgtgctag

SEQ ID NO: 294758 - DNA, 1011 bp, Artificial Sequence
  derived and/or modified sequence
atgcccatgggccccggcggcatgaaccagagcggccccccccccccccccagaagccacaacatgcccagcgacggcatggtgggcggcggcccccccgccccccacatgcagaaccagatgaacggccagatgcccggccccaaccacatgcccatgcagggccccggccccaaccagctgaacatgaccaacagcagcatgaacatgcccagcagcagccacggcagcatgggcggctacaaccacagcgtgcccagcagccagagcatgcccgtgcagaaccagatgaccatgagccagggccagcccatgggcaactacggccccagacccaacatgagcatgcagcccaaccagggccccatgatgcaccagcagccccccagccagcagtacaacatgccccagggcggcggccagcactaccagggccagcagccccccatgggcatgatgggccaggtgaaccagggcaaccacatgatgggccagagacagatccccccctacagacccccccagcagggccccccccagcagtacagcggccaggaggactactacggcgaccagtacagccacggcggccagggcccccccgagggcatgaaccagcagtactaccccgacggccacaacgactacggctaccagcagcccagctaccccgagcagggctacgacagaccctacgaggacagcagccagcactactacgagggcggcaacagccagtacggccagcagcaggacgcctaccagggcccccccccccagcagggctaccccccccagcagcagcagtaccccggccagcagggctaccccggccagcagcagggctacggccccagccagggcggccccggcccccagtaccccaactacccccagggccagggccagcagtacggcggctacagacccacccagcccggccccccccagcccccccagcagagaccctacggctacgaccagggccagtacggcaactaccagcagtag

SEQ ID NO: 294759 - DNA, 399 bp, Artificial Sequence
  derived and/or modified sequence
atgaaccagcagtattaccctgacggtcacaatgactatggatatcagcagcctagctatccagagcagggttacgatcgaccttacgaggacagttctcagcattactatgaaggtggaaattctcagtatggccagcagcaggacgcctatcagggacctcctccacagcaaggctatccaccccagcagcagcagtatccagggcagcaggggtatcccggacaacaacagggctacggcccgtctcagggcggaccagggccacagtaccccaattatccacagggccaaggccaacagtatggtggataccgacctacacagcctggaccaccccagcccccccaacaacggccctacgggtacgaccaaaacagcaggtggacagtttgttag

SEQ ID NO: 294760 - DNA, 1011 bp, Artificial Sequence
  derived and/or modified sequence
atgcctatggggccggggggaatgaatcagtcaggtccacctccacccccccggtcccataacatgccttctgatggaatggtgggtggaggccctccagctcctcacatgcagaatcagatgaacggtcagatgcctgggcccaaccatatgccaatgcagggcccaggccccaatcagctgaatatgaccaactcttcaatgaatatgccgtctagcagtcacggatctatgggcgggtataaccattccgttccatcgagccagtcaatgcctgtgcaaaaccaaatgacaatgtcacaggggcagcctatgggaaactacggcccacggcccaacatgtctatgcagccgaatcaaggccccatgatgcaccagcaacccccctctcagcagtacaatatgccccaggggggaggccaacattaccaggggcagcagcccccgatgggaatgatggggcaggtgaatcagggcaaccatatgatggggcaaagacaaatcccaccttatcgcccgccacagcagggtcctccgcaacagtactctggtcaggaggattactatggcgaccaatacagtcacggcggccaaggccccccagaaggaatgaaccagcaatactaccccgacggacacaacgactacggctaccaacagccatcatatccggaacaaggctatgaccgtccttacgaggactcgtcacaacactactacgaaggcggaaactctcagtacggacaacagcaggatgcgtaccagggacctccccctcagcaaggttaccctccacagcagcagcagtacccgggtcaacagggctatcctggacaacaacagggctacgggccaagccagggaggccccggcccccagtatcccaattacccacaaggccagggccagcagtatggagggtaccggccaactcagcctggtcccccacaacccccccagcagcggccatatggatacgatcaaggccaatacggcaattaccagcaatag

SEQ ID NO: 294761 - DNA, 399 bp, Artificial Sequence
  derived and/or modified sequence
atgaaccagcagtactacccagatggccacaatgactatggctaccagcagcccagctacccagagcagggctatgaccggccctatgaggacagcagccagcactactatgaaggaggcaacagccagtatggccagcagcaggatgcctaccagggccccccaccccagcagggctacccaccccagcagcagcagtacccaggccagcagggctacccaggccagcagcagggctacggccccagccagggcggccctggcccccagtaccccaactacccccagggccagggccagcagtatggaggctaccggcccacccagcccggccccccccagcccccccagcagaggccctacggctatgaccagaacagccgctggacagtgtgctag

SEQ ID NO: 294762 - DNA, 1011 bp, Artificial Sequence
  derived and/or modified sequence
atgcccatgggccctgggggcatgaaccagagcggccccccacctccacccaggagccacaacatgcccagtgatggcatggtgggcggcggccccccagccccccacatgcagaaccagatgaatggccagatgcctggccccaaccacatgcccatgcagggccctggccccaaccagctgaacatgaccaacagctccatgaacatgcccagcagcagccacggctccatgggcggctacaaccacagcgtgcccagcagccagagcatgcctgtgcagaaccagatgaccatgagccagggccagcccatgggcaactacggcccccggcccaacatgtccatgcagcccaaccagggccccatgatgcaccagcagccccccagccagcagtacaacatgccccagggcggcggccagcactaccagggccagcagccccccatgggcatgatgggccaggtgaaccagggcaaccacatgatgggccagaggcagatccccccctacagaccaccccagcagggccccccccagcagtacagcggccaggaggactactatggagaccagtacagccatggaggccagggccccccagagggcatgaaccagcagtactacccagatggccacaatgactatggctaccagcagcccagctacccagagcagggctatgaccggccctatgaggacagcagccagcactactatgagggcggcaacagccagtatggccagcagcaggatgcctaccagggccccccaccccagcagggctacccaccccagcagcagcagtacccaggccagcagggctacccaggccagcagcagggctacggccccagccagggcggccctggcccccagtaccccaactacccccagggccagggccagcagtatggaggctaccggcccacccagcccggccccccccagcccccccagcagaggccctacggctatgaccagggccagtatggcaactaccagcagtag

SEQ ID NO: 294763 - DNA, 399 bp, Artificial Sequence
  derived and/or modified sequence
atgaaccagcagtactaccccgacggccacaacgactacggctaccaacaaccatcctatcccgagcaggggtatgatcgaccgtatgaagatagctctcagcattactatgaaggggggaactcccaatacggtcagcagcaggacgcctaccagggaccgccaccccaacaggggtaccccccccaacagcagcaataccccgggcagcagggctaccctgggcagcagcagggatacggacctagccaaggcggaccaggcccccagtatccaaactaccctcagggccagggccagcagtacgggggctatcgtcccacccagcccggacccccccaacctcctcagcagcggccatacggatacgaccagaatagcaggtggactgtatgttag

SEQ ID NO: 294764 - DNA, 1011 bp, Artificial Sequence
  derived and/or modified sequence
atgcccatgggccccggcggcatgaaccagagcggccccccccccccaccacgcagccataatatgccgagtgatggtatggtcggtggaggtcccccggcaccacatatgcagaaccagatgaacgggcagatgcccggacccaatcacatgccaatgcaaggccctggccctaaccagctcaatatgacaaattccagtatgaacatgccttcaagctctcacgggagcatgggaggctacaatcattcagtgccatcatcccagtcaatgccagtccagaaccagatgactatgtcacagggccaacctatgggcaattatggccccaggcccaatatgtctatgcagcccaatcagggacccatgatgcatcagcagcctccttcacagcagtataatatgcctcaggggggagggcagcactaccaaggacagcagcctcctatgggtatgatggggcaggttaatcagggaaaccacatgatggggcaacgccagattccaccctacaggccacctcagcaaggacctcctcagcagtactctggccaggaggattattacggcgatcagtacagccatggtggtcaagggccaccagaggggatgaatcaacaatattatcccgacggacataatgactacggataccagcagccgagttacccggaacaagggtacgatcgaccatatgaggattcctcccagcactactatgagggcggcaactcccagtatggtcagcagcaagatgcctaccaggggcctccaccacagcaggggtacccaccacagcagcaacaataccctgggcagcagggctacccaggccagcagcaaggctatggtccatctcaaggcgggcccggtcctcagtatcctaattacccccaggggcagggccagcagtatggaggctacagacccactcaacctggcccaccacagcccccacagcagcgaccgtatggatacgatcagggccagtacggcaactaccagcagtag

SEQ ID NO: 294765 - DNA, 399 bp, Artificial Sequence
  derived and/or modified sequence
atgaaccagcagtactaccccgatggtcataacgactatgggtatcagcaaccctcctatccagagcagggttacgatcgcccttacgaagattcatcccagcactattacgagggcggaaactctcagtacggccagcagcaagatgcctatcagggtcccccaccacagcagggttatcctcctcagcaacagcaataccccggtcaacagggctaccccggacagcaacagggatatgggccatctcagggcggtccagggccacagtaccccaattacccccaaggtcaggggcaacaatatggaggttatcggcctacccagccgggaccccctcagcccccacagcagaggccttatggctacgaccaaaattcacggtggaccgtgtgctag

SEQ ID NO: 294766 - DNA, 1011 bp, Artificial Sequence
  derived and/or modified sequence
atgcccatggggccaggaggtatgaaccagtctggcccacctccaccacctcggtcccataacatgccttccgacggtatggtgggcggtggacctccagcgccacacatgcagaatcagatgaacgggcaaatgccaggccctaatcatatgccaatgcaaggcccaggtccaaaccagctgaacatgaccaacagctctatgaatatgccctcctcttctcatggctcaatgggcggatacaatcactcagtgcccagcagtcagtcgatgcccgtgcagaaccagatgaccatgtctcagggacagcccatggggaactatggtcctcgccctaacatgtctatgcagccaaatcaggggccaatgatgcatcagcaaccaccaagccaacagtataatatgcctcagggcggagggcagcactaccagggccaacaacccccaatgggaatgatgggccaagtgaatcagggaaatcatatgatgggccagagacagattcctccttacaggcctccacagcaggggcctccacagcagtacagcggacaggaagattattatggggatcagtattcacacggcggacagggtcctccagagggcatgaatcagcagtattaccccgacggacacaatgactatggatatcagcagcccagctatcctgagcaggggtatgaccgcccatacgaggattcctcacagcattactacgaaggtgggaacagccagtacggccagcagcaggacgcttatcagggccctccacctcagcagggatacccccctcagcagcagcagtatcctgggcaacaaggatatccgggtcagcagcagggctatggacctagccagggtggcccaggaccccagtacccgaactatccgcaagggcagggacagcagtacgggggatatcgtccaactcaaccaggaccaccacagccccctcagcagagaccatacggatatgaccagggccagtatggcaattatcagcagtag

SEQ ID NO: 294767 - DNA, 1548 bp, Artificial Sequence
  derived and/or modified sequence
gacttgccgatagtggtgacggcggcaacatgtctgtggctttcgcggccccgaggcagcgaggcaagggggagatcactcccgctgcgattcagaagatgttggatgacaataaccatcttattcagtgtataatggactctcagaataaaggaaagacctcagagtgttctcaccacccacacagaatatgcctatgggtcctggagggatgaatcagagcggccctcccccacctccacgctctcacaacatgccttcagatggaatggtaggtgggggtcctcctgcaccgcacatgcagaaccagatgaacggccagatgcctgggcctaaccatatgcctatgcagggacctggacccaatcaactcaatatgacaaacagttccatgaatatgccttcaagtagccatggatccatgggaggttacaaccattctgtgccatcatcacagagcatgccagtacagaatcagatgacaatgagtcagggacaaccaatgggaaactatggtcccagaccaaatatgagtatgcagccaaaccaaggtccaatgatgcatcagcagcctccttctcagcaatacaatatgccacagggaggcggacagcattaccaaggacagcagccacctatgggaatgatgggtcaagttaaccaaggcaatcatatgatgggtcagagacagattcctccctatagacctcctcaacagggcccaccacagcagtactcaggccaggaagactattacggggaccaatacagtcatggtggacaaggtcctccagaaggcatgaaccagcaatattaccctgatggtcataatgattacggttatcagcaaccgtcgtatcctgaacaaggctacgataggccttatgaggattcctcacaacattactacgaaggaggaaattcacagtatggccaacagcaagatgcataccagggaccacctccacaacagggatatccaccccagcagcagcagtacccagggcagcaaggttacccaggacagcagcagggctacggtccttcacagggtggtccaggtcctcagtatcctaactacccacagggacaaggtcagcagtatggaggatatagaccaacacagcctggaccaccacagccaccccagcagaggccttatggatatgaccagggacagtatggaaattaccagcagtgaaaaagtacttacattccagtagccagtatctattagcagccatattgtcacctcagcactgtggacacctccctgtgaagagatccttccattccatctagtttttggaaaaaccttgtggataagtggctgtttcatcagtaagcagcctttgtggtttagttataaaaggctttagtagctcaaaaatactcttgatttcacatttctactctagatggcaacattggacagaaaatgcaatgacataaccaatttgtaatgattttggaactgtgtttcaaatggactgttacagactgaaaggtgtgaacagctttgtatgtttatgaagggtaagggaattt

SEQ ID NO: 294768 - DNA, 1617 bp, Artificial Sequence
  derived and/or modified sequence
atggagctgagctaccagaccctgaagttcacccaccaggccagagaggcctgcgagatgagaaccgaggccagaagaaagaacctgctgatcctgatcagccactacctgacccaggagggctacatcgacaccgccaacgccctggagcaggagaccaagctgggcctgagaagattcgaggtgtgcgacaacatcgacctggagaccatcctgatggagtacgagagctactacttcgtgaagttccagaagtaccccaagatcgtgaagaagagcagcgacaccgccgagaacaacctgccccagagaagcagaggcaagaccagaagaatgatgaacgacagctgccagaacctgcccaagatcaaccagcagagacccagaagcaagaccaccgccggcaagaccggcgacaccaagagcctgaacaaggagcaccccaaccaggaggtggtggacaacaccagactggagagcgccaacttcggcctgcacatcagcagaatcagaaaggacagcggcgaggagaacgcccaccccagaagaggccagatcatcgacttccagggcctgctgaccgacgccatcaagggcgccaccagcgagctggccctgaacaccttcgaccacaaccccgaccccagcgagagactgctgaagcccctgagcgccttcatcggcatgaacagcgagatgagagagctggccgccgtggtgagcagagacatctacctgcacaaccccaacatcaagtggaacgacatcatcggcctggacgccgccaagcagctggtgaaggaggccgtggtgtaccccatcagatacccccagctgttcaccggcatcctgagcccctggaagggcctgctgctgtacggcccccccggcaccggcaagaccctgctggccaaggccgtggccaccgagtgcaagaccaccttcttcaacatcagcgccagcaccatcgtgagcaagtggagaggcgacagcgagaagctggtgagagtgctgttcgagctggccagataccacgcccccagcaccatcttcctggacgagctggagagcgtgatgagccagagaggcaccgccagcggcggcgagcacgagggcagcctgagaatgaagaccgagctgctggtgcagatggacggcctggccagaagcgaggacctggtgttcgtgctggccgccagcaacctgccctgggagctggactgcgccatgctgagaagactggagaagagaatcctggtggacctgcccagcagagaggccagacaggccatgatctaccactggctgccccccgtgagcaagagcagagccctggagctgcacaccgagctggagtacagcgtgctgagccaggagaccgagggctacagcggcagcgacatcaagctggtgtgcagagaggccgccatgagacccgtgagaaagatcttcgacgccctggagaaccaccagagcgagagcagcgacctgcccagaatccagctggacatcgtgaccaccgccgacttcctggacgtgctgacccacaccaagcccagcgccaagaacctggcccagagatacagcgactggcagagagagttcgagagcgtgtag

SEQ ID NO: 294769 - DNA, 1401 bp, Artificial Sequence
  derived and/or modified sequence
atggagtacgagtcttattattttgtgaaattccagaagtatccgaaaattgtgaagaaaagttctgacacagccgagaacaacctgccacaaagaagtcggggaaagacacggaggatgatgaacgatagttgccagaatctgcctaagattaaccaacaacggcctcggtctaagactactgccggtaagactggagatacaaaaagcctgaacaaggagcatccaaaccaggaggtggtagacaacactcgattggagtccgctaactttgggctccatatttctcgcatccggaaggactcaggcgaggagaatgcccacccacggcgtgggcagattatcgactttcagggcctgttgacagacgccataaaaggagccacgtccgaactagcgttgaacacctttgatcataatccagacccgtcagaaaggcttcttaagcctctgtccgcctttatagggatgaattctgagatgagggaactcgctgcagttgtgtctcgtgatatttatttgcacaatccaaacatcaaatggaatgacatcattgggttggacgccgccaaacagctcgtcaaggaagccgtggtataccctataagatacccccagctgttcacaggcatcctctcaccctggaaagggttgctgttgtatggaccacccggcacaggaaagacgctgctggctaaggcagtcgctactgagtgcaagaccaccttttttaacatttcagcctcaaccatcgtatctaaatggcgcggcgatagcgaaaagcttgtccgcgttctttttgagctggcacgttaccatgcaccatccactatcttcctggacgaactggagagcgtgatgagccagagaggtaccgcttctggcggagaacacgaaggaagtttgcggatgaaaactgagttattagtgcagatggatggattggcccgttcagaagatctcgtattcgttctggccgcaagcaatctgccttgggagcttgattgcgccatgctacgacgtctggagaagcggatactagtcgacttacctagtcgcgaggcaaggcaggccatgatataccactggctgcctccagtcagtaaaagtagagccctggaactgcacactgaacttgagtactcagtgctttcacaagaaaccgagggatactccggaagcgatattaagttggtctgccgtgaggcagccatgaggccagtgaggaagatctttgatgccctcgagaaccaccagtccgagtcttccgaccttccaagaatacagctggatatcgtaaccacagccgactttcttgacgtcttgacacacaccaaacctagtgctaagaatctagctcagagatactctgattggcagagggaattcgaaagcgtgtag

SEQ ID NO: 294770 - DNA, 1617 bp, Artificial Sequence
  derived and/or modified sequence
atggagctgtcttaccaaactcttaaattcacacatcaggcccgggaggcttgtgaaatgcgcacagaagctcgccgaaagaacttgctaattttgatctcccattacctgacccaggaggggtacatcgatactgccaatgcgttggaacaggaaacgaagctcggacttcgcagattcgaggtctgtgacaacatagatctcgaaactatccttatggaatatgagagctactactttgtgaagttccagaaatatcccaagatcgtgaagaaaagctcagataccgccgaaaataatctaccccagaggtcacggggcaagactaggaggatgatgaacgatagctgtcagaatctgcccaaaattaatcaacaaagacccagaagcaaaacaactgccgggaaaaccggggataccaagagcctgaacaaggagcacccaaatcaggaagtggtcgataacacccggctggagagcgcaaattttgggttacatattagtaggatacggaaagatagcggggaggagaatgcccatccccggaggggtcaaatcatagacttccaagggctgctgaccgacgcgataaagggcgctacctcagaactagcgctcaatacgtttgaccacaatcccgatccttctgaaagactgctcaagccactgagcgccttcatcggcatgaacagcgaaatgcgcgagctggcagctgttgtttcacgagacatatacctccataatccaaatattaaatggaacgacattataggtctagatgccgctaagcagcttgtgaaagaggcagtggtgtacccaattcgatacccgcagctgtttaccggcatcctgtcaccatggaagggactgcttctctatggaccccccggtacagggaagaccctgctggccaaagccgtagctactgagtgtaagacaaccttcttcaatattagtgcatccactatagtctccaaatggagaggtgattctgagaagctcgtgcgggtgcttttcgagctcgcccgctatcatgcaccaagcaccattttcctagacgaactggaaagtgtgatgagccagagaggcacggccagtgggggagaacacgaaggctccctgcgcatgaaaaccgagcttctggtacagatggacggtctcgctcgcagcgaggacctggtgttcgtcctggctgcgtctaatctgccgtgggaactagattgcgctatgctgagaagattggagaagcgcattctggtggatttaccctcacgggaagctcgtcaagctatgatttatcactggctaccacctgtgtctaaatcgagagcactggagcttcacacagagttggagtactcagttctgagtcaggagaccgagggctactccggctcagatattaagcttgtgtgtcgcgaggccgctatgaggccagtgagaaagatattcgacgccttggaaaaccaccagagcgagtcctccgacctgccaagaatccaattagacatcgtgaccaccgccgacttcctggacgtgctgacacacaccaaaccctccgctaaaaacctggcccagaggtatagcgattggcagagagaatttgaatctgtctag

SEQ ID NO: 294771 - DNA, 1401 bp, Artificial Sequence
  derived and/or modified sequence
atggagtatgagagctactactttgtgaagttccagaagtaccccaagatcgtgaagaagagcagtgacacagctgagaacaacctgccccagaggagccggggcaagaccaggaggatgatgaatgacagctgccagaacctgcccaagatcaaccagcagaggcccaggagcaagaccacagctgggaagacaggagacaccaagagcctgaacaaggagcaccccaaccaggaggtggtggacaacacccggctggagagcgccaactttggcctgcacatcagccgcatcaggaaggacagcggggaggagaatgcccacccccggcggggccagatcatcgacttccagggcctgctgacagatgccatcaagggggccaccagcgagctggccctgaacacctttgaccacaacccagaccccagcgagcggctgctgaagcccctgagcgccttcatcggcatgaacagcgagatgagggagctggccgctgtggtgtcccgggacatctacctgcacaaccccaacatcaagtggaatgacatcatcggcctggatgctgccaagcagctggtgaaggaggccgtggtgtaccccatccgctacccccagctgttcaccggcatcctgagcccctggaagggcctgctgctgtatggccccccaggcaccgggaagaccctgctggccaaggctgtggccacagagtgcaagaccaccttcttcaacatcagcgccagcaccatcgtgtccaagtggaggggggacagcgagaagctggtgcgggtgctgtttgagctggcccgctaccacgcccccagcaccatcttcctggatgagctggagagcgtgatgagccagaggggcacagccagcggcggggagcacgagggcagcctgaggatgaagacagagctgctggtgcagatggatggcctggcccggtctgaggacctggtgtttgtgctggccgccagcaacctgccctgggagctggactgtgccatgctgcggcggctggagaagaggatcctggtggacctgcccagccgggaggcccggcaggccatgatctaccactggctgccccctgtgtccaagagccgggccctggagctgcacacagagctggagtacagcgtgctgagccaggagacagagggctacagcggcagtgacatcaagctggtgtgccgggaggccgccatgaggcctgtgaggaagatctttgatgccctggagaaccaccagagcgagagcagtgacctgccccgcatccagctggacatcgtgaccacagctgacttcctggatgtgctgacccacaccaagcccagcgccaagaacctggcccagcgctacagcgactggcagcgggagtttgaatctgtgtag

SEQ ID NO: 294772 - DNA, 1617 bp, Artificial Sequence
  derived and/or modified sequence
atggagctgagctaccagaccctgaagttcacccaccaggcccgggaggcctgtgagatgaggacagaggcccggaggaagaacctgctgatcctgatcagccactacctgacccaggagggctacatcgacacagccaatgccctggagcaggagaccaagctgggcctgcggagatttgaggtgtgtgacaacatcgacctggagaccatcctgatggagtatgagagctactactttgtgaagttccagaagtaccccaagatcgtgaagaagagcagtgacacagctgagaacaacctgccccagaggagccggggcaagaccaggaggatgatgaatgacagctgccagaacctgcccaagatcaaccagcagaggcccaggagcaagaccacagctgggaagacaggagacaccaagagcctgaacaaggagcaccccaaccaggaggtggtggacaacacccggctggagagcgccaactttggcctgcacatcagccgcatcaggaaggacagcggggaggagaatgcccacccccggcggggccagatcatcgacttccagggcctgctgacagatgccatcaagggggccaccagcgagctggccctgaacacctttgaccacaacccagaccccagcgagcggctgctgaagcccctgagcgccttcatcggcatgaacagcgagatgagggagctggccgctgtggtgtcccgggacatctacctgcacaaccccaacatcaagtggaatgacatcatcggcctggatgctgccaagcagctggtgaaggaggccgtggtgtaccccatccgctacccccagctgttcaccggcatcctgagcccctggaagggcctgctgctgtatggccccccaggcaccgggaagaccctgctggccaaggctgtggccacagagtgcaagaccaccttcttcaacatcagcgccagcaccatcgtgtccaagtggaggggggacagcgagaagctggtgcgggtgctgtttgagctggcccgctaccacgcccccagcaccatcttcctggatgagctggagagcgtgatgagccagaggggcacagccagcggcggggagcacgagggcagcctgaggatgaagacagagctgctggtgcagatggatggcctggcccggtctgaggacctggtgtttgtgctggccgccagcaacctgccctgggagctggactgtgccatgctgcggcggctggagaagaggatcctggtggacctgcccagccgggaggcccggcaggccatgatctaccactggctgccccctgtgtccaagagccgggccctggagctgcacacagagctggagtacagcgtgctgagccaggagacagagggctacagcggcagtgacatcaagctggtgtgccgggaggccgccatgaggcctgtgaggaagatctttgatgccctggagaaccaccagagcgagagcagtgacctgccccgcatccagctggacatcgtgaccacagctgacttcctggatgtgctgacccacaccaagcccagcgccaagaacctggcccagcgctacagcgactggcagcgggagtttgaatctgtgtag

SEQ ID NO: 294773 - DNA, 1401 bp, Artificial Sequence
  derived and/or modified sequence
atggagtacgagagctactacttcgtgaagttccagaagtaccccaagattgtaaagaagagctctgacaccgctgaaaataacttgcctcagcggtcacgggggaagacaagacgcatgatgaatgactcttgccaaaacctgcccaaaattaatcagcaaaggccgcgttcgaagactactgccggaaaaacaggcgacaccaaatctttgaacaaagaacaccccaaccaagaagtcgttgacaacaccaggctggaatccgccaatttcgggcttcatatcagccgtattagaaaagacagcggagaggaaaacgctcacccccggaggggtcaaatcatcgatttccagggccttcttacagacgcaattaagggagccaccagcgaactggcgctcaacacatttgaccacaacccagacccatctgaaaggttgttaaagcccctgagcgcctttatcggcatgaactccgaaatgcgtgagctggccgctgttgtctctagagacatctaccttcataatccaaacattaagtggaatgatatcatcgggcttgatgcggccaaacagctggtgaaagaagctgttgtctatcccatacgatacccccagcttttcacgggaattctgtccccctggaaaggcctgttgctgtatggcccaccaggcacggggaagactctgcttgcaaaggctgttgccaccgagtgcaagacaactttcttcaacatctccgcctctacaatagtttcgaagtggcgaggggactcggaaaaactggtccgggtcctgtttgaactggctagatatcatgccccatctacaatatttttggacgagttggaatcagtgatgagtcaacggggcaccgcatccggcggagagcacgaaggaagcctccgtatgaagacagagttgttggtgcagatggatgggctggcccgatctgaggacctggtttttgttttggccgcatccaacctgccatgggagttagactgtgctatgctgcgccgcctggagaagaggattttagttgacctgccgtcacgggaggctcgtcaggctatgatctatcattggttgccgcccgtttctaagagtcgggcgctcgagctacataccgagttggagtactccgtgctcagtcaggagaccgaggggtattctggatcagacatcaaactggtatgccgggaggcagccatgcgcccggttcggaaaatttttgatgcactggaaaatcatcaatctgagagcagcgaccttccacgcatccagctcgatatcgtcactaccgccgacttcctcgatgtgctgactcataccaaaccatccgcaaagaacctcgcccaacgatattccgactggcagcgggagtttgagtctgtttag

SEQ ID NO: 294774 - DNA, 1617 bp, Artificial Sequence
  derived and/or modified sequence
atggagctgagctaccagaccctgaagttcacccaccaggcccgggaggcatgcgagatgcgcaccgaagcacgccgtaagaatctacttatcctaattagtcattatctgacccaggagggatacattgacactgccaatgcccttgagcaagagaccaaactcggtctcagacggttcgaggtctgcgacaacattgatctcgagaccattctgatggaatacgagagctactatttcgtaaagtttcagaagtacccaaagatagttaagaagtcctctgacaccgctgagaacaacttgccgcagcggagccgggggaaaacccgcaggatgatgaatgattcctgtcagaacctccctaagataaaccaacaacgacctcgaagtaaaacgactgccggcaaaacgggcgataccaagagcctcaataaagagcacccaaatcaggaggtagtagataacacgaggctggaaagcgctaacttcggcctccatataagtagaatcagaaaggacagtggcgaggaaaacgcccaccccagacgcggccagatcattgattttcaggggctgttaaccgacgcaatcaagggcgctacttcagagctcgctctgaacacctttgaccacaatccagacccctcggagagacttttgaagccgctgagcgcctttataggaatgaactccgaaatgcgagagctggccgctgttgtgtcgcgggatatataccttcataaccctaatatcaagtggaatgatattattggattggacgcagccaagcaactggtcaaagaagccgtcgtgtacccaatcagataccctcagctgtttacaggaattctttctccctggaaaggactcttgctgtatgggcctcccggaactggaaagaccctcctggctaaggctgttgcgactgagtgcaagacgacgtttttcaacatctcggcatccaccattgttagcaaatggagaggagattccgagaagctggtgagggttctcttcgagctcgccagataccacgcacctagcacgatctttttagacgaacttgaatccgtcatgagccagagagggactgcttcgggaggagaacacgagggcagcctgaggatgaaaaccgaactattggtgcagatggatggccttgcacgttcagaggacctggtctttgtcctggccgcctcaaatcttccctgggaactagactgcgccatgctgaggcggctggaaaagcgcattctcgtggacctgcctagccgggaggcgaggcaggcaatgatatatcactggcttccccccgtttccaagtccagggccctcgagctgcacaccgagctggaatattccgtgctctctcaggagactgaggggtattctgggagcgacatcaaactcgtatgcagagaggcagccatgcgacccgtccgaaagatcttcgatgccctagaaaaccaccagagtgagtctagtgacctgcccagaatacaactagacatcgttaccactgcggatttcctagacgtgttgacacatactaagccctccgctaaaaacctggcacagcgttactccgattggcaacgagaatttgaatccgtctag

SEQ ID NO: 294775 - DNA, 1401 bp, Artificial Sequence
  derived and/or modified sequence
atggagtacgaatcatattatttcgtgaaattccagaaatatcccaaaatcgtgaaaaaaagttcagatacggctgaaaataacttgccccagagaagcagaggaaaaaccaggcgaatgatgaacgatagctgtcaaaacttacccaaaataaatcagcagcgcccacgcagcaaaacaactgcaggtaagactggtgatacaaagagtctaaataaagagcaccccaatcaggaggttgtggataacacccggctggaaagcgcaaacttcggacttcacatctctcgcataaggaaagactcaggcgaggaaaacgcccaccccagacggggacaaattatcgactttcagggcctccttacagacgccattaagggcgctaccagcgagctggctctcaatactttcgatcataacccagatccgtccgagcgacttcttaaaccactcagcgcgtttattggaatgaattcagagatgcgcgaacttgctgctgtcgtgagcagagatatctatctgcataatcctaatatcaaatggaacgacatcattggtttagacgccgcaaagcagctggtcaaagaagctgtggtctacccgatcagatacccacaattgttcaccggaattctgtccccctggaagggcctgttattgtacggaccacctggcacgggtaagaccctgctcgctaaggccgtcgccacagagtgcaaaacaacattttttaacatttccgcctcaaccatcgtttccaagtggcggggagattcggaaaagctggtgcgtgtgctgttcgagttagcaagatatcatgcccctagcaccatatttctcgacgaacttgaatctgtgatgtcacagagaggaacagccagtggtggggagcatgaaggctctctgcgcatgaagactgagctgctggtgcaaatggacggcctggccagaagcgaggacctggtcttcgtgcttgcggcatccaatctgccatgggagctggactgtgccatgctgcggcgattagagaaaaggatactcgtagatcttcccagccgcgaggcgcgacaagcaatgatataccactggctgcctcctgtgtccaaatccagagcccttgaactacacacagagctggaatacagcgtgctgtcacaggagacagaaggttattcaggttctgacattaagctggtctgtcgagaggccgctatgcggcctgtgaggaagatcttcgacgccctggagaatcaccagagcgagtcttccgacctgcccaggatccagcttgacattgtgactacagcagactttctcgacgttctgactcataccaagccctccgcaaaaaacttggcacaaaggtactccgattggcagagagagttcgaatcggtttag

SEQ ID NO: 294776 - DNA, 2832 bp, Artificial Sequence
  derived and/or modified sequence
agtaactgactacttttctcccttctctagggtcctagcacagtgtctgatggagctttcctaccagaccctgaaattcacgcatcaggcgcgggaagcggtatatcgatacagcaaatgctttggagcaagaaactaaactggggttacgacggtttgaagtttgtgacaacattgatcttgaaactattttgatggaatatgagagttattattttgtaaaatttcagaaataccccaaaattgtcaaaaagtcatcagacacagcagaaaataatttaccgcaaagaagtagagggaagaccagaaggatgatgaacgacagttgtcaaaatcttcccaagatcaatcagcagaggccccggtccaaaaccacagcggggaagacaggggacaccaaatcgctcaataaggagcatcctaatcaggaggtagttgataacactcgcctggaaagtgccaacttcggcctacatatatcaagaatccgtaaagacagtggagaggaaaatgcccacccacgaagaggccaaatcattgacttccaagggctgctcacagatgccatcaagggagcaaccagtgaacttgccttgaacaccttcgaccataatccagacccctcagaacgactgctgaaacctctgagtgcatttattggcatgaacagtgagatgcgagaattggcagccgtggtgagccgggacatttatctccataatccaaacataaagtggaatgacattattggacttgatgcagccaagcagttagtcaaagaagctgttgtgtatcctataaggtatccacagctatttacaggaattctttctccctggaaaggactactgctgtacggccctccaggtacaggaaagactttactggccaaagctgtggccactgaatgtaaaacaaccttctttaacatttctgcatccaccattgtcagcaaatggagaggggattcagaaaaactcgttcgggtgttatttgagcttgcccgctaccacgccccatccacgatcttcctggacgagctggagtcggtgatgagtcagagaggcacagcttctgggggagaacatgaaggaagcctgcggatgaagacagagttactggtgcagatggatgggctggcacgctcagaagatctcgtatttgtcttagcagcttctaacctgccgtgggagctggactgtgccatgttacgccgcctggagaagaggattctggtcgatctccccagccgggaggccaggcaggccatgatctaccactggctgcctcctgtgagcaagagcagggccttggagctgcacacagagctggagtacagtgtgctgagccaggagactgagggctactcaggctcagatattaagctcgtctgcagggaagcagccatgcggcccgtgaggaagatctttgatgcacttgaaaatcaccagtcagaaagcagcgacttacccaggatccagttggatatagtaaccactgccgactttctggatgtgctaactcacaccaagccctccgcaaagaatctggctcagagatactcagactggcaaagagagttcgagtctgtctgaaaccacatttaccctgacctggccacaaaggcaaccacaaagacctcctagtttattaatgtccgtgggagaacaaaatgattggaatggaaaagagaaaattatttttgaagactggattaacttgagccactgtattgttttggatagctgagatatatttattaacttaccattatcgatgtcagcaaaatattgagagtttcagttacatacatatatgtgctattgggtcatacaatggagatttttctgacaattagactccataaaattttaatgaacaattttctgtaatgttactcatttgtaaactttttaagaaaaagatgtacttagaaaagttgtgttggccacacacaggatgaccctgagttggggcagccaagtagaagctaagcttgacaggcactgcccagctgacagtcccagggtgaaggaggacggaagcagggaaggcaatgcagtctgtttctcattccggacaatattctgaatctcatcagctccccctaattctgactccatccagctttgtcagcagcaaacccctcccaaactaagccccactcagaaatgtcactgagcattctgatgctagagctaatagccagggtgactagcacaccatcaccatcagctgccagtctgattgttttgggttctggcccccaataacatcttttcactcttcacacctcacatccggtgtgctctgcccttctctttccattgccgcagcttctcatcagatccaaagcttaggatggggcacctaagcttcgagaacattcatcccaagtcttccctgctcttaggctcttccccctctccttaaggggttataaacaactagacgcatctctctcagaaacccacaatccgaggcatctactttcaacccttgataaattttgaaggcttctactaagtaatgccacttcttttcccccactagaacttacctatgggaaatcaccttcttttctcttccttgccttgtcttcatcatccctgcagacagactcttcaagaggaaaaacctccagaaagagacactttggatagctaagtatcccaaaggattttacccttttaaacaaaaccaaagcatttttttcggtatcgattattttgagattattctcaaatgcctctttaaacatcatttcatggaaaatgtcaaattgaaaatataccttatttaacaaattgaaaataaaaaagatttcatctc

SEQ ID NO: 294777 - DNA, 1617 bp, Artificial Sequence
  derived and/or modified sequence
atggagctctcatatcagacgttaaaatttacccatcaggccagggaggcgtgcgaaatgcggacggaagctcggaggaagaacttactcatcttaatctcccactatttgacccaagaggggtatatcgatacagcgaatgcacttgaacaggagaccaaactaggtttgcgtcggtttgaggtttgcgacaacatcgacctcgagaccatactaatggagtatgagtcatactactttgtcaagttccaaaagtaccccaaaattgtgaaaaaaagtagcgatactgccgaaaataatttaccccagagatcccggggaaaaactcggaggatgatgaatgattcatgtcagaatctgcccaaaattaaccaacagcggccacggagcaagacgaccgcaggtaaaactggagacaccaaatcccttaataaagagcacccaaatcaggaagtagtggataatacacgcctcgaatcagccaacttcgggttgcatatttcccggatccgcaaagacagtggggaggagaatgcccaccccagacggggtcaaattattgattttcagggcctcctaaccgatgcaatcaagggcgcaacatcggaattagccttaaacactttcgaccacaatcccgacccttctgagcggcttcttaagcccctttccgcctttatcggtatgaattcagagatgcgagagctcgccgctgtcgtctcccgagatatctacctgcataatccaaatattaaatggaatgacatcattggactcgatgccgctaagcagttggtcaaggaggccgtcgtgtatcccatacggtacccgcagctttttacaggaatactgtctccctggaaagggctgctcctttacggccctcctggcaccgggaagacactgctggcaaaagctgtggccaccgagtgtaagaccaccttttttaatatctcggcctctacaattgtgagcaaatggaggggagattcagagaagttagtgcgtgtgctgttcgaactcgcccgataccatgctccttccacaattttcctagatgaactggaatccgtcatgagccaaagagggacggcctcaggaggtgagcacgaaggcagcctgaggatgaagactgaactcctggtccagatggatggtctggctcgatcagaggaccttgtctttgtcctagctgccagtaatcttccctgggagcttgattgcgctatgctgagacgcctcgaaaagcgcatactggttgatctgccgtcaagagaggctaggcaggccatgatttaccattggcttccccctgtctcgaaaagtcgggcactggagctgcataccgagttagagtactctgtgctgtcacaggagacggaaggttacagtgggtcagatatcaagctcgtgtgccgggaggccgctatgcgtcctgtccgcaaaatcttcgacgccctcgaaaatcaccagagtgagagctcagacctgccacggattcagctggacatcgttacgaccgccgattttctagatgtgctgacacacactaagccgtccgccaagaacctggcccagcggtattcagactggcaacgagaattcgaaagtgtgtag

SEQ ID NO: 294778 - DNA, 1401 bp, Artificial Sequence
  derived and/or modified sequence
atggagtacgagagctactacttcgtgaagttccagaagtaccccaagatcgtgaagaagagcagcgacaccgccgagaacaacctgccccagagaagcagaggcaagaccagaagaatgatgaacgacagctgccagaacctgcccaagatcaaccagcagagacccagaagcaagaccaccgccggcaagaccggcgacaccaagagcctgaacaaggagcaccccaaccaggaggtggtggacaacaccagactggagagcgccaacttcggcctgcacatcagcagaatcagaaaggacagcggcgaggagaacgcccaccccagaagaggccagatcatcgacttccagggcctgctgaccgacgccatcaagggcgccaccagcgagctggccctgaacaccttcgaccacaaccccgaccccagcgagagactgctgaagcccctgagcgccttcatcggcatgaacagcgagatgagagagctggccgccgtggtgagcagagacatctacctgcacaaccccaacatcaagtggaacgacatcatcggcctggacgccgccaagcagctggtgaaggaggccgtggtgtaccccatcagatacccccagctgttcaccggcatcctgagcccctggaagggcctgctgctgtacggcccccccggcaccggcaagaccctgctggccaaggccgtggccaccgagtgcaagaccaccttcttcaacatcagcgccagcaccatcgtgagcaagtggagaggcgacagcgagaagctggtgagagtgctgttcgagctggccagataccacgcccccagcaccatcttcctggacgagctggagagcgtgatgagccagagaggcaccgccagcggcggcgagcacgagggcagcctgagaatgaagaccgagctgctggtgcagatggacggcctggccagaagcgaggacctggtgttcgtgctggccgccagcaacctgccctgggagctggactgcgccatgctgagaagactggagaagagaatcctggtggacctgcccagcagagaggccagacaggccatgatctaccactggctgccccccgtgagcaagagcagagccctggagctgcacaccgagctggagtacagcgtgctgagccaggagaccgagggctacagcggcagcgacatcaagctggtgtgcagagaggccgccatgagacccgtgagaaagatcttcgacgccctggagaaccaccagagcgagagcagcgacctgcccagaatccagctggacatcgtgaccaccgccgacttcctggacgtgctgacccacaccaagcccagcgccaagaacctggcccagagatacagcgactggcagagagagttcgagagcgtgtag

SEQ ID NO: 294779 - protein, 123 aa, Artificial Sequence
  derived and/or modified sequence
MCVRRSLVGLTFCTCYLASYLTNKYVLSVLKFTYPTLFQGSHVLVWLPASVLFVGIIYAGSRALSRLAIPVFLTLHNVAEVIICGYQKCFQKEKTSPAKICRLHLERTRQNQTSRLSSCLKGD

SEQ ID NO: 294780 - DNA, 372 bp, Artificial Sequence
  derived and/or modified sequence
atgtgcgtgagaagaagcctggtgggcctgaccttctgcacctgctacctggccagctacctgaccaacaagtacgtgctgagcgtgctgaagttcacctaccccaccctgttccagggcagccacgtgctggtgtggctgcccgccagcgtgctgttcgtgggcatcatctacgccggcagcagagccctgagcagactggccatccccgtgttcctgaccctgcacaacgtggccgaggtgatcatctgcggctaccagaagtgcttccagaaggagaagaccagccccgccaagatctgcagactgcacctggagagaaccagacagaaccagaccagcagactgagcagctgcctgaagggcgactag

SEQ ID NO: 294781 - DNA, 372 bp, Artificial Sequence
  derived and/or modified sequence
atgtgtgtcaggcgatcgctggtcggcctgactttctgcacctgctacctagcctcctatttgactaacaaatacgtgcttagcgtcctgaagtttacttaccctaccctcttccagggaagccacgtacttgtgtggttgcccgcaagtgtattgttcgttgggatcatctacgccggctctcgagcactctccaggttagctatcccggttttcctgacgctccataatgtggcagaggtgatcatttgtggctatcaaaagtgctttcaaaaagagaaaacttcccccgctaagatctgccgcctgcacctggagcggacgcgtcagaaccaaaccagccggctctcatcctgcctgaagggagattag

SEQ ID NO: 294782 - DNA, 372 bp, Artificial Sequence
  derived and/or modified sequence
atgtgtgtgcggcgcagcctggtgggcctgaccttctgcacctgctacctggccagctacctgaccaacaagtatgtgctgtctgtgctgaagttcacctaccccaccctcttccagggcagccacgtgctggtgtggctgcctgcctctgtgctgtttgtgggcatcatctatgccggcagccgggccctgagccggctggccatccctgtgttcctgaccctgcacaacgtggccgaggtgatcatctgtggctaccagaagtgcttccagaaggagaagaccagccctgccaagatctgccgcctgcacctggagaggacccggcagaaccagaccagccggctgagcagctgcctgaagggggactag

SEQ ID NO: 294783 - DNA, 372 bp, Artificial Sequence
  derived and/or modified sequence
atgtgcgtgcggcggagcctggtgggcctgaccttctgcacctgctacttagctagttatctgacaaacaaatatgtacttagcgtacttaagttcacctaccctacgctgtttcaaggcagtcatgtcctagtatggcttccggcttccgttctgtttgtgggcattatttatgcaggcagccgcgctctgtcaagactggccatccccgtgttcctcaccctacataacgtagcagaagtgatcatctgcggctaccaaaaatgtttccagaaagagaaaacatctcctgcaaaaatatgtcgtctccaccttgaacgaacccgccagaatcagacctcacgtttaagcagttgtttaaagggggactag

SEQ ID NO: 294784 - DNA, 372 bp, Artificial Sequence
  derived and/or modified sequence
atgtgcgtgaggcgatcactcgtgggacttactttctgtacatgctatttagcctcataccttacaaacaagtacgtgctttctgtgctaaaattcacataccccaccttgtttcagggcagtcatgtgctcgtgtggctgcccgcaagtgtactcttcgtggggataatttatgcagggtccagggctctctccaggttagctatccccgtgttccttacccttcataatgtcgcggaggtgattatctgtggctaccagaagtgtttccagaaggagaaaacaagtccagcaaagatatgtcggcttcatctggagcggactaggcaaaatcaaacatctcggttaagctcatgtcttaagggcgactag

SEQ ID NO: 294785 - DNA, 481 bp, Artificial Sequence
  derived and/or modified sequence
gtctctgggcggctgctgccgctgccgctgctgctgctgcgggggtcgggcggcggccaggggatttgggcaggcaccgtggatccccgagaaggggacgagttgacagatgtgcgtgaggaggtctctggtcggcctcaccttttgtacctgctacctggcttcttacctcacgaacaagtatgtgctgtctgtcttgaaatttacctaccctacattattccaaggatctcatgttcttgtgtggcttcctgcttcagtgctgtttgtgggtataatctatgctgggtccagagcattgtccagactggccattcctgtgtttctcactttgcataatgtagctgaagttatcatctgtgggtaccagaagtgttttcagaaagagaaaacatctcctgcaaagatctgtaggttgcaccttgaaagaacaagacaaaaccaaacttcaagactatcctcctgtttaaaaggagactag

SEQ ID NO: 294786 - DNA, 2193 bp, Artificial Sequence
  derived and/or modified sequence
acaaataaagccgcagctagaagatgaacaacaaagaaagatgggtttaggcgctatcgaatggtgtgtgtatttgttcctttttctggggtggctctagtctcatggccacaaagctctagcccaggcgccgcgaggcactggcattgagagcccaatgcatctcagcctcacgctgcagaagccagtggggctggggagccgcagcagcgtcgattttcttcacaagaagatgggaactgtgggctacaagtaggatggcagatctgatgcaggagacctttctgcatcatgccacggatggcgtaggggtagatgagaagctatctttacgacgggtagctgtggttgaagatttctttgacattatttattcgatgcatgtggaaacggggccaaatggagaacaaattcggaaacacgctggacaaaagagaacttacaaagcaatacagaaaaatgtgtgaaatgctcaaagtttcaaatacagatttcagagagctatgccttcctaccaagagaagcggtgacacgatttctaatgagctgctcagagtgccagaaaagaatgcatttaaacccagatggaacagatcataaagataatggaaaacctcccactttggtgaccagcatgattgactacaacatgccaattaccatggcctacatgaaacacatgaagctgcagctgctaaactcacagcaagatgaggatgaaagttcaatagaaagtgatgaatttgacatgagtgattcaacacggatgtcagctgtgaactctgatcttagctccaatcttgaagaaagaatgcaaagtccccagaatcttcatggccagcaagatgatgattctgctgcagagagctttaatggcaatgagactctggggcacagttcaattgcttcagggggaacacacagcagggagatgggagactccaacagtgatggcaaaactgggctggagcaagatgaacagccactgaacctgagtgacagtcccctctctgcgcagctaacttcggaatacagaatagatgatcacaacagtaatgggaaaaacaagtataagaatcttctaatttctgacctcaagatggaacgagaggcgagagaaaatggaagcaagtctcctgcacatagttactccagctatgactctggcaaaaatgagagtgtagaccgaggagctgaggacctctcactaaacaggggagatgaggacgaagatgaccacgaggaccatgacgattcggagaaagttaatgagacagacggcgttgaagccgagcggctgaaagcttttaattctcgacctattccttcccaccttacttcagcagttgcagagagtatcttggcttcagcttgtgagagtgagagtagaaatgccgccaagaggatgcgtctggagagacagcaggatgagtctgctccagctgacaaacagtgtaaaccagaggcgacccaggccacttactcaacatcagctgttccaggctcacaggacgtgctgtacatcaatggaaatgggacctatagttaccatagttacagagggctaggagggggtctgctaaatctgaatgatgcttccagcagtggacccactgatctcagcatgaagagacaattggcgactagctcaggatcctccagcagctcaaactccagaccccagctgagtccaactgaaatcaatgccgtgagacagcttgttgcaggatatcgagaatcagctgcatttttattgcgatctgcagatgaactggaaaatctcattttacaacagaactgagacagacgaccaccatattcactgaggtctaaatttgcagtttccactaatgacattttgatttcccaacagagatacttctggtcttactgcacagtcttttaagagaaatacttccattatgccacattgtccttgatccgtaagtgatgtgttaaggtgcttcaaaggaactctgacctctgaagtacttgagctactttagtatgtccagcctattgctttttgttttagtgtgtcaccataaatatcaggggcataaaaggctatctattcttaattcaaggataaaacagaagaagcttgtggtataaaacaatagttcaagatccagctgaaatattagtggaatttgctactgactcattggactgaaagctgaagtacctggc

SEQ ID NO: 294787 - DNA, 1853 bp, Artificial Sequence
  derived and/or modified sequence
cttactgtgcagaggagagaatttaggggaagtcagactaatccctgggtgcacttcgagagaaaggttggacctcgcctgagggatgctggatctgcaatgatagaattggcctgccacagacattggtatttaagttgaagagcagaattcacaatgattctgctgcagagagctttaatggcaatgagactctggggcacagttcaattgcttcagggggaacacacagcagggagatgggagactccaacagtgatggcaaaactgggctggagcaagatgaacagccactgaacctgagtgacagtcccctctctgcgcagctaacttcggaatacagaatagatgatcacaacagtaatgggaaaaacaagtataagaatcttctaatttctgacctcaagatggaacgagaggcgagagaaaatggaagcaagtctcctgcacatagttactccagctatgactctggcaaaaatgagagtgtagaccgaggagctgaggacctctcactaaacaggggagatgaggacgaagatgaccacgaggaccatgacgattcggagaaagttaatgagacagacggcgttgaagccgagcggctgaaagcttttaatatgtttgtcaggctgtttgtagatgaaaacttggaccgaatggtcccaatctctaagcagcccaaagaaaagatccaggctatcattgactcatgcaggcgacaattccctgagtatcaagagcgtgccagaaaacgtatacgtacttacctcaagtcctgcaggcggatgaaaagaagtggttttgagatgtctcgacctattccttcccaccttacttcagcagttgcagagagtatcttggcttcagcttgtgagagtgagagtagaaatgccgccaagaggatgcgtctggagagacagcaggatgagtctgctccagctgacaaacagtgtaaaccagaggcgacccaggccacttactcaacatcagctgttccaggctcacaggacgtgctgtacatcaatggaaatgggacctatagttaccatagttacagagggctaggagggggtctgctaaatctgaatgatgcttccagcagtggacccactgatctcagcatgaagagacaattggcgactagctcaggatcctccagcagctcaaactccagaccccagctgagtccaactgaaatcaatgccgtgagacagcttgttgcaggatatcgagaatcagctgcatttttattgcgatctgcagatgaactggaaaatctcattttacaacagaactgagacagacgaccaccatattcactgaggtctaaatttgcagtttccactaatgacattttgatttcccaacagagatacttctggtcttactgcacagtcttttaagagaaatacttccattatgccacattgtccttgatccgtaagtgatgtgttaaggtgcttcaaaggaactctgacctctgaagtacttgagctactttagtatgtccagcctattgctttttgttttagtgtgtcaccataaatatcaggggcataaaaggctatctattcttaattcaaggataaaacagaagaagcttgtggtataaaacaatagttcaagatccagctgaaatattagtggaatttgctactgactcattggactgaaagctgaagtacctggcaaaaaaaaaaaaaagaaaaaaaaaagccaaatttcttgttgctacaggatataacaacaatgaaaaggatctcgtattttaaaaaaatatgtaatttttataaaaagaaaacttgtttttcattcaaacttgtcatttttactttggtaactttttcata

SEQ ID NO: 294788 - protein, 282 aa, Artificial Sequence
  derived and/or modified sequence
MSVYLVRQLTSAMLLQRLKMKGIRNPDHSRALIKEKLTADPDSEIATTSLRVSLMCPLGKMRLTIPCRAVTCTHLQCFDAALYLQMNEKKPTWICPVCDKKAAYESLILDGLFMEILNDCSDVDEIKFQEDGSWCPMRPKKEAMKVSSQPCTKIESSSVLSKPCSVTVASEASKKKVDVIDLTIESSSDEEEDPPAKRKCIFMSETQSSPTKGVLMYQPSSVRVPSVTSVDPAAIPPSLTDYSVPFHHTPISSMSSDLPGEQRRNDINNELKLGTSSDTVQQ

SEQ ID NO: 294789 - DNA, 1947 bp, Artificial Sequence
  derived and/or modified sequence
atgggtcggctgccctgtgggccattgcctggccaatggactgctgattgcagcgagcccttggactcgtcctgctccttttctcgcggaagggctccgccccagcaaaacgggtccaaggacaactctcttgatatgcttggtaccgatatctgggccgcaaatacgtttgatagtttttccggggcaacctgggacttgcaacccgaaaaattggattttacccagtttcatcgcaaggttcgccatacccctaaacagcctctcccgcatattgatagagagggctgcggtaaggggaaactggaagacggcgacgggattaacctgaacgacatagaaaaggtccttcctgcttggcagggctatcatccaatgccccatgaggttgagatagcgcacacaaaaaaactgtttagaaggagaagaaatgacaggaggcggcagcagcgaccccctggcggaaacaaaccccagcagcacggcgatcatcagcctgggagcgccaaacataatcgtgatcaccaaaaaagttaccagggcggatcggcaccccatcccagcggtagaccaacacaccatggatattctcagaataggagatggcatcacggcaacatgaagcatccgccaggcgataagggtgaagcaggagcgcatagaaacgccaaagagaccatgaccattgaaaaccccaagctcgaggacacagccggtgatactgggcattcctcccttgaagcaccccgtagccccgacactttggcccccgtggcctccgagcgtttaccccctcagcagagcggggggccagaggttgagaccaaacggaaagactccatattgccggaacggataggcgagagacccaagattactttgttgcagagttctaaagatcgactgagacgaagattgaaagaaaaggacgaagttgccgtggaaaccaccaccccccagcaaaacaagatggacaaattgatagaaattctgaacagtatgcgtaacaacagttcagacgtcgataccaagctgacaacttttatggaggaggctcagaattctacgaactctgaagagatgttgggggagatcgttagaacaatttaccagaaggccgtgtccgacagaagcttcgcattcactgcagccaaactgtgtgataagatggctctctttatggttgagggaaccaagttcaggtcactcctgcttaatatgctgcagaaggactttactgtgcgggaagaactgcagcaacaagatgtagaaagatggctcggcttcatcacttttctgtgcgaggtgttcgggacaatgcggtctagcaccggcgagccattcagggtactggtttgtcccatctacacctgtctgagggagctgctccaaagccaggacgttaaagaagacgccgtactgtgttgctcaatggaattgcaatccacaggccggctgctggaggaacaactgcccgaaatgatgaccgaactcttggcctctgcccgcgataaaatgctctgcccgagtgagagcatgttgactaggtctctgctcctcgaagtcattgaacttcacgccaacagctggaaccagggggcatggcaggcagctcacggccagctggggccctggtgcaccggccccgacggacaggccggcggccagggatggccctggagagagaaggagatgggccgtcgtgcagggcgggtgggaggccagtctggagctcgggcctgcaaactgacgcccattcgggaagcttgcttttttttcctggtcgccctggccctgcctttccttaccccagcaagtcctttgcccatccggccaataccccacggagcgctttgtgaggggtctcataggtgtgacagttccgagaccctcgcagcatctcacgcgggcgcacctctcggatcagagaggacctccgaaggatag

SEQ ID NO: 294790 - DNA, 1947 bp, Artificial Sequence
  derived and/or modified sequence
atgggccgcctgccctgtggccccctgcccggccagtggacagctgactgcagcgagcccctggacagcagctgcagcttcagccggggccgggccccaccccagcagaatggcagcaaggacaacagcctggacatgctgggcacagacatctgggccgccaacacctttgacagcttcagcggggccacctgggacctgcagcctgagaagctggacttcacccagttccacaggaaggtgcgccacacccccaagcagcccctgccccacatcgaccgggagggctgtgggaagggcaagctggaggatggagatggcatcaacctgaatgacatcgagaaggtgctgcctgcctggcagggctaccaccccatgcctcatgaggtggagatcgcccacaccaagaagctgttcagaagaagaagaaatgacagaagacggcagcagaggcctcctgggggcaacaagccccagcagcacggggaccaccagcccggcagcgccaagcacaacagagaccaccagaagagctaccagggcggcagcgccccccaccccagcggccggcccacccaccacggctacagccagaacagacgctggcaccacggcaacatgaagcaccccccaggggacaagggggaggccggggcccacagaaatgccaaggagaccatgaccatcgagaaccccaagctggaggacacagctggggacaccggccacagcagcctggaggcccccaggagcccagacaccctggcccctgtggccagcgagcggctgcccccccagcagagcggcggccctgaggtggagaccaagaggaaggacagcatcctgcctgagcgcatcggggagcggcccaagatcaccctgctgcagagcagcaaggaccggctgcggcggcggctgaaggagaaggatgaggtggccgtggagaccaccaccccccagcagaacaagatggacaagctgattgagatcctgaacagcatgaggaacaacagcagtgatgtggacaccaagctgaccaccttcatggaggaggcccagaacagcaccaacagcgaggagatgctgggggagatcgtgaggaccatctaccagaaggctgtgtctgacaggagctttgccttcaccgctgccaagctgtgtgacaagatggccctcttcatggtggagggcaccaagttccgcagcctgctgctgaacatgctgcagaaggacttcaccgtgcgggaggagctgcagcagcaggatgtggagcgctggctgggcttcatcaccttcctgtgtgaggtgtttggcaccatgaggagcagcactggagagcccttccgggtgctggtgtgccccatctacacctgcctgcgggagctgctgcagagccaggatgtgaaggaggatgctgtgctgtgctgcagcatggagctgcagagcacaggccgcctgctggaggagcagctgcctgagatgatgacagagctgctggccagcgcccgggacaagatgctgtgccccagcgagagcatgctgaccaggagcctgctgctggaggtgattgagctgcacgccaacagctggaaccagggcgcctggcaggccgcccacggccagctgggcccctggtgcaccggcccagatggccaggccggcggccagggctggccctggagggagaaggagatgggcagaagagctggccgggtgggcggccagagcggggcccgggcctgcaagctgacccccatccgggaggcctgcttcttcttcctggtggccctggccctgcccttcctgaccccagccagccccctgcccatccggcccatcccccatggagccctgtgtgagggcagccaccgctgtgacagcagcgagaccctggccgccagccacgccggggcccccctgggcagcgagaggaccagcgagggctag

SEQ ID NO: 294791 - DNA, 1947 bp, Artificial Sequence
  derived and/or modified sequence
atgggccggctgccctgcggccccctgcccggccagtggaccgccgattgctcagaaccgctcgactccagttgttccttcagtcgtggccgggcccctccacagcagaatggtagtaaggataattcattagatatgctgggcactgacatctgggccgctaacacctttgacagtttttctggtgcaacctgggatctccaacctgagaaactagattttactcagttccatcgtaaggtcaggcatacccccaagcagccactgcctcatattgacagggaaggctgcggaaaaggcaaattggaagatggcgatggtatcaatctgaacgacattgagaaggttttgccagcttggcagggttaccatcctatgcctcatgaggtcgaaatagctcacactaaaaagctgttccgcagaagaaggaatgacagacggagacagcagaggccaccgggcggaaacaaaccccagcagcacggagatcatcagcccggctctgccaaacacaaccgagaccatcaaaaaagctatcagggcggatctgccccccacccttccggtcggcctactcaccacggctatagtcagaaccgtcgatggcatcatggcaatatgaaacacccccctggtgacaagggggaagcaggcgcccatcgcaatgcaaaggagacaatgacaattgaaaatcctaaactcgaggatactgcgggcgacactgggcactcttcacttgaggcacctagatcgcccgacactctcgctcccgtcgcgtctgaaaggttacctccccagcagtctggtggtccagaggtggagacgaagagaaaggacagcattttacctgaacggattggcgaaaggcccaagatcaccctgttacaatcaagcaaagacaggctccgcagaaggttgaaggaaaaggatgaagtggctgtggagacaaccacaccacagcagaataagatggacaagctgatcgaaatcctaaattcaatgaggaacaactcatctgacgtggataccaaactcacaacctttatggaagaagcccagaacagcaccaattctgaggagatgctaggtgagatcgttcgcacgatctaccagaaggccgtctctgaccgaagcttcgcatttaccgctgcaaagttatgtgataaaatggcattattcatggttgaggggacaaaatttcgatcactactcctgaatatgcttcagaaggattttaccgtccgagaggagctccaacagcaggatgtcgagagatggctgggcttcatcacattcctgtgtgaggtgttcggcactatgcgatcttcaaccggcgagccttttagggtgctggtttgtcccatctatacttgcctgcgcgaacttctacagtcccaggacgtcaaggaggatgctgtcctctgctgcagcatggagctgcaatcaaccggaaggctgctcgaggaacagttgcctgagatgatgaccgagttgctggcctctgcccgagacaaaatgctttgtccgtccgagtcaatgcttactaggtccctcctgctcgaggtcatagaactgcacgccaactcttggaatcagggcgcttggcaggccgctcatggccaattggggccctggtgtacggggccagatgggcaagcgggaggtcagggatggccctggcgggagaaagaaatggggagaagagcgggccgggtgggcggccagtcaggcgcacgcgcatgcaagctgacgccgatcagggaagcttgtttcttttttttggttgctctggcgctcccctttttgacccccgcttcaccactccccatccgtcctatcccccacggggccctgtgcgaaggctcccaccggtgtgattctagtgaaacgctggccgctagccatgctggggccccactgggaagtgaacgcacaagcgaaggctag

SEQ ID NO: 294792 - DNA, 1947 bp, Artificial Sequence
  derived and/or modified sequence
atgggcaggctgccctgtgggccactgcctggacagtggacggcagattgcagtgagcctcttgattcctcatgcagctttagtaggggacgggctcctcctcagcagaacggttcgaaggacaatagcctcgatatgctggggaccgacatctgggctgcaaatactttcgatagcttcagcggcgctacctgggacttgcaaccagagaaactggatttcactcaattccaccggaaagtgagacatacacctaagcagccactaccccacatcgaccgagagggatgcggcaagggaaagctggaggacggagatggaattaacctcaacgatatcgagaaagttctgcccgcttggcaggggtaccatccaatgccacatgaagttgaaattgcacacactaagaagttgtttcggagaagacgaaacgaccgacggcgacaacaaaggccccctggcggaaataaaccccagcagcatggcgaccaccaaccaggctcagcgaaacataatagggaccaccagaagagctatcaggggggttcagcccctcacccctcaggacgtcccacccaccacggatacagtcagaataggcggtggcatcatggcaacatgaagcacccacccggagacaagggggaagccggagcccatcgaaatgccaaagagaccatgactattgagaaccccaagctggaggatactgccggtgatacgggtcacagctctcttgaagccccacggagtcctgatacactggcaccggtggcttccgagaggctgccacctcagcagtccggtggccctgaggtggagactaagagaaaagatagtattctgcccgaacggatcggagagcggccaaaaatcacgctgctccagagttccaaagatcgactccgccgacgcctaaaggagaaggatgaggtagcggtcgagacaacgacaccacagcaaaacaagatggataaattgatcgagattcttaactctatgcgtaataattcctccgacgtggacaccaagctcactacctttatggaggaagcacagaacagtacgaactctgaagagatgctcggagagatcgtgcggaccatctaccaaaaggcggttagcgataggagcttcgcctttactgcagcaaaactttgcgataaaatggcccttttcatggttgaagggactaaatttcgtagcttactcctgaatatgcttcagaaggattttacggtccgagaggaactccaacagcaggacgtagagcgatggctcggcttcattacatttttatgcgaggtctttgggaccatgcggtctagtaccggtgagcccttccgcgttctcgtgtgtcccatctacacgtgcctccgcgaactactccaatctcaggatgttaaagaggacgcagtgctgtgctgctctatggagctgcagagcacaggcagacttctggaagagcagctgcctgagatgatgacggagcttttggcaagcgccagagacaagatgctctgtccgtcagagagcatgcttaccagatctcttcttctcgaggttattgagctccacgcaaatagttggaatcagggagcatggcaggccgctcacggccagctgggtccttggtgcactggcccagacggccaggcaggtggacaaggctggccttggcgggagaaagaaatgggcagaagggccggtcgcgtgggcggacagtctggcgctagagcctgtaaactgacacccatccgtgaggcgtgtttctttttcctggtagctctggccctccccttcctaaccccagcctctccgctaccaatccgtccaatcccacacggggcattatgtgaaggaagccacagatgcgacagttcggaaactttggccgcttcccatgccggtgccccactaggtagcgagcgaacttctgaaggctag

SEQ ID NO: 294793 - DNA, 1947 bp, Artificial Sequence
  derived and/or modified sequence
atggggagactgccttgcgggccactgccaggccagtggacagcggactgcagcgaaccgctggacagcagctgttccttctcccgagggcgagcccccccacagcagaatggcagcaaagacaactctctggacatgctgggcacggacatctgggcggccaacaccttcgattccttcagtggtgccacctgggacctgcagccggaaaagctggacttcacccagttccaccgcaaagtccgacacacgcccaagcagcccctgccacacatcgaccgcgaagggtgtggcaaagggaagctggaagatggggatggcatcaacctgaatgacatcgagaaggtccttccagcctggcagggctaccacccgatgccccatgaagtggagatcgcacacaccaagaagctgttccgcaggaggagaaatgatcgaaggcggcagcagagacctccggggggcaacaagccccaacagcatggtgaccaccagccaggcagtgccaaacacaacagggaccaccagaaatcctaccaggggggctcagcaccccacccctcagggaggcccactcaccatggctacagccagaaccggcgctggcaccatggcaacatgaagcacccaccaggcgacaagggggaggcaggcgcacaccgcaatgccaaagagaccatgaccatcgagaacccaaaactggaggacactgcaggggacaccgggcacagcagccttgaggccccccgcagccctgacaccctggccccggtggcttctgagcggctgcccccacagcagtcaggggggccagaggttgagacaaaacgtaaagacagtattcttcccgagcgcatcggggagcggcccaaaattaccctgctccagtcttccaaagacagactgcggcgaaggctaaaggaaaaggatgaagtggccgtggagacgaccactccccagcagaacaagatggacaagctgatcgagatcctgaacagcatgcggaacaacagcagcgacgtggacaccaagctcaccaccttcatggaggaggcccagaactccaccaactccgaggagatgctgggcgagatcgtgcgcacaatctaccagaaggctgtgtccgaccgcagcttcgccttcaccgctgccaagctctgcgacaagatggcgctctttatggtggaggggaccaagttccggagcctgctcctcaacatgctgcagaaggacttcacggtgcgcgaggagctgcagcagcaggacgtggagcgctggctgggcttcatcaccttcctgtgcgaggtcttcggcaccatgcgcagcagcacaggcgagcccttccgtgtgctcgtgtgccccatctacacctgcctcagggagctcttgcaatctcaggatgtgaaggaagatgctgtcctttgctgctctatggagctgcagagtacaggccggctgctggaggaacagctgcctgagatgatgacagagctcctggccagcgcacgggacaagatgctgtgcccctcggagtccatgctgacccggtcgctgctcctagaggtcatcgagctccacgctaacagctggaaccagggggcctggcaggcggcccacgggcagctggggccctggtgcacagggccagatggacaggcgggaggacaggggtggccctggcgggagaaagaaatggggaggagggcaggcagagtcggtggccagtctggagcccgagcatgcaagctcacaccaataagggaagcatgtttctttttcctggtggccctggccctccccttcctcactcccgcctctcccctccccatcagacccatcccccacggagctttgtgtgagggatctcatcgctgtgactcctcggagaccttggcagcctcgcacgccggggcaccgcttgggtcagaaaggacctcggaaggctga

SEQ ID NO: 294794 - DNA, 1947 bp, Artificial Sequence
  derived and/or modified sequence
atgggcagactgccctgcggccccctgcccggccagtggaccgccgactgcagcgagcccctggacagcagctgcagcttcagcagaggcagagcccccccccagcagaacggcagcaaggacaacagcctggacatgctgggcaccgacatctgggccgccaacaccttcgacagcttcagcggcgccacctgggacctgcagcccgagaagctggacttcacccagttccacagaaaggtgagacacacccccaagcagcccctgccccacatcgacagagagggctgcggcaagggcaagctggaggacggcgacggcatcaacctgaacgacatcgagaaggtgctgcccgcctggcagggctaccaccccatgccccacgaggtggagatcgcccacaccaagaagctgttcagaagaagaagaaacgacagaagaagacagcagagaccccccggcggcaacaagccccagcagcacggcgaccaccagcccggcagcgccaagcacaacagagaccaccagaagagctaccagggcggcagcgccccccaccccagcggcagacccacccaccacggctacagccagaacagaagatggcaccacggcaacatgaagcacccccccggcgacaagggcgaggccggcgcccacagaaacgccaaggagaccatgaccatcgagaaccccaagctggaggacaccgccggcgacaccggccacagcagcctggaggcccccagaagccccgacaccctggcccccgtggccagcgagagactgcccccccagcagagcggcggccccgaggtggagaccaagagaaaggacagcatcctgcccgagagaatcggcgagagacccaagatcaccctgctgcagagcagcaaggacagactgagaagaagactgaaggagaaggacgaggtggccgtggagaccaccaccccccagcagaacaagatggacaagctgatcgagatcctgaacagcatgagaaacaacagcagcgacgtggacaccaagctgaccaccttcatggaggaggcccagaacagcaccaacagcgaggagatgctgggcgagatcgtgagaaccatctaccagaaggccgtgagcgacagaagcttcgccttcaccgccgccaagctgtgcgacaagatggccctgttcatggtggagggcaccaagttcagaagcctgctgctgaacatgctgcagaaggacttcaccgtgagagaggagctgcagcagcaggacgtggagagatggctgggcttcatcaccttcctgtgcgaggtgttcggcaccatgagaagcagcaccggcgagcccttcagagtgctggtgtgccccatctacacctgcctgagagagctgctgcagagccaggacgtgaaggaggacgccgtgctgtgctgcagcatggagctgcagagcaccggcagactgctggaggagcagctgcccgagatgatgaccgagctgctggccagcgccagagacaagatgctgtgccccagcgagagcatgctgaccagaagcctgctgctggaggtgatcgagctgcacgccaacagctggaaccagggcgcctggcaggccgcccacggccagctgggcccctggtgcaccggccccgacggccaggccggcggccagggctggccctggagagagaaggagatgggcagaagagccggcagagtgggcggccagagcggcgccagagcctgcaagctgacccccatcagagaggcctgcttcttcttcctggtggccctggccctgcccttcctgacccccgccagccccctgcccatcagacccatcccccacggcgccctgtgcgagggcagccacagatgcgacagcagcgagaccctggccgccagccacgccggcgcccccctgggcagcgagagaaccagcgagggctag

SEQ ID NO: 294795 - DNA, 318 bp, Artificial Sequence
  derived and/or modified sequence
atgagcctgaagagctggcacccccagagcaagaccaagagagtgggcgccagcgagggcaacccccagtggggcagcggcagcatggaggcccccctgctgagcagcttcctgccccccctggccagcgaggccgagctgaccggcaacacctggttcctgcacagatgcagctgcatcctgaacctggaggagagcatggacagcgactggggcgcctggtggggcgtgagcctgcccagaagagcccccttcctgatctacggcagcgacggcccctggtgcacccaggccggcttccccggctggggccactag

SEQ ID NO: 294796 - DNA, 318 bp, Artificial Sequence
  derived and/or modified sequence
atgagcctgaaatcctggcacccacagtccaagacaaaaagagtgggtgcgtctgaaggtaacccccaatgggggagcggttcaatggaagcgccgttgctcagcagtttcctccctccactcgcctctgaggcggagctgactggcaacacttggtttctgcatcgatgctcatgtattcttaatctggaagagtcaatggactccgattggggagcctggtggggtgtaagtctgcctaggagagccccattcctcatttatgggtccgatggaccctggtgtacccaggctggcttcccgggctggggccactag

SEQ ID NO: 294797 - DNA, 6090 bp, Artificial Sequence
  derived and/or modified sequence
atggccagcagtgtggctccctatgagcagctcgtccgacaggtggaggctctgaaggctgagaactcccatctgagacaggaactgagagataacagcagtcacctgagcaaattggagactgagactagcgggatgaaggaggtgttgaagcacctccaggggaagctcgagcaggaagccagagtcctggtctctagcggacagacggaagtgcttgaacagctgaaagcattacagatggacatcaccagcctgtacaacttaaaatttcaaccccctactttgggccccgagccagccgcgagaacccccgaaggttcccctgtacacgggagcggccccagcaaagacagctttggtgagctgtcaagggcgaccataagactgctggaagagttggatagggagcgctgcttcctgctgaatgagattgaaaaggaggagaaggaaaagctttggtattactctcagctacagggattgtcaaagagactagacgaacttccacatgtggattacgagatgcacaagatgacccgggaccccctaaacctggcgttgcgacggtacgctgggatgacactgaccaatttaacctttggagacgtggcaaataaggcgactctgtgtgccagacgtggatgtatggaagcaattgtcgcccagctggctagtgacagtgaggaactgcaccaggtcgttagttctatactgcgtaatctgagttggcgggcggacatcaatagcaagaaagtccttcgagaggctggatctgtgactgcacttgtccagtgcgttctgagagccactaaagaaagcactctgaaaagtgtactgtccgccctatggaatcttagcgctcattctaccgagaataaggctgctatatgtcaggtggacggagcactggggtttctagtcagcacgctgacttacaaatgccagtccaactcgttagcgattatcgagagcggaggcggcatactacgcaacgtgagcagtctcgtggccactagagaggattacaggcaggtgctccgcgatcataattgcctacagaccctactacagcacctgacctcacactcattgacaatagtctccaatgcctgcggaaccttatggaacctgagcgcaaggtcggctagagaccaggaacttctttgggacttgggtgctgttggcatgctacggaacctcgtgcattcaaagcataaaatgatcgccatggggagcgcagctgcactgagaaacctgctggctcatagaccagcaaagcatcaggcagctgcgaccgcggtgagccccggttcatgtgtcccatccttgtacgtgcgcaaacagagagcactcgaggctgagctggatgcgcggcatctggcccaggccctggagcacttggaaaaacagggccctcccgcagctgaggcagccacaaaaaaaccactgccaccattgcggcacctggacggtttggctcaggactatgcttctgatagtggctgcttcgacgacgatgatgctccaagcagtcttgccgctgcagcagcaactggtgagccggcctccccagcagctttgtctctttttttaggctcgccatttctgcagggacaggccctcgccagaaccccgcccacgcgtaggggtggtaaggaagctgaaaaggatacgtccggcgaggccgccgtcgccgcgaaggccaaagcaaagttagcactcgccgtcgcccgaatcgatcagctcgtcgaggacatcagcgcactgcatacatcaagcgacgatagcttctccttgtccagcggcgatccagggcaagaagccccgcgtgagggacgcgcacaaagctgtagtccctgcagagggcccgaaggaggtcgccgcgaagcaggatcgagggcccatccattgctccggcttaaggccgcccatgcttctctctctaatgacagtctgaatagtggatcagcatctgatggctattgtcctagagagcatatgctgccctgtccactggctgccttagccagtaggagagaagatcccagatgcggccaaccccggccgtcaaggttggatctggacctgcccggctgccaggctgaaccacctgcaagggaggcgacatcggcagatgccagggtccggacaattaagctgtctcccacttaccagcatgtgcctctcctggagggcgcgagcagagcaggggccgaacctctggcaggacctggaatttctcctggggcaaggaaacaggcgtggttacccgcggatcatctgagtaaagtgccagagaagctggctgcagccccattaagcgtggccagcaaggccctccagaagctggctgcccaggaagggccactgtccctctctaggtgcagttccctgagtagccttagtagcgccggacgacccggaccgagtgagggcggtgacctggatgatagcgactccagcctggagggcctggaggaggccggaccatctgaagctgaactcgactctacatggcgggctcctggcgccacttcacttccagtagcaatccctgccccacggcgcaaccggggcagaggtctcggcgtggaggacgccacacctagctccagcagtgagaattatgtgcaggagaccccactggtactatccagatgttcaagcgtgagcagtctcgggtcctttgagtcgccctctattgccagtagcattccttcagagccatgttccggacagggttcgggcaccatcagcccaagcgaacttcctgattcacctggtcaaaccatgccgcccagtcggagtaagactcccccactcgcgcctgccccccagggcccccctgaggctacacagtttagcctccagtgggaatcgtatgtcaagcggtttctcgacattgccgattgcagggagaggtgcagactcccctcggagcttgatgcagggtctgtgaggttcaccgttgagaagcctgacgagaactttagctgtgcaagctcactaagtgctctggcgctgcacgagcactacgttcagcaagacgtcgagcttcgactcttgccatctgcttgcccagaacgcgggggaggagccggcggtgccggtctccacttcgccggccacaggagacgggaggaggggccagcacccaccggctcccgaccccgaggcgcggccgatcaggagcttgagttgttgcgtgaatgtcttggggcagccgttccagctcggctgcgtaaagttgcatctgctctggttcctggaagaagggccctccccgtaccagtttatatgttggtccctgcacctgctccggcacaggaagacgactcttgtaccgactcggccgaagggactcccgtgaatttctcctcagcagcttccctctctgacgagactctacagggcccacctcgcgatcagccagggggtcccgccggcagacaaaggccaaccggccggcccacgagtgcgaggcaggcgatgggtcatagacacaaggcggggggagcagggaggagcgcggagcagtcacgcggcgcaggcaaaaatagagccggcctggagttaccactgggccggccgcctagcgcacccgccgacaaagatggttccaaacccgggaggaccagaggggacggtgccctgcagtccctatgcctgacgacacctacagaagaagccgtgtactgtttttatgggaatgactctgatgaagaacctccggcggccgcccccactccgacacaccggagaacaagtgctattcctagggccttcacacgggagcggcctcaaggcaggaaagaggcccctgctccatctaaagcggcacctgccgctccgccacccgcgagaacgcagccgtcacttattgcagacgagacaccaccctgctattcacttagtagcagcgcttccagcctctcagaacctgagcccagtgaacctcccgctgtccaccctagagggcgcgaacctgctgtcacgaaggatcctggacctggcggagggcgcgacagttcaccctctccccgcgccgcggaagagttgcttcagagatgcatctccagcgccctaccccgaagaaggcctcctgtctcaggcctcagacgtcggaaaccacgggccacccgactagacgagcgccccgctgagggcagccgtgagcgaggggaggaggctgcagggagcgatagggcttccgacttggactctgttgaatggagagccatccaggaaggggctaactcaattgttacttggctccatcaagcggctgctgctacaagagaggcctccagcgagagcgatagtatcttgtcattcgtgtcaggcctgtctgttggctcaacattacaaccccccaagcatcgaaagggtcgccaagcagaaggcgaaatggggtcagctagacgtcctgaaaagagaggcgccgcctcagtaaaaacgagcggctcccctcgttctccagcaggacctgagaagccccgcggaacccaaaagaccacccccggcgtgcccgccgttctccggggccggacagtaatctatgttccgagtcctgctcctcgggcgcagcccaagggcacacctggtcctcgggctacccctaggaaagtggcaccgccatgtctggcccagcctgctgcccctgcaaaggtcccctctcccggccagcagcgcagccgatcacttcatagacccgccaagacgtccgaactggccaccctgagccagcctccaaggagtgccacccctccagccagactggccaagacccctagtagcagctcgtcccagactagccccgccagccagccactgccaagaaaaaggccacccgtcacacaggccgcaggcgcactgcccggaccgggagcgtcccctgtgcctaaaacacccgctcgcacactgctggctaaacagcataaaacccaacggagtccagtgcggattccattcatgcagagacccgcgcggcggggaccgccgcctctggccagagcagtccccgagccgggccctcgaggacgcgccggcacagaggccgggcctggggctagaggaggaagactgggcttggtgcgggttgcttctgcactctcttccgggtccgagtcaagcgataggtcgggctttcgaagacagctgacctttatcaaagagagccctgggttaagacggaggcgatcagaactctcctctgctgagtccgcggccagcgccccccagggcgcttcgccccgccgcggcaggcccgcattgcctgctgtgtttctgtgtagctcccgctgtgaagagctccgtgccgccccacgccaaggccctgcccccgccaggcagaggccccccgctgcccgcccttcgccaggcgaacgacccgctagaagaactactagcgagagtcccagccggctgccagtgagagctccagcagcaaggccagagaccgtgaagcggtacgcttccctgccccacatttctgtggctcggagacccgacggagcagtgcccgccgctcccgcatctgctgacgccgcccggagatcatcagatggagagccacggcccctgccaagagtggccgccccgggcaccacttggcgccgcataagggacgaagacgttccccacattctgcggtctaccttgcctgcgaccgccctaccactgcgaggatccacacccgaggacgctcccgccggccctccccctcgcaaaacgtccgatgcagtcgtgcagacggaggaggtggcagcacccaagaccaactcctctacatctccctcactggagacccgtgaacccccaggggcccccgcaggtgggcaactgtccctgctggggtctgacgtagacggcccctccctggcgaaggctccaatatcagcgccttttgtgcacgagggcctgggtgtcgcagttggcggtttccccgcaagcagacacggtagtcctagtagatccgccagggtaccgccgtttaattatgttcctagccccatggtggtagctgccaccaccgactcagccgctgaaaaagctcctgccacggcttctgctacactgctggagtag

SEQ ID NO: 294798 - DNA, 6912 bp, Artificial Sequence
  derived and/or modified sequence
atggcctcctctgtcgccccctatgaacagcttgtacgacaggtggaagccttgaaggcagaaaactcacatctgaggcaggagctcagggacaactctagtcacctgtccaagttagaaaccgaaacaagcgggatgaaggaggttttgaagcacctacagggcaagctggagcaggaagcacgagtcctcgtcagcagcggacagactgaagtgttggagcagctcaaggcactgcagatggatattactagcttatacaacctgaagttccaaccacctaccttggggccggaaccagcagcccgcactcctgaagggtcaccagttcatggcagcggtccatcaaaagacagctttggagagctctcacgcgcaacgatcaggctgctggaagaactggatcgcgaaaggtgcttcctcctcaatgaaatcgaaaaggaggagaaggaaaagctttggtactacagtcagctccagggtctcagcaagcggctcgatgaactgcctcatgtcgaaacacaattctctatgcagatggacctcattaggcaacagttggagttcgaagcgcaacatatcaggtccctgatggaagaacgttttgggacttccgatgagatggttcagagagcgcagatccgtgcctctaggttagaacagattgacaaggagctgctcgaggcccaggatagggtccagcaaacagagccccaggcactgctcgcggtgaagtctgtcccagtagatgaagaccctgaaacggaagtgccaacacaccccgaggatggaactccccagccaggcaactctaaggtggaagtcgtgttctggctgctatcaatgctagccaccagagatcaggaggatactgctaggactctgctcgctatgtcaagcagtcctgagtcctgtgtggccatgcgcagaagtggctgcctgcccctgctgcttcagatcctccatggaacggaggccgcagccggcggccgcgctggcgcaccgggcgcacccggcgccaaggacgcaaggatgcgagcaaacgctgccttacacaacattgtgttttctcaacctgaccagggacttgccaggaaggagatgcgggtgcttcatgttctggagcagattagagcttactgcgagacatgctgggattggctgcaagctagagatggcgggccagagggagggggagctggaagtgctccgatacccatcgagcctcagatttgtcaagccacttgtgccgtgatgaagttatcgtttgatgaggaatatcgacgggcaatgaatgagctgggcggtttgcaggccgtggccgagctcctccaagttgactacgaaatgcacaaaatgacccgtgaccctctgaatctggcactgcgccgctacgcaggaatgacactcaccaacctgaccttcggtgatgtcgccaataaggccacactttgtgcaagaagaggatgcatggaagctatcgtcgctcaactcgcttctgacagtgaagagctccatcaggtggtgtcttcaatccttaggaatctgagctggcgcgctgacatcaacagtaagaaagtgctgcgcgaggcaggatcagtgaccgcgcttgttcaatgcgtattgcgcgcaacgaaggagtcaaccctgaagagcgttctttccgccttatggaatctgtccgcccactccaccgagaataaagctgccatctgtcaagtggacggagcactgggttttctggtgtcgacgctgacatacaaatgccaaagtaacagtctggccatcattgaatccgggggcggcatattgaggaacgtgtcaagtttggtggcgactcgggaggattatcgccaggtgttaagggaccacaattgcctgcagacactgttgcagcacctcacgtctcatagcctgacaattgtctccaacgcctgtgggaccctctggaatctgtcggctcggtctgccagagaccaggaactgctgtgggatttgggagctgttggaatgctgcgtaatctcgttcactctaagcacaagatgattgctatgggcagtgccgctgccctgcgcaacctacttgcccatagacccgctaaacatcaagcagccgccacagcagtctccccggggagttgtgttcccagtctgtacgtccgtaaacagagggccctggaggccgaacttgatgcccggcacctggcacaggccctggaacatctagaaaagcaaggcccaccagccgccgaggccgcaaccaagaaacccttgccaccattacgacatctagacgggcttgcccaagactacgcctccgactctggctgtttcgacgacgacgacgctccttcttcattggccgcagctgcagccacgggagagcctgcttcccccgcggcactgtcgctgttcctcgggagccccttcttgcagggccaagccctcgcaaggacaccgcccactcggaggggtggaaaggaggccgaaaaagatacctccggagaagccgcagtggcagccaaggctaaagctaagctggccctggccgtggctagaattgatcaactggtcgaggatataagtgccctgcacactagctctgacgattccttctcacttagttccggagaccctgggcaggaggcgccacgagaggggagggctcagtcgtgtagtccatgtcgtgggcctgagggcggccgccgcgaggctggcagtcgcgcgcaccctctcctgcggttgaaagccgcacatgcttccctgagcaatgactcactgaatagcggcagcgccagtgatggttactgcccccgggaacacatgttgccatgtcccctggcagctctggcaagccgaagggaggatcccaggtgtggacagccaagaccatcacggctggacttagatttgccgggatgtcaggcagagccaccagcgagggaggcgacaagcgccgatgctcgggtgaggacaattaagttgtcccccacctatcagcacgtaccactactggagggtgcttctcgagcgggggcagagcccttagcaggtccaggtatttcccctggtgcgcgaaagcaagcttggcttccagccgatcatctctctaaggtgcctgagaaattagcggcagcccctctgagtgtcgcctcaaaggcactgcagaaactcgccgcccaggagggtcccctgagtcttagtcgctgttcctcactgtcaagtctgagcagcgcgggccgaccaggcccttctgagggaggcgatctagacgatagtgactcctcgcttgagggcctggaggaggctggacccagcgaggcagaactggacagcacatggagggcacctggtgctacgtctttaccggtagccatccctgccccaagaaggaatagggggcgagggttaggagtagaggacgcaacccctagcagcagctcagagaattatgtccaagagaccccgcttgttctgtctcgatgtagcagcgtgagttcacttggtagttttgaatccccaagcatcgccagctccattccatccgagccatgctctgggcagggatccggcaccattagccctagcgagctgcctgacagccctggccaaacgatgccaccctcacggtccaagacaccacccctggccccagccccccaggggccccccgaggctacacaatttagtttacagtgggagtcttatgtgaagcggtttctggatatcgccgactgtcgcgagcggtgccggctccccagcgagcttgacgcagggagtgtgaggttcaccgtcgagaagcccgatgaaaacttctcgtgtgctagcagcctgtcagcattggccctccacgagcactatgtgcagcaggatgtggaactgcggctactgccgtccgcctgcccggagagaggggggggagcgggtggtgctggtctgcattttgcgggacataggagaagggaggaaggaccggcacctaccggttcccgtccaaggggtgcagcagatcaggaactggagcttctgagagagtgcctgggcgccgcggtgccagccagactgagaaaggtcgcttccgctctggtgcccggtcgccgcgccctgcccgtccctgtgtatatgctcgtgccagctcccgccccagcccaggaggacgacagttgtaccgactccgcagagggcacccccgtcaatttttcatccgcagccagcctcagcgacgagacactacagggcccaccccgagaccaacctggaggccctgctggacgccagaggcctactggcaggccaacttcagctagacaagccatggggcaccgacacaaggcaggaggggcaggccggtctgccgagcagagtcgcggcgccggtaaaaatagagccggtttggaacttcctctgggccgccccccttccgctccagcggacaaggatggtagtaaacccggaagaacacgaggtgatggcgccctgcaaagcctgtgtctcaccacaccaaccgaagaggccgtctactgtttctatggcaacgacagcgatgaggagccgccggccgctgccccaaccccaacacatcgtcggacctcagcaatcccaagggccttcactagggagcgacctcaaggccggaaggaagccccagcccctagcaaggccgctcccgccgcccccccacctgcaagaactcaacccagcctgatcgctgatgagacaccgccctgctatagtctctcctccagcgcgtccagtctgtccgaacccgaaccttctgagccacctgcagtgcatcccagaggaagagaaccggctgttacgaaagatcccggacctggcgggggcagggacagttctccaagcccccgcgcagccgaggaattactgcagagatgcataagctctgcactgccgagacgccggcctccagtgagtggtctccgccgaagaaagccacgtgccactaggctggatgagagaccagccgagggcagtagagagagaggcgaagaggccgccggctctgatcgtgcctccgatctcgactcggttgaatggcgggcaattcaggagggagcaaatagcattgtaacttggctacaccaggccgcagctgccactcgggaagcatcctccgaatctgatagtatcctatcctttgtaagcggacttagcgtaggtagcacgctgcagcccccaaaacatcgcaaggggagacaggctgaaggtgaaatgggatcagcacgccggcctgaaaagagaggagccgcttctgttaaaacatccgggtcacctcgctctcctgcgggcccagagaaaccgcgtggcacacagaagactaccccaggagtccccgctgtattacgtggcaggacggtcatctatgtacccagtcccgcacctcgcgcacagccaaaaggcactcctggcccacgtgctaccccgcgaaaggttgcccccccctgcttggcacaacctgcagccccagccaaggtgccttccccaggccagcaaaggagcaggtctttgcatagacctgctaagacctccgaattggcaaccctctcacagccacccagatctgcaaccccccctgccagactggcgaagacaccatcctcaagctctagccagacctcacctgcctcccagccccttcccagaaaacgccctccagtgacgcaagccgcgggggcactgcctggtccaggtgcatcacctgtgcccaagacccctgctcggacactgttagcaaaacagcataagacgcagagaagccccgtgagaatccctttcatgcagaggcctgctagacggggccctccaccactggcgagggcagtccccgaaccaggaccgcgaggtcgtgccggcaccgaggcagggccaggggcccgcggaggacgcctgggactggtgagggtggcttccgcactaagtagtggttctgagagctccgatcgatccggcttccggcgccagctgaccttcataaaagagtcaccaggtctaaggaggcgccgctctgagctctcaagcgccgaaagtgcagcctccgcccctcagggagcatctccgagacgaggtcgacccgccctgcccgctgtatttctctgcagcagccgttgtgaagagctcagagcagccccccgccaaggcccagcacctgctcgacaaaggccaccagccgcgcgccccagtccaggcgaacgacccgcccgcagaacaacatcagagagcccttctcgcctcccggtacgggccccggcagcaaggccggagactgtcaagaggtatgccagcctcccacatattagcgttgcccggcgtcccgatggggccgtgcccgccgcccccgccagcgcagatgcggcccgtcgcagctctgatggggagccccgcccattgccccgggtggcggcccctggaaccacctggaggaggattcgcgacgaggatgtacctcatattctgagatccacactacctgcaacggccctacctctgcggggcagcacacccgaggacgcacccgcaggtcctcctcctagaaaaactagtgatgcagtggtgcagacggaggaagtggccgcacctaagacaaacagttccacatctccttccctcgaaaccagggagccacccggcgcccccgccggaggtcaactgtctctcctggggtctgatgtcgatggcccatctttggccaaagcacctatcagcgcccccttcgtacacgaagggctgggagtggccgtgggcggatttccggccagcaggcacggcagtccctccaggagtgccagggtgcctccgtttaattatgtgccttcacccatggtggtcgccgctaccacagatagtgccgctgagaaggctccagctacggctagcgccaccctgcttgagtag

SEQ ID NO: 294799 - DNA, 9329 bp, Artificial Sequence
  derived and/or modified sequence
gcagcgccgcctgcccaggcccggaccgggctttgtccgccccggagcccctgcccgcgccgcggagaccccggagcccgcgcgctccgaggccaccccgggccgggatttccggtggggcccgcggagccgcgcagagggaggaggccccagacccaggcgccccgccagcccagctgcacgtaagcggacgctgcaggagctgaagatggcgagctccgtggcgccctacgagcagctggtgaggcaggtggaggccttgaaggctgagaacagccacctgaggcaggagctaagggacaactccagccacctgtccaagctggagacagagacgtcgggcatgaaggaggtcctgaagcacctacagggaaaactggagcaggaggcccgagtgctggtgtcctcggggcagacggaggtgctggagcagctgaaggccctacagatggacatcaccagcctgtacaacctcaagttccagccgcccaccctgggcccggagcctgccgcccggacccccgagggcagcccagtacacggctccgggccctccaaggacagctttggggagctgagccgggccaccatccggctgctggaggaactggaccgggaacggtgtttcctgctgaatgagattgagaaggaggagaaggagaagctctggtactactctcagctgcagggcctgtccaagcgcctggacgagctgccgcacgttgactatgagatgcacaagatgacccgggacccgctgaacctggcgctgcgccgctacgcgggcatgaccctcaccaacctcacctttggggacgttgccaacaaggccaccctgtgtgcgcgccgcggctgcatggaggccatcgtggcccagctggcctccgacagtgaggagctccaccaggtggtgtccagcatccttcggaacttgtcctggagggccgacatcaacagcaagaaggtgctgagggaggcgggcagcgtgactgccctggtgcagtgtgtcctgcgggccaccaaggagtccaccctgaagagcgtgctgagcgccctgtggaatctgtctgcacacagcacagagaacaaggcggccatctgccaggtggatggcgccctgggcttcctggtgagcaccctgacctacaagtgtcagagcaactcgctggccatcatcgagagcggcggcggcatcctccgcaatgtgtccagcctcgtcgccacccgtgaggactacaggcaggtgctccgggatcacaactgtctgcagacgctgctgcagcatctgacttcgcacagcctgaccatcgtgagcaacgcgtgcggcacgctctggaacctgtcggcccgcagcgcccgtgaccaggagctgctgtgggacctgggcgccgtgggcatgctgcgtaatctggtgcactccaagcacaagatgatcgccatgggcagcgccgccgccctgcgcaacctgctggcccatcggcccgccaagcaccaggcggccgccaccgccgtgtccccaggcagctgcgtgcccagcctgtacgtgcgcaagcagcgggcgctggaggccgagctggacgcacggcacctcgcgcaggcgctggagcacctggagaagcagggcccgccggcagccgaggccgccactaagaagccgctgccgcccctgcgacacctggacggcctggcccaagactatgcttccgattcgggctgctttgacgacgacgatgcaccgtcatccctggctgcggccgcggccaccggggagccagccagccctgccgcgctgtccctcttcctgggcagccccttcctgcaggggcaggcgctggctcgcaccccgcccacccgccgaggcggcaaggaggcagagaaggacaccagtggggaggcagccgtggcggccaaggccaaggccaagctggcgcttgcagtggcgcgcatcgaccagctggtggaggacatctccgccctgcacacctcgtccgacgatagcttcagcctcagctctggagacccgggacaggaggcgccacgggagggccgcgcccagtcctgctcgccatgccgcggcccggagggcgggcggcgagaggcaggaagccgggcgcacccgctgctgcggctcaaggcggcccacgccagcctctccaacgacagcctcaacagcggcagtgccagcgacgggtactgcccacgcgaacatatgctgccctgcccgctggccgcactggcttcgcgccgcgaggaccccaggtgtgggcagcctcggcccagccggcttgaccttgacctgcccggctgccaggccgagcccccggcccgcgaggccacctccgccgacgcccgcgtgcgcaccatcaagctgtcgcctacctatcagcacgtgccactgcttgagggtgcctcaagggcgggtgcagagcccctcgcggggcctggaatctctccaggggcccggaagcaggcctggctgccggcagaccacctgagcaaggttcccgagaagctggcggctgccccgctgtctgtggccagcaaggcactgcagaaactggcggcgcaagaggggccactctcgctgtcccgatgcagctccctttcctcgctgtcctcggccggccgcccaggccccagcgagggtggtgacctggatgacagtgactcctccctggaggggctggaggaggccggccccagcgaggctgagctggacagcacgtggcgggcgcccggggccacctcgctgcccgtagccattccggctccccggcgtaaccgaggccggggcctgggggtggaagacgccacgccgtccagctcgtcggagaactacgtgcaggagacaccgcttgtgctgagccgctgcagctctgtgagctcgctgggcagcttcgagagcccgtccatcgccagctccatccccagtgaaccttgcagcgggcagggcagcggcaccatcagccctagcgagctgcccgacagccccggacagaccatgcctcccagccggagcaagacgccaccgctggcgcccgcgccacagggtccccccgaggccacccagttcagcctgcagtgggagagctacgtgaagcgcttcctggacatcgccgactgccgggagcgctgccggctgccatctgagctggacgcaggcagcgtgcgctttaccgtggagaagccagacgagaacttctcgtgcgcctccagcctcagcgcgctggccttgcacgagcactacgtgcagcaggacgtggagctgcggctgctgccctcggcctgccccgagcgcggcgggggcgccgggggcgccggcctccactttgcagggcaccggcggcgggaggaggggccggcgcccacgggttctcgccctcgcggcgccgcggaccaggagctggaactgctgcgggagtgcctgggagccgccgtgcctgcccggctgcgcaaggtggcctccgcgctggtgccaggtcgccgcgcactccccgtgcccgtctacatgttggtgcccgccccggccccggcccaggaggacgactcctgcactgactccgcggagggcacgccggtcaacttctctagcgccgcctcgctcagcgacgagacgctgcagggaccccccagggaccagcccgggggaccagcgggcaggcaaagacccaccggccgccccacctctgccagacaggccatggggcaccggcacaaggcgggaggcgccggccgcagcgcggagcagtctcggggcgcgggcaagaacagagcagggctggagctgcccctgggccggcccccgagcgcccccgcagacaaggacggctcaaagcccggccggacccgcggggacggggcgctccagtcgctgtgcctcacgacgcccactgaggaggccgtgtactgcttctacggcaacgactcggacgaggagcccccggcggccgcgcccacgccaacccaccggcgcacatcggccatccctcgcgcttttacgcgggagcgtccgcagggccggaaggaggcccctgccccgtccaaggctgcaccagctgccccgccgcccgcccggacccagcccagcctcattgctgacgagaccccgccctgctactccctgagctcctccgccagctccctcagcgagcccgagccctcggagccgccggccgtccatccacgaggccgggagcccgcggtcaccaaggacccgggcccaggaggcggacgcgacagctcgcccagcccgcgggccgcggaggagcttctgcagcggtgcatcagctcggccctgcccaggcgccggccccccgtgtctggcctgcggcgccgcaagccccgagccacccggctggatgagcggcccgcagaggggtcccgggaacgcggcgaggaggcagcgggctcggaccgggcctccgacctggatagcgtggagtggcgcgccatccaggagggcgccaattcaattgtcacgtggctgcaccaggcagcagctgccacgcgggaggcctcgtccgagtccgactccatcctgtccttcgtatccgggctgtcagtgggatccaccctacagccccccaagcacaggaagggacgacaggcggagggagaaatgggcagtgcccggcggccagagaaaaggggcgcagcctcagtcaagaccagcgggagcccccgttcccctgcaggccccgagaagccacgtggcacacagaagaccacgcccggggtgccagctgtgctccggggacgaacagtgatctacgtccccagcccggcaccccgtgcccagcccaaagggacccccggcccccgcgccacaccgcggaaggtggcgcccccttgcctggcacagcccgcggctccagccaaagtcccgagccccgggcagcagcggtcgcggagcctacaccggcctgccaagacctcggagctggcgacgctgagccagccccccagaagcgccacaccgcccgcccgcctcgccaagaccccctcctccagctcctcccagacctcgcccgcctcccagcccctgcccagaaagcgccccccggtcacccaggctgctggggccctgcccggccccggagcctccccggtgcccaaaacgccggcgcgcacccttctggcgaagcagcacaagacgcagagatcgcccgtgcggatcccgttcatgcagaggccggcccggcgtgggccgccaccgctggctcgggcagtcccggagccgggccccaggggccgggcggggaccgaggcgggcccgggggcgcgcgggggccgcctgggcctggtgcgtgtggcctcagccctctccagcggcagcgagtcctccgaccgctcgggcttccggcgacagctaaccttcatcaaggagtcgccgggcttgcggcgccgccgctccgagctgtcctcggccgagtccgcggcctctgccccccagggcgcctcgccccgccgcggccggcccgcgctgcccgccgtcttcctctgctcctcgcgctgcgaagagctccgagcggcaccccggcagggcccggccccggcccggcagcggccccccgcggcccgacccagccctggcgagcgccctgcccggcgcaccacctccgagagcccgtcccgcctgcctgtgcgcgcgcccgccgcccggccggagactgtcaagcgctacgcgtcgctgccgcacatcagcgtggcccgcaggcccgacggcgccgtccccgcggcccctgcctcagccgacgccgcgcgccgcagcagcgacggggagccccggccgctccccagggtggccgcgccgggcacgacctggcggcgcatccgagatgaggacgtgccccacatcctgcgcagcacgcttcccgccacggccctgccactgcggggctccacgcccgaggacgccccggccgggcccccgccgcgcaagaccagcgacgccgtggtccagaccgaggaggtcgccgcccccaagaccaactccagcacgtccccgagcctggagaccagggagccccccggggcccccgccggcggccagctctccctcctcggcagcgacgtggacggtcccagcctcgccaaggctcccatctccgcacccttcgtgcacgagggcctgggggtcgccgtggggggcttccccgccagccggcacggctcccccagccgctcggcccgagtaccccccttcaactatgtgcccagccccatggtggtcgcagccaccaccgactcggccgcggagaaagccccggccactgcctccgccaccctcctggaatagtggcctaggccggccttctggaacgttctctcccggccctgcggcgcggtctggctgccccatgggcctgcgctgtagacgtcccccataggtcgccccagggcctctgcccacccgagccccaccactctcagaacccccgcccagcgcacggcgacctcgcgcctcaccggaagaccttgcctctgtgccgcggaggtccaggaggaaacggggcggccgctaggcctcaagtcccgaccgtggagcgctggcaagggcgtcctggcccagccctgagcgcgcggcccttcccctgtcggaagccgttgcttgaccccgggcgagggaggcggtagcctccgggtccgggtctgggtctgggtccgctgcttcgcagggacagcgctggggaggtgacggcgcccgccgcaggtggggcgaggctgggggagggcggcgccgcggcgggcctgccagctgggggcctttgcggcgcgcaggggcgaagcctgtaatcactgcagccgccggtaattcgctaatgagggctttgcagggattgttttcattctcagccccagctgtgggagtgcgggtgggggtgtggccgagccccggcaggaagccccgcccagacggtgttcagggaacccggagcccaagcgctccggcggagcccaaaagggtgggggtgggaggggcagaggccaacggatccccctgcctgtcgcaccccttggcgggagacgggaaggcagcgggctgcgtacgatgggaccctggtgcagacgccgggccggctgacatttggaccccatcccagaggagatgctggctaccagctggggcgaccccaagggtcgctggagtcagtatcggcccggcgcagccgcggcgggcgaggccaatggaaaggagactgaggggagtcccggcagtgagcccgaggccctgggacctggagcccgcgctggcctctccccagcggagcctgcacgttacggagaccatcacatgtgggcgtggtcagtgcccaggaccgcaccgctgctcatcttgtcccttttcaattcccttctggttcatgatgcataaagcgctaggccctagaactccagaaacagcacagctggggcggggacccagccttgccctccacccgaggctctgggacaaggcgggaggttcgggggccttccggcaggtgaacgcagggctggagagtatttggtgccagatgaggtgaaagcttatagaagggcctgaggggctcggctgcctcatcccctggcgggggaggctgggagctgggcctcctgcgtggggtgggactcgcaggggccgggtctccgtgactggggcaacgcctcgtcctgcagagggagccgacgacctcttttctgcagaaaagctccagcaggcgctgccttcacccacggatctgcccaggctgaaggcacacgctcaatgccccacgtgccttctccaggaggaacgaagcagggtttgagggttgggtggatggagctcagaaggaaaccccagccccaccacggatgacaccatccctcccgtcccatccccagcatgggcaaggccagcctttctggcagaaggagctgtcctcaactcagggccgctgtgagcaaagctgaccccagcccccacccccagttaacactgctgcttctctgaatgcatgtcacgctgcaccccatgctccgggcccacaccctgcaggacaaggagctccagacaggacgtccataagtcaccgaggtgtgccacccagcaggtgctggaggtgcccaatgctccctcctaggacctcgcagccaggcaaggctgtcaggttgttttgggggaagagggggtcatggatggctgagcagagagcggggaaaatgcaggctgagtggggcgacctcctgcctgccaggagccccctttcaggacacagcgggggtctcacacttgctgtccccatccatggcccgagggggaacctggtggtctcttctgagcttttggacttggggatgccaaacacgtgctcaccctcacactcgccccggcccgctgcgcccctaattgccaaagggtagggaaatggcgaagccagccaccaggtcgctggtgacagggccagggttatgcaggaaggtggtgcggcattgccttccacatatgtaagtctctgggcggcgccctcccagctccctgcctctgtttccccatgtgggccgtggggaactcccagagctacctcttgggggagcgtggtggcagcgatgatggggagacgcctggaagctcacagaacttgggtctggctggctcctgcccgtgacgccttgcccagcagcaaggtgcgcaacatggctgccagccccgcctcccacccccaccccgagtcctgagctcactttcgccttctccatcccctgccgtgggggccacagccacacctcaccgcccagtccagctgtctccagaaggggacaggcagtccgcggtctctggacaatcaactcaaggtacgcccactgcaaggcctccctcccaccgcggcccctgcctggccacctggcctctctgcaccagggtgacaaggggtcctcgtctgccccccaatgctccagggccagtcctaaggagctgagggtctgaggacgcagggagggtggaggtgtcctgaggctgatggacagtgaccgccactggcccccaacatgaccacacgtgggtgctgaactcggggcgccgtgcccaccggcatggtcctcccgagctccgacagcattacctcacccggccccatctgttgccccggtccagccctgatggcgcgcgcctggtctgtctgattcccctagccgccaccccacgtttctgtaccgggtctctgcagtgttaaacggacgtgtaaatagtggtaaatagtgaaagcctgtccttccctaaatgtaaagccatctgtccggcgtaaggacgacaccgtcagctgtccgactcgcacacatttaataaactgagctcttgcattgcc

SEQ ID NO: 294800 - DNA, 6912 bp, Artificial Sequence
  derived and/or modified sequence
atggccagctctgtcgctccatatgagcagttggttcggcaggtcgaggctcttaaggctgagaactcccatttaagacaggaactgcgcgataactcaagccatctcagtaaactcgagactgaaaccagcggaatgaaggaggtgcttaagcatctgcagggaaaactggaacaggaggcacgagtgctggtgagctccggacagactgaggtgctggagcaactcaaagccctgcaaatggatatcacgtccctatacaacctcaagtttcaaccccctactctaggtcccgaaccggcagcccgtacccctgaaggtagtccagttcacgggtcgggtccgagtaaagattcttttggcgagctgagccgcgccacaatcagactcctagaagagctggatagagagcgttgtttcctgctgaatgagattgagaaggaagagaaagagaagttgtggtactattcacagctccagggcctcagcaagaggctcgacgagctccctcacgtggagacccaattcagcatgcagatggatctgatcagacagcagctggaatttgaggctcaacacatcaggtccctgatggaagagagatttggaaccagtgacgaaatggttcagcgtgcccagatcagggcttccaggctggagcagatcgacaaggagttattagaagctcaggacagagtgcagcagacagagcctcaagcccttctggctgtaaagagtgtccctgtggacgaagaccccgagaccgaagtgccaacacaccccgaagatgggaccccacagccggggaacagcaaagtggaagttgtgttctggttgctcagtatgttggctacacgagaccaggaagatactgcgcggactcttctcgctatgtcctctagtccagaatcatgcgtggcaatgaggcggtctggctgcctgcctctcctattacaaattttgcacggcaccgaagccgcagccgggggtcgtgcaggcgccccaggagctcccggcgctaaggacgccagaatgcgagcaaacgctgccctccacaatattgtgttctcacagcctgatcaggggttggctcgcaaggagatgcgggtgcttcatgtactcgagcagataagggcatattgtgagacatgttgggattggctccaagcgcgcgatggaggtcccgaaggcggcggagccggcagcgctccaatcccaatcgaaccccagatttgtcaggccacttgtgctgtgatgaagctttcttttgatgaggaatatagaagggccatgaatgaattaggggggctccaggccgtggccgagctgctgcaagtcgattacgagatgcacaaaatgacacgggatccccttaatctggctttgaggaggtatgctggaatgacactgaccaacctgacatttggcgacgtcgcaaacaaggccactctgtgtgctcgacgcggatgcatggaggccatcgtggcacagttggcaagcgactcagaggaactccatcaggtggttagcagtattttacgtaatctgtcctggcgggctgatattaactccaagaaagtgctcagggaagccgggtctgtgacagctctggtgcagtgcgtcctgcgggctaccaaggaatcaacgctcaaatccgtgctgagcgctctctggaatctttcagcacacagcactgagaataaggctgccatttgccaagttgacggcgcactgggttttctggtgagcactcttacctataagtgccagagcaattccttggccataatagagagcggcggcgggatcctccggaacgtgtcaagccttgtggccactcgtgaggattatcggcaggtcctgcgcgatcataactgtctgcaaacactgttgcagcatctgacatcacattcacttacaatcgtctctaatgcttgtggcacgctatggaacctgagcgctcgttcagccagagaccaggaactgttgtgggatctgggcgccgttgggatgctgcgcaatttagttcactctaaacataaaatgatagcaatgggcagcgctgctgctttgagaaacctgttagctcaccgccccgccaaacaccaggctgctgcaaccgctgtgtcccctggttcttgtgttccatccctctacgttcggaaacagcgggccctggaagcggagctggatgctcgccacctggctcaggcattagagcacttggaaaagcaggggcctccagccgccgaagccgcaactaaaaaacccttacctcctctcaggcacctggatggcctggcccaggattacgcaagcgacagtgggtgttttgatgacgatgatgcgccgtcctctttagcggccgccgctgctacaggagaacccgcgagccctgccgcactgagcctctttctcggctctccctttctgcaaggacaagccttagcaaggacccctccaacgcgacgcggcggcaaagaggccgagaaagataccagcggagaggctgctgtagcagcgaaggcaaaggctaaactggccttggccgtggccaggatagaccagctcgtcgaagacatctctgcactccacactagcagcgacgacagcttttcgctgtcttcaggcgatcccgggcaagaggcaccacgggaggggagggcacagtcatgctctccctgcagggggccagagggcgggaggcgagaagccggttcccgcgcccatccattactccggctgaaagccgcccacgccagtctctccaacgactcacttaattcggggagcgcatccgatggctactgccctcgggaacacatgctcccatgccctcttgctgctctggcttccaggcgtgaggatccgcgatgcgggcagccgcgaccatccagactggacttggatctgcctgggtgtcaggccgagccgcccgcccgcgaagcgacctctgccgatgctcgtgtcagaactatcaagctaagtcccacctaccagcacgtccctctgcttgaaggcgccagtcgcgctggtgcggagcctttggctggtcccggcatcagccctggcgcccggaagcaggcatggctaccagccgaccatctctctaaggtgcctgaaaaactcgctgctgctcccctctctgtagccagcaaagccctccaaaaattagccgcccaggaagggccattgtctcttagccgctgctcatctctgtcctcactgagctccgctggcagacccggaccgagtgaggggggggaccttgacgattctgattcttctctcgagggattagaagaagccggacccagtgaggctgaactggactcaacttggcgcgcccctggggctacatccctccccgtagccatcccggcacctagacggaaccgcggaagaggcctgggtgtcgaggacgccaccccatcctcatccagtgagaactatgtccaggagaccccgctggtcctgtcccgctgttctagcgtgtcttccctgggatccttcgaatccccgtctatcgccagtagcattccatccgagccctgctctggacaggggtcagggaccatctcaccatccgaattgccagactcgcctggccaaaccatgccaccatctagatccaagacgcctcccctagctcctgcacctcaaggcccgccagaggccactcaatttagtctccagtgggagtcctacgtgaaacgcttcctggacatcgctgactgccgggaaagatgccgcctcccaagtgaactggacgcagggtccgtacgctttacagttgagaagcctgatgaaaacttctcatgtgcctcaagcctttctgcactcgcactgcatgagcattatgtacagcaggatgtggagctgaggttactgccctccgcctgtcctgagcgcgggggcggcgccggcggcgccggactgcatttcgccggccatcggcgaagggaagaaggcccagcccccaccggctctcgaccgaggggtgctgccgaccaagagctggagctcctgagagagtgtctgggcgctgccgttcctgcccggctgcggaaggtcgccagcgccctggtgcctggccgccgggccctgcccgtccctgtctacatgttggtgcctgctccggcccctgcccaggaggatgacagttgtaccgattcggctgaggggacacctgtgaacttctcttccgctgcctcgctgtccgacgagacgctgcaaggtcctccgagagatcagcccggagggccagcagggcgccaacgacctacagggcgacctacaagtgcccggcaggctatgggacatcggcataaggccggtggggcagggcggtcagccgagcaaagtagaggagcggggaagaatagagccggactggagttgcctctgggcaggccaccaagtgctccggcagataaggatggaagtaaacccggtcgaaccaggggtgacggagccctgcagagcctttgcttgaccacaccaactgaagaagccgtgtactgcttctacggaaacgacagcgacgaagagccaccagcagccgctcctacccctacccatcgacggacaagcgccattccccgcgccttcaccagagaacgccctcaaggtaggaaggaagcccccgccccatctaaggcggcacctgctgcaccacctcccgcacgtactcagccaagtctgatcgcagatgagacgcccccctgttattctttgtcaagctccgcatcgagcttgtctgaacctgagccctctgaaccgcccgccgtgcatcccagaggaagggaaccagcggtaaccaaagacccaggcccaggagggggtagggacagtagtccctctccaagagccgcggaagagctactgcaacgctgtatctctagtgcgctgcctcgcagacgacctccagtgtcaggattaagacggaggaagcctcgtgctacccggctggacgaacgccctgcagagggttcgagggaaaggggagaagaagctgccggcagcgaccgcgcatctgaccttgacagtgttgagtggcgggccattcaggaaggggcaaactccattgtaacctggcttcatcaggctgccgctgccacacgggaggcatcctctgagagcgactctatactgagctttgtctccggattatctgtgggttcaacactgcaaccacctaagcaccgtaaggggaggcaggccgagggggaaatggggtccgcccggaggcccgagaaaaggggcgcagcgagtgtcaagacctctggatccccccgctcccctgcggggccagaaaaacccagaggcactcagaagaccaccccaggagtacccgctgtgctgcgagggcgtaccgtaatttacgttccttcacccgcccccagggcccagcctaagggtacccctggtcctagagccaccccccgcaaggtggcgcccccatgcctggcccaacccgctgcgccggcgaaagtgccctcacctggacagcagagaagcagatctctgcatcgacccgctaagacttccgagctcgccacactcagccagccccctagatcggctaccccacccgcccgcctggcaaagactccctcttcctcgtcaagccagacgtcccccgcgagtcaacctctgccccgaaaaagaccacctgtcacccaagcagctggtgcgttgccaggcccaggagcctctccagtaccaaaaacgccagctcgcactctcttggctaagcagcacaagacacagcggagccctgtgcgcataccatttatgcagcgccctgccaggcgcgggccacccccattggcccgtgccgttccagaaccaggacctcgtggcagagccggcacagaggccggacccggggctagaggcggtagacttggcttggttcgcgtcgccagtgctttaagctctggttctgagagctctgatcgttctgggttcagacggcagctgaccttcatcaaggaaagccctggactgagaaggcgacgctccgaactgtcgagtgcggaatcagctgctagtgcaccccagggcgcttcgccccgccgcgggaggcctgcactgcctgctgtgttcctgtgcagtagccgatgcgaagaattaagagcggcacctaggcagggaccagcacccgcccgtcagagacccccagcggcacgaccgtctcctggtgagcgacctgccagacgcaccacttctgaaagccctagccgcctcccagttagagcgccagccgcccgccccgaaacggttaagcgctatgcttctttgcctcacatctccgttgcaagaaggccagatggcgctgtaccagcagcaccagcttctgctgatgcagctagaaggtcatccgacggcgagccaagacctctccctcgagttgctgcacccggaaccacttggaggagaatacgagacgaagacgttccccacatactcaggagcactctcccagcaacagctttgcccctgcgcggctccacaccagaagatgcccccgccggaccacctcctcgaaagacttccgatgcggtggtccaaaccgaggaggtggcagctcccaaaaccaactcttccactagtccgagcctggagaccagagagcccccaggagcaccagccggcggacagctgtctctcttaggatccgatgtagatgggccgtctctcgctaaggcaccgatttccgcacctttcgtgcatgaaggtctgggcgttgccgttgggggcttcccagctagcagacacggctccccctcaaggagcgccagggtcccaccattcaactacgtgccctcccccatggtggtcgctgccactaccgactctgctgccgagaaagctcctgcaaccgctagcgctactctgttagaatag

SEQ ID NO: 294801 - DNA, 6090 bp, Artificial Sequence
  derived and/or modified sequence
atggccagctctgtggccccctatgagcagctggtgcggcaggtggaggccctgaaggccgagaacagccacctgcggcaggagctgcgggacaacagcagccacctgagcaagctggagacagagaccagcggcatgaaggaggtgctgaagcacctgcagggcaagctggagcaggaggcccgggtgctggtgagcagcggccagacagaggtgctggagcagctgaaggccctgcagatggacatcaccagcctgtacaacctgaagttccagccccccaccctgggccctgagcctgctgcccggaccccagagggcagccctgtgcacggcagcggccccagcaaggacagctttggagagctgagccgggccaccatccggctgctggaggagctggaccgggagcgctgcttcctgctgaatgaaattgagaaggaggagaaggagaagctgtggtactacagccagctgcagggcctgagcaagaggctggatgagctgccccacgtggactatgagatgcacaagatgacccgggaccccctgaacctggccctgcggcgctatgccggcatgaccctgaccaacctgacctttggagatgtggccaacaaggccaccctgtgtgcccggcggggctgcatggaggccatcgtggcccagctggccagtgacagcgaggagctgcaccaggtggtgagcagcatcctgaggaacctgtcctggagggctgacatcaacagcaagaaggtgctgcgggaggccggctctgtgacagccctggtgcagtgtgtgctgcgggccaccaaggagagcaccctgaagtctgtgctgagcgccctgtggaacctgagcgcccacagcacagagaacaaggccgccatctgccaggtggatggagccctgggcttcctggtgtccaccctgacctacaagtgccagagcaacagcctggccatcattgaaagtggcggcggcatcctgagaaatgtgagcagcctggtggccacccgggaggactaccggcaggtgctgcgggaccacaactgcctgcagaccctgctgcagcacctgaccagccacagcctgaccatcgtgtccaatgcctgtggcaccctgtggaacctgagcgcccggagcgcccgggaccaggagctgctgtgggacctgggcgctgtgggcatgctgaggaacctggtgcacagcaagcacaagatgattgccatgggcagcgctgctgccctgaggaacctgctggcccacaggcctgccaagcaccaggccgccgccacagctgtgtccccaggcagctgtgtgcccagcctgtatgtgaggaagcagagggccctggaggccgagctggatgcccggcacctggcccaggccctggagcacctggagaagcagggccccccagctgctgaggccgccaccaagaagcccctgccccccctgcggcacctggatggcctggcccaggactatgccagtgacagcggctgctttgatgatgatgatgcccccagcagcctggccgctgctgctgccactggagagcccgccagccctgctgccctgagcctcttcctgggcagccccttcctgcagggccaggccctggcccggaccccacccaccaggagaggaggcaaggaggccgagaaggacaccagcggggaggccgctgtggccgccaaggccaaggccaagctggccctggccgtggccagaattgaccagctggtggaggacatcagcgccctgcacaccagcagtgatgacagcttcagcctgagcagcggggaccccggccaggaggccccccgggagggccgggcccagagctgcagcccctgccggggccctgagggcggccggcgggaggccggcagccgggcccaccccctgctgcggctgaaggccgcccacgccagcctgagcaatgacagcctgaacagcggcagcgccagtgatggctactgcccccgggagcacatgctgccctgccccctggccgccctggccagcagaagagaggacccccgctgtggccagccccggcccagccggctggacctggacctgcccggctgccaggccgagcccccagcccgggaggccaccagcgcagatgcccgggtgaggaccatcaagctgagccccacctaccagcacgtgcccctgctggagggcgccagcagagctggagctgagcccctggccggccctggcatcagccctggggccaggaagcaggcctggctgcctgctgaccacctgagcaaggtgcctgagaagctggccgccgcccccctgtctgtggccagcaaggccctgcagaagctggccgcccaggagggccccctgagcctgagccgctgcagcagcctgagcagcctgagcagcgctggccggcccggccccagcgagggcggggacctggatgacagcgacagcagcctggagggcctggaggaggccggccccagcgaggccgagctggacagcacctggagggcccctggggccaccagcctgcctgtggccatcccagcccccaggaggaacagaggccggggcctgggcgtggaggatgccacccccagcagcagcagtgaaaattatgtgcaggagacccccctggtgctgagccgctgcagctctgtgagcagcctgggcagctttgagagccccagcatcgccagcagcatccccagcgagccctgcagcggccagggcagcggcaccatcagccccagcgagctgcctgacagccctggccagaccatgccacccagccgcagcaagaccccacccctggccccagccccccagggccccccagaggccacccagttcagcctgcagtgggagagctatgtgaagcgcttcctggacattgctgactgccgggagcgctgccgcctgcccagcgagctggatgctggctctgtgcgcttcaccgtggagaagccagatgagaacttcagctgtgccagcagcctgagcgccctggccctgcacgagcactacgtgcagcaggatgtggagctgcggctgctgcccagcgcctgcccagagcggggcggcggggccggcggggccggcctgcactttgctggccacagaagaagagaggagggccctgcccccaccggcagccggcccagaggagctgctgaccaggagctggagctgctgagagaatgtctgggcgctgctgtgcctgcccggctgaggaaggtggccagcgccctggtgcccggccggcgggccctgcctgtgcctgtgtacatgctggtgcctgccccagccccagcccaggaggatgacagctgcacagacagcgctgagggcacccctgtgaacttcagcagcgctgccagcctgagtgatgagaccctgcagggccccccccgggaccagcccggcggccctgctggccggcagaggcccaccggccggcccaccagcgcccggcaggccatgggccaccgccacaaggccggcggggccggccgctctgctgagcagagcagaggagctgggaagaacagagctggcctggagctgcccctgggccggccccccagcgccccagctgacaaggatggcagcaagccaggccgcaccagaggagatggagccctgcagagcctgtgcctgaccacccccacagaggaggccgtgtactgcttctatggaaatgacagtgatgaggagcccccagctgctgcccccacccccacccacaggaggaccagcgccatcccccgggccttcacccgggagcggccccagggcaggaaggaggccccagcccccagcaaggccgccccagctgcccctcctccagcccggacccagcccagcctgattgctgatgagaccccaccctgctacagcctgagcagcagcgccagcagcctgtctgagcctgagcccagcgagcccccagctgtgcacccccggggccgggagcctgctgtgaccaaggaccccggccctgggggcggccgggacagcagccccagccccagggctgctgaggagctgctgcagcgctgcatcagcagcgccctgccccggcggcggccccctgtgtctggcctgcggcggaggaagccccgggccacccggctggatgagaggcctgctgagggcagccgggagcggggggaggaggccgccggcagtgaccgggccagtgacctggacagcgtggagtggagggccatccaggagggcgccaacagcatcgtgacctggctgcaccaggccgctgctgccacccgggaggccagcagcgagagtgacagcatcctgagctttgtgtctggcctgtctgtgggcagcaccctgcagccccccaagcacaggaagggccggcaggccgagggggagatgggcagcgcccggcggcctgagaagagaggagctgcctctgtgaagaccagcggcagccccaggagccctgctggccctgagaagccccggggcacccagaagaccaccccaggagtgcctgctgtgctgcggggccgcaccgtcatctacgtgcccagccctgccccccgggcccagcccaagggcaccccaggcccccgggccacccccaggaaggtggccccaccctgcctggcccagcctgctgccccagccaaggtgcccagccctggccagcagaggagccgcagcctgcacaggcctgccaagaccagcgagctggccaccctgagccagccccccaggtctgccaccccaccagcccggctggccaagacccccagcagcagcagcagccagaccagccctgccagccagcccctgcccaggaagaggcctcctgtgacccaggccgccggggccctgcccggccctggggccagccctgtgcccaagaccccagcccggaccctgctggccaagcagcacaagacccagaggagccctgtgcgcatccccttcatgcagaggcctgcccggcggggccccccacccctggcccgggctgtgcctgagcccggcccccggggccgggccggcacagaagctggccctggggcccggggcggccgcctgggcctggtgcgggtggccagcgccctgagcagcggcagcgagagcagtgacagaagtggcttccggcggcagctgaccttcatcaaggagagccctggcctgcggaggagaagaagtgagctgagcagcgctgagagcgctgccagcgccccccagggcgccagcccccggcggggccgcccagccctgcctgctgtgttcctgtgcagcagccgctgtgaggagctgcgggccgccccccggcagggccctgccccagcccggcagaggcctcctgctgcccggcccagccctggagagaggcctgcccggaggaccaccagcgagagccccagccggctgcctgtgcgggccccagctgcccggcctgagaccgtgaagagatatgccagcctgccccacatctctgtggcccggcggccagatggagctgtgcctgctgccccagccagcgcagatgctgcccggcgcagcagtgatggagagccccggcccctgccccgggtggccgcccctggcaccacctggaggcgcatcagagatgaagatgtgccccacatcctgcggagcaccctgcctgccacagccctgcccctgcggggcagcaccccagaagatgccccagctggccccccacccaggaagaccagtgatgctgtggtgcagacagaggaggtggccgcccccaagaccaacagcagcaccagccccagcctggagacccgggagcccccaggggccccagctgggggccagctgagcctgctgggcagtgatgtggatggccccagcctggccaaggcccccatcagcgccccctttgtgcatgagggcctgggcgtggccgtgggcggcttccctgccagcagacatggcagccccagccgcagcgcccgggtgccccccttcaactacgtgcccagccccatggtggtggccgccaccacagacagcgctgctgagaaggccccagccacagccagcgccaccctgctggagtag

SEQ ID NO: 294802 - DNA, 6912 bp, Artificial Sequence
  derived and/or modified sequence
atggccagctctgtggccccctatgagcagctggtgcggcaggtggaggccctgaaggccgagaacagccacctgcggcaggagctgcgggacaacagcagccacctgagcaagctggagacagagaccagcggcatgaaggaggtgctgaagcacctgcagggcaagctggagcaggaggcccgggtgctggtgagcagcggccagacagaggtgctggagcagctgaaggccctgcagatggacatcaccagcctgtacaacctgaagttccagccccccaccctgggccctgagcctgctgcccggaccccagagggcagccctgtgcacggcagcggccccagcaaggacagctttggagagctgagccgggccaccatccggctgctggaggagctggaccgggagcgctgcttcctgctgaatgaaattgagaaggaggagaaggagaagctgtggtactacagccagctgcagggcctgagcaagaggctggatgagctgccccacgtggagacccagttctccatgcagatggacctgatccggcagcagctggagtttgaggcccagcacatccgcagcctgatggaggagcgcttcggcaccagtgatgagatggtgcagagggcccagatccgggccagccggctggagcagattgacaaggagctgctggaggcccaggacagagtgcagcagacagagccccaggccctgctggccgtgaagtctgtgcctgtggatgaagatcctgagacagaggtgcccacccacccagaagatggcaccccccagcccggcaacagcaaggtggaggtggtgttctggctgctgtccatgctggccacccgggaccaggaggacacagcccggaccctgctggccatgagcagcagccctgagagctgtgtggccatgagaagaagtggctgcctgcccctgctgctgcagatcctgcacggcacagaggccgccgccggcggccgggccggggcccctggggcccctggggccaaggatgccaggatgagggccaatgctgccctgcacaacatcgtgttcagccagcctgaccagggcctggccaggaaggagatgagggtgctgcacgtgctggagcagatccgggcctactgtgagacctgctgggactggctgcaggccagagatggcggccctgagggcggcggggccggcagcgcccccatccccatcgagccccagatctgccaggccacctgtgctgtgatgaagctgagctttgatgaggagtaccgccgggccatgaatgagctgggcggcctgcaggccgtggccgagctgctgcaggtggactatgagatgcacaagatgacccgggaccccctgaacctggccctgcggcgctatgccggcatgaccctgaccaacctgacctttggagatgtggccaacaaggccaccctgtgtgcccggcggggctgcatggaggccatcgtggcccagctggccagtgacagcgaggagctgcaccaggtggtgagcagcatcctgaggaacctgtcctggagggctgacatcaacagcaagaaggtgctgcgggaggccggctctgtgacagccctggtgcagtgtgtgctgcgggccaccaaggagagcaccctgaagtctgtgctgagcgccctgtggaacctgagcgcccacagcacagagaacaaggccgccatctgccaggtggatggagccctgggcttcctggtgtccaccctgacctacaagtgccagagcaacagcctggccatcattgaaagtggcggcggcatcctgagaaatgtgagcagcctggtggccacccgggaggactaccggcaggtgctgcgggaccacaactgcctgcagaccctgctgcagcacctgaccagccacagcctgaccatcgtgtccaatgcctgtggcaccctgtggaacctgagcgcccggagcgcccgggaccaggagctgctgtgggacctgggcgctgtgggcatgctgaggaacctggtgcacagcaagcacaagatgattgccatgggcagcgctgctgccctgaggaacctgctggcccacaggcctgccaagcaccaggccgccgccacagctgtgtccccaggcagctgtgtgcccagcctgtatgtgaggaagcagagggccctggaggccgagctggatgcccggcacctggcccaggccctggagcacctggagaagcagggccccccagctgctgaggccgccaccaagaagcccctgccccccctgcggcacctggatggcctggcccaggactatgccagtgacagcggctgctttgatgatgatgatgcccccagcagcctggccgctgctgctgccactggagagcccgccagccctgctgccctgagcctcttcctgggcagccccttcctgcagggccaggccctggcccggaccccacccaccaggagaggaggcaaggaggccgagaaggacaccagcggggaggccgctgtggccgccaaggccaaggccaagctggccctggccgtggccagaattgaccagctggtggaggacatcagcgccctgcacaccagcagtgatgacagcttcagcctgagcagcggggaccccggccaggaggccccccgggagggccgggcccagagctgcagcccctgccggggccctgagggcggccggcgggaggccggcagccgggcccaccccctgctgcggctgaaggccgcccacgccagcctgagcaatgacagcctgaacagcggcagcgccagtgatggctactgcccccgggagcacatgctgccctgccccctggccgccctggccagcagaagagaggacccccgctgtggccagccccggcccagccggctggacctggacctgcccggctgccaggccgagcccccagcccgggaggccaccagcgcagatgcccgggtgaggaccatcaagctgagccccacctaccagcacgtgcccctgctggagggcgccagcagagctggagctgagcccctggccggccctggcatcagccctggggccaggaagcaggcctggctgcctgctgaccacctgagcaaggtgcctgagaagctggccgccgcccccctgtctgtggccagcaaggccctgcagaagctggccgcccaggagggccccctgagcctgagccgctgcagcagcctgagcagcctgagcagcgctggccggcccggccccagcgagggcggggacctggatgacagcgacagcagcctggagggcctggaggaggccggccccagcgaggccgagctggacagcacctggagggcccctggggccaccagcctgcctgtggccatcccagcccccaggaggaacagaggccggggcctgggcgtggaggatgccacccccagcagcagcagtgaaaattatgtgcaggagacccccctggtgctgagccgctgcagctctgtgagcagcctgggcagctttgagagccccagcatcgccagcagcatccccagcgagccctgcagcggccagggcagcggcaccatcagccccagcgagctgcctgacagccctggccagaccatgccacccagccgcagcaagaccccacccctggccccagccccccagggccccccagaggccacccagttcagcctgcagtgggagagctatgtgaagcgcttcctggacattgctgactgccgggagcgctgccgcctgcccagcgagctggatgctggctctgtgcgcttcaccgtggagaagccagatgagaacttcagctgtgccagcagcctgagcgccctggccctgcacgagcactacgtgcagcaggatgtggagctgcggctgctgcccagcgcctgcccagagcggggcggcggggccggcggggccggcctgcactttgctggccacagaagaagagaggagggccctgcccccaccggcagccggcccagaggagctgctgaccaggagctggagctgctgagagaatgtctgggcgctgctgtgcctgcccggctgaggaaggtggccagcgccctggtgcccggccggcgggccctgcctgtgcctgtgtacatgctggtgcctgccccagccccagcccaggaggatgacagctgcacagacagcgctgagggcacccctgtgaacttcagcagcgctgccagcctgagtgatgagaccctgcagggccccccccgggaccagcccggcggccctgctggccggcagaggcccaccggccggcccaccagcgcccggcaggccatgggccaccgccacaaggccggcggggccggccgctctgctgagcagagcagaggagctgggaagaacagagctggcctggagctgcccctgggccggccccccagcgccccagctgacaaggatggcagcaagccaggccgcaccagaggagatggagccctgcagagcctgtgcctgaccacccccacagaggaggccgtgtactgcttctatggaaatgacagtgatgaggagcccccagctgctgcccccacccccacccacaggaggaccagcgccatcccccgggccttcacccgggagcggccccagggcaggaaggaggccccagcccccagcaaggccgccccagctgcccctcctccagcccggacccagcccagcctgattgctgatgagaccccaccctgctacagcctgagcagcagcgccagcagcctgtctgagcctgagcccagcgagcccccagctgtgcacccccggggccgggagcctgctgtgaccaaggaccccggccctgggggcggccgggacagcagccccagccccagggctgctgaggagctgctgcagcgctgcatcagcagcgccctgccccggcggcggccccctgtgtctggcctgcggcggaggaagccccgggccacccggctggatgagaggcctgctgagggcagccgggagcggggggaggaggccgccggcagtgaccgggccagtgacctggacagcgtggagtggagggccatccaggagggcgccaacagcatcgtgacctggctgcaccaggccgctgctgccacccgggaggccagcagcgagagtgacagcatcctgagctttgtgtctggcctgtctgtgggcagcaccctgcagccccccaagcacaggaagggccggcaggccgagggggagatgggcagcgcccggcggcctgagaagagaggagctgcctctgtgaagaccagcggcagccccaggagccctgctggccctgagaagccccggggcacccagaagaccaccccaggagtgcctgctgtgctgcggggccgcaccgtcatctacgtgcccagccctgccccccgggcccagcccaagggcaccccaggcccccgggccacccccaggaaggtggccccaccctgcctggcccagcctgctgccccagccaaggtgcccagccctggccagcagaggagccgcagcctgcacaggcctgccaagaccagcgagctggccaccctgagccagccccccaggtctgccaccccaccagcccggctggccaagacccccagcagcagcagcagccagaccagccctgccagccagcccctgcccaggaagaggcctcctgtgacccaggccgccggggccctgcccggccctggggccagccctgtgcccaagaccccagcccggaccctgctggccaagcagcacaagacccagaggagccctgtgcgcatccccttcatgcagaggcctgcccggcggggccccccacccctggcccgggctgtgcctgagcccggcccccggggccgggccggcacagaagctggccctggggcccggggcggccgcctgggcctggtgcgggtggccagcgccctgagcagcggcagcgagagcagtgacagaagtggcttccggcggcagctgaccttcatcaaggagagccctggcctgcggaggagaagaagtgagctgagcagcgctgagagcgctgccagcgccccccagggcgccagcccccggcggggccgcccagccctgcctgctgtgttcctgtgcagcagccgctgtgaggagctgcgggccgccccccggcagggccctgccccagcccggcagaggcctcctgctgcccggcccagccctggagagaggcctgcccggaggaccaccagcgagagccccagccggctgcctgtgcgggccccagctgcccggcctgagaccgtgaagagatatgccagcctgccccacatctctgtggcccggcggccagatggagctgtgcctgctgccccagccagcgcagatgctgcccggcgcagcagtgatggagagccccggcccctgccccgggtggccgcccctggcaccacctggaggcgcatcagagatgaagatgtgccccacatcctgcggagcaccctgcctgccacagccctgcccctgcggggcagcaccccagaagatgccccagctggccccccacccaggaagaccagtgatgctgtggtgcagacagaggaggtggccgcccccaagaccaacagcagcaccagccccagcctggagacccgggagcccccaggggccccagctgggggccagctgagcctgctgggcagtgatgtggatggccccagcctggccaaggcccccatcagcgccccctttgtgcatgagggcctgggcgtggccgtgggcggcttccctgccagcagacatggcagccccagccgcagcgcccgggtgccccccttcaactacgtgcccagccccatggtggtggccgccaccacagacagcgctgctgagaaggccccagccacagccagcgccaccctgctggagtag

SEQ ID NO: 294803 - DNA, 6090 bp, Artificial Sequence
  derived and/or modified sequence
atggccagcagcgtggccccctacgagcagctggtgcggcaggtggaggctttgaaggccgagaatagtcatctgcggcaggaactacgggacaacagctcccacctaagtaagttggagaccgagacctctggaatgaaagaagtcttgaaacaccttcagggcaaacttgaacaagaagccagggtcctggtctccagcggccagaccgaggtgctggagcagctgaaggcactgcagatggatataaccagcctctacaacttgaaattccaacctcctacgctcgggccagaacctgctgcccgcactcctgaaggctcccccgtgcacggaagcggtcccagtaaggatagcttcggcgaactcagtagagccaccatcagattgctggaggagctggatcgggagcgatgtttcttgcttaacgagattgagaaggaggagaaggaaaagctatggtattattcacaattacaggggctgtctaagaggctagacgaactccctcacgtcgactatgagatgcataagatgacacgtgacccactgaacctcgccctccgacggtatgcaggtatgacgctcactaacttgaccttcggggatgtggcgaacaaggccactctgtgtgcgcgccgagggtgcatggaagctatcgtggcacagttggccagtgacagcgaggagctgcaccaggttgtctctagcatactgaggaatttgtcatggagggccgatatcaattccaagaaggtactgagagaagctgggtccgttactgcactggtgcagtgcgttcttagagccaccaaggagtcaacacttaagagcgtcctctccgccttgtggaacctaagcgcacattctactgaaaacaaagctgccatttgccaagttgacggcgctcttgggtttctggtaagcactctgacatacaagtgccagagtaacagtctggccattatcgaatctgggggcggtatcctgcgtaatgtgagttcactagtggctacgagagaggattatcgtcaggttctcagggaccataactgcctgcagacactgctgcagcatctcacctcccattccctaaccattgtgagtaatgcttgcggaacgctctggaatctgtccgctaggtctgctagggaccaggagctactgtgggacctgggtgccgtgggcatgctcagaaatctcgtacactctaagcataagatgatagctatgggttcagcagctgcactgcggaatctcctcgctcaccggcccgccaagcaccaagcagcagctaccgccgtttcccccggatcctgcgttccatcactgtatgtgaggaagcaaagagcgctggaggcagagctagatgcacggcacttggcgcaggcactggagcacctagaaaaacaaggcccgccggcagcggaagcggcgactaaaaagcctctcccacccttacggcacttggacggactcgcccaggattatgcttcggattcagggtgcttcgatgatgacgacgccccatcctccctggcggctgctgccgccaccggcgagcctgcttcacccgcagccctgagcctgttcctcgggagtccctttctgcaggggcaggctttggcccgaactcctcctactcggcgcggcgggaaggaggcagaaaaggatacctctggggaagccgctgtggctgccaaggccaaggccaaattagcccttgccgtggcacgcatcgaccagttggtggaagacatcagcgcactccatacctcttctgacgactccttctctctgagcagcggcgacccaggccaggaggctcctagagaaggtagggcacagagctgttcgccctgtagggggcccgagggcggtaggagagaggcaggttctagggcgcaccccctgctgaggcttaaggccgcacatgcatccctgtcaaacgattctttgaactcaggctcggcaagcgacggttactgcccacgggagcacatgcttccttgccctctcgctgccttagctagtcgaagagaggatccccgatgcgggcagccccggccatcccgcctggatctagacttaccgggctgtcaggccgagccgccagcacgggaggcaaccagcgccgatgcgcgcgtgcgcactatcaagctcagcccaacctaccagcacgtccccctcctcgaaggcgcctctcgggctggtgccgaaccactcgcgggtccagggatctcacccggagcccgcaagcaggcatggcttcctgccgatcatctttcaaaggtgcccgagaagctggctgctgcccccctatccgtggcctcaaaggccctccagaagctagccgctcaagaaggacctctaagcctgagtaggtgctcaagcttgtcatccctctcatcagccggcagacctggcccttcggaaggaggcgacctggacgattccgacagttccctggagggactggaggaagccggtccgtcagaagcggaactggatagcacctggcgtgcacctggggctacatctctgcccgtcgccatcccagcccccagaaggaatcggggcaggggattgggtgtcgaggatgctactccgagctcttctagcgaaaattatgtccaagagacacccctcgttctctctcgctgctcctccgtatcttctttgggtagctttgagtccccttccatcgcatcatctatcccttcggagccatgttctgggcaaggctcaggaaccatttccccatctgagctacctgacagtccaggacagacaatgcccccttctaggtctaaaacaccacctctcgctccagcgccccagggaccaccagaagctacccaattctctctgcagtgggagtcctatgtgaaacgctttttagacatcgcggattgccgcgaacggtgccgcctgcctagcgaacttgacgcaggcagcgtgcgcttcaccgtggaaaagcctgacgaaaacttcagctgcgcctcaagcctctccgctctggcgcttcacgaacattatgtgcagcaggatgtggaactcagattgctgccgagcgcctgtccggagagaggaggaggggcaggaggagcgggccttcactttgcaggccaccgcaggcgagaggagggaccagcccctaccggctcgcgcccacgtggcgctgccgatcaggagctcgaactcttacgagaatgcctgggcgccgctgtgccagcccgcctcagaaaagtggccagtgctttagtgcctgggcgccgggcgctccctgttcctgtctacatgcttgtgcccgcgccagcaccagcacaggaggatgactcttgcaccgacagcgccgagggtacccctgtcaacttcagcagtgccgcttctctgagcgatgagacactccaaggccctccccgcgaccagcctggggggccagccggccgacagcgcccgactggaagacccaccagcgcaagacaggcaatgggccatcgccacaaagcggggggggcaggccggagtgccgaacaaagtcggggagccggaaagaacagggccggattggagttgccgttgggcagaccgccctcagctcctgccgataaggatggcagtaagccaggcagaaccagaggggacggtgccctccagagtctctgcctgaccacccctactgaagaagccgtctactgtttctacgggaacgattcagacgaagagccgcctgccgccgctcccacaccgacgcaccgccggactagcgccataccaagagcatttactagggagcgcccacagggcagaaaggaggcacctgctccctctaaggccgccccagccgctccaccaccagctaggacccagccaagcttgattgcagacgagactccaccctgctacagcctaagcagtagtgccagttccctctcagagcccgaaccatccgaaccacctgcggtgcacccacgggggcgggagcctgcagttacaaaagaccctggccccggcggaggacgtgactctagcccctctccacgcgccgctgaagagctgttgcagcggtgtatttcatccgccctccccagaagaaggccacccgtttctggcctccggcggaggaagccaagggctacccgactggacgagaggcctgccgaagggagcagggagcgaggtgaagaggccgccggctctgatcgcgcaagcgaccttgattccgtagagtggcgcgccattcaagaaggggctaactcgatcgtgacttggctgcatcaagcggctgctgcaacccgcgaggcttcctccgaaagtgactccatcctgtccttcgtctctggtctgagtgtgggctcgaccctgcaacccccaaagcatcggaagggacggcaggccgagggggaaatgggatctgctcggcgccccgaaaaaaggggggcggcgagtgtgaagacctctggttctccaagaagccccgccggccctgagaagccaaggggcacacagaagacaaccccgggcgttcccgctgtgttgagaggcaggactgtgatctacgtaccatctcctgccccaagagctcagcccaaaggaacacctggacccagagctacgcctcgcaaggtggctcctccttgccttgcacagccagctgctcctgccaaagtcccatctccgggccagcagcgttcccggtcgttgcaccggccagctaagacatcagagctagcaacactgagccagccacccaggtctgctaccccgccggcccgtcttgccaagacgccatctagtagtagctcgcagacctcgcctgctagtcagcctttgccgaggaagcggcccccggtgacacaagcagcaggagcactgccaggacctggcgcgagccctgtgccaaaaacaccggcgcgcacccttctggcaaagcaacacaaaacgcaaaggtcccctgtgcggatcccttttatgcagcgccctgcccgcagaggaccccccccactggctcgggcggtgccagagcccgggcccagaggcagggccggcacagaagcaggccctggagcccggggtggccggctagggctcgtgagagtggcctcggccctttcctctggaagcgagtcttccgacaggtctggattccgacggcagctgacttttatcaaggagtctcccgggctgagacgccgtaggtcggaattgagctccgccgaatcggctgctagcgcccctcagggagcatcaccacgacgcggacgccctgctctgcccgccgtgttcctgtgcagtagtcggtgcgaagaacttcgtgctgccccgcgtcagggacccgctccagctcggcagagacctcccgctgcccgaccctcgcccggtgagaggcccgcccgacgcacaacctcagagtcaccttccaggctgccagtcagggctcctgctgctcggccggagaccgtcaaaaggtatgcgtcactgccgcacattagtgtggctcgtcgcccagacggggcggtgcccgctgcccctgcctctgcagacgcagcacgccgttcatccgacggagagccacggcctttgccccgagtggccgctcccggaaccacttggcggagaatccgcgacgaagatgtcccccatatactgaggagtaccctgcctgccacagcccttccgctgcgggggagtacgcccgaggatgcgcccgccggtccccctccaagaaaaacgtccgacgctgtcgtgcagacggaagaagttgctgcacctaagaccaactccagcacttcaccttctttagaaacgagagaacctccaggggccccggcgggaggccagctgagccttctggggagcgatgttgatggcccaagtcttgcgaaagcccctatcagcgcaccctttgtgcacgaaggactcggggtggctgtcggagggttccccgccagcaggcatgggtctccctcgaggtccgcgcgcgtgcctccatttaactacgtgccgtctccaatggtggtggccgcaacaactgactccgctgccgagaaggcacccgctacagcctccgcaacgttgctggagtag

SEQ ID NO: 294804 - DNA, 6912 bp, Artificial Sequence
  derived and/or modified sequence
atggccagcagcgtggccccctacgagcagctggtgcggcaggtggaagccctgaaagccgagaactcccaccttagacaggagctgagagacaactctagccatctctccaaactcgagaccgagacatctggcatgaaggaggtgctcaaacacctgcaggggaagttggagcaggaggcacgcgttctcgtgtcgagcggccaaacagaagtgctggaacagctcaaagccctgcagatggacattacctctttgtacaatctcaaattccagccccctaccttaggacccgagcccgcagccagaacacccgagggttctccagtgcacggcagcggaccttcaaaggactcctttggtgagctctcacgcgcaacaatacggctcctggaggaattagatcgggaaagatgctttctcctgaatgagatcgagaaagaagagaaagaaaagctctggtactatagtcagctccaggggctgtctaaacgcctggacgagctccctcatgtggaaacacagttctctatgcagatggatctgattcgacagcagctggaattcgaggcccagcacatcaggtctctgatggaggaacgcttcggtactagtgatgagatggtgcaacgcgcccagatccgagcctcccgcttggaacagatcgacaaggagctgctggaagcccaggacagggttcagcagactgagccacaggccctcttagcggtgaaatctgttccggtggacgaagaccctgagacggaggtgcctacacatcccgaagacggcacaccacaaccaggaaactcaaaagtggaagtagttttctggcttttatcaatgctggctacacgggaccaggaggacaccgcccgcactctgctggccatgtcatcatcaccggaaagttgcgtggctatgagaaggagtggctgtcttccactactgctccagatcctccatgggacagaagccgccgccggagggcgcgccggcgcccctggtgctcccggcgcgaaagacgctcggatgagggctaatgccgctctgcataacatcgtcttttcacagccagatcaggggttggcccgcaaggagatgagagtgcttcacgtattagagcagattagagcttactgcgaaacgtgttgggactggttgcaagccagagatggcggacctgaaggcggaggggccgggagtgccccgattcccattgagccacagatctgtcaggctacctgcgcggtaatgaagctgagcttcgatgaggagtaccgacgggctatgaacgagctggggggcctgcaagctgtggcagagctgctccaggtcgactacgaaatgcacaaaatgacacgcgaccccttaaatctggctctgaggagatacgccggtatgaccctaactaacctcaccttcggagatgttgcaaacaaggcaacgctgtgcgcacgacggggctgcatggaggcgatcgtagcccagttagcctcagactccgaagaactgcaccaagtggtgtccagtatcttaagaaatctgtcctggagagctgatattaacagcaaaaaagtgttgagggaggcgggatctgtgaccgcccttgtccagtgcgtgcttagggctactaaagaatctaccctcaagtccgtactgtccgcactgtggaacctatccgcacactccactgagaataaggcggcaatctgtcaagttgatggagcgttaggatttctggtctccacactaacctataagtgccaaagcaacagcctggctatcatagagtcaggggggggtattcttagaaatgttagttccctcgtggccacaagagaggactatcggcaagtattgcgagaccacaattgtcttcagacattattgcaacatctaacgtcccattcactcaccatcgtcagcaatgcttgtggaaccctctggaatctcagcgcaaggtccgcgcgggaccaagagttgctctgggacctgggggctgtcgggatgctccggaacctggttcacagtaaacataagatgattgccatgggttcagccgccgccctcagaaatctgctggcacatcgcccagcgaagcatcaggcagctgccactgctgtgtccccggggtcttgtgtcccatctttgtacgtgcgcaagcagagagccttggaggctgagttggatgcgcgccacctcgcccaagccctagagcacctggaaaagcagggtccacctgctgcagaagctgccacgaaaaaacctctgcccccactgaggcatctggacggtctggcacaggactatgcgtccgattcagggtgctttgatgacgacgacgccccatcttccctcgcagctgctgctgctacaggggaaccggcgtcacccgctgccctaagcttattcctcggcagtcctttcctgcaaggacaggctctggcaagaacacctcccacacgcaggggagggaaggaagctgagaaagatacatctggcgaggctgccgtcgccgctaaagccaaagccaaactggctctcgccgtggcacggatcgatcaactggtcgaagatattagcgccttacatacaagcagcgatgacagctttagcttgtcgtcaggagatccaggccaggaggccccgagggaggggagggcacagtcatgttccccctgccgcggaccagagggcggacgtcgggaggctgggagcagggcccatcccttgctgcgcctgaaagccgcccacgcctcattgagtaacgattctttaaattccggatcagcatccgacgggtattgtccccgggagcacatgctcccatgccccctcgcagccttggcatcccgtagggaggatccccggtgcggacagccccgaccaagcagactggatctcgacctgcccgggtgtcaggccgaaccgccggccagagaagccacctcagctgacgccagggtgcggactatcaagctgtccccaacataccagcatgtgcctctgctcgaaggcgcatctcgggccggagccgaacctctcgccggccctggcatttctccaggggcgaggaaacaggcttggctcccggcggatcacttgagcaaagtcccagagaagttggcggccgcacccctatctgtggccagcaaggccctccagaaactggccgcccaggaaggccccctgagtctgtcccggtgctctagtctctccagtttgagcagcgcaggccgccctggaccctctgaagggggagatctggacgacagtgactcatccctggaaggattggaagaagcaggaccgagcgaggctgagcttgattctacctggcgggctcccggcgcaacttcactccctgttgctattcctgccccgaggaggaacaggggtcgggggctgggagtggaagacgccactccatcttcttctagcgaaaactacgtgcaggagactcccctcgtgctgtctagatgtagttccgtgagctcgctggggagtttcgagtctccaagtatcgcgtcctcaatccccagcgagccctgtagtggccaaggctccggaactattagccctagtgaactccctgacagtcctggccagactatgcccccatcccggtcaaagacccccccgctggcccctgccccccaggggccacccgaggccacccagtttagcctgcaatgggagagttacgtcaaacggttcctggacatagccgattgtagagagaggtgtcgcctgcctagcgagctggatgcgggatccgtgcgatttactgtggagaagcctgatgaaaattttagctgcgcttcatcgctctcagcactggcactgcacgagcattatgtccagcaggatgtcgagcttcggctcctaccttctgcgtgccccgagcgtgggggtggagcaggtggagcgggcttgcactttgccggccatcgtcggagggaagaggggccagcccctaccggttctagaccgaggggggctgccgatcaggagttggaactgctccgggagtgtctaggcgccgctgtgccagctcgattacggaaggtggcgtctgctttggtccctggcaggcgtgccttaccagtgccagtatacatgctggtgccagcccctgcccccgcccaggaggatgattcatgcaccgactccgccgaaggcacccctgtcaatttcagttctgccgcgtctttatctgatgagaccctacagggcccacctagggaccaacctggcgggccagccgggcgtcagcgccctaccgggaggcctaccagtgcacgccaggcaatgggccatagacacaaggcgggtggcgccggaaggagtgctgagcagtcacgcggcgccggaaaaaaccgcgctgggcttgagttgcctctcgggagaccaccctccgctccggccgacaaagatggttcaaaaccggggaggacccgcggtgatggcgctctacagtcactttgtcttacaactcctacagaggaagccgtttattgtttttatggtaacgacagcgacgaggagcccccagcagctgcccccacccctacccaccggagaacctcagcaattccaagggcgtttacccgcgaacgtccacagggacgcaaggaggctcccgctccaagtaaagcggctccggccgccccgccccctgctcggacccagccatccttaattgccgatgagaccccaccatgttacagcctgtcgagcagtgcctcaagcctgagcgagccagagccctcagagccacccgccgtacacccacgcggaagagagcctgcggttactaaggatcctggtccaggcggcgggcgggattcatctcccagccccagggctgccgaagagctgctgcagcgctgcatatccagtgccctacctcgcaggcggccaccggtttcaggcctccggcgaagaaaacccagagctactcgcctggacgagaggcctgctgagggcagccgcgagcgcggagaggaagcagctggtagtgatcgtgcttctgacctggactccgtggaatggcgagcaattcaagaaggcgccaactctattgtcacctggctccaccaggcggccgccgccacacgggaggcttcatcggaatccgattcaattctatcgtttgttagcggcctctcagtgggatctacccttcagccacccaaacaccgtaaaggaagacaggctgaaggagagatggggtccgctcggaggccagagaaaagaggcgctgcatcagtcaagacttcagggtccccccgaagtcccgccgggccggaaaaacctcgcggaacgcaaaaaacgacgcctggcgtgcctgcggtacttaggggtagaactgttatttacgtcccctcacctgccccccgtgctcagccaaaaggcactcccggtccaagggccacccccagaaaggtggcccctccatgtctggcccagccagcggcaccggccaaggtacccagccctgggcaacagcggtccagaagtctacaccgtcccgccaaaaccagcgaactagctacactttcacagcctccacggagcgcaacaccgcctgcacgactcgcaaaaactccatcctcttctagttcccagacatcccctgcctcacaaccgctgccaagaaagcggcccccagttacccaggcagctggagcccttccagggccaggcgcatctcccgtccccaaaaccccagccagaaccctcctcgcaaaacagcataagactcagaggtcaccagttcggatacctttcatgcaacgacccgcgaggcgtgggccacctccactggcaagggctgtgccagagccaggaccacgaggcagagcagggaccgaagctggaccaggcgccagagggggcagactcggactggtacgggtcgctagcgccttaagctccggcagcgagagctcagacaggagcggattcagaagacagctgacatttataaaagagagtcctggcctgcgccgaaggcggtcagagctaagctccgcagagtcagcagcgagtgctcctcagggtgcctcccctagacgaggcaggccggcgctgcccgcagtcttcctctgttcttcccggtgtgaggaactcagggccgcaccccggcaaggcccagcccctgcccggcagcgacccccggccgccaggccgtcccccggggagcggccagcccggcggacaacgtcagagtcaccatcgcgccttcccgtgcgtgcacccgccgcccgcccagaaactgtcaagcggtatgcttctctgccacacatttcagttgctcggcggccggacggagctgtgccagctgccccagcttctgccgatgctgcgcgtcgaagctcagatggcgagccaagacccctgccccgggtcgctgctccaggtaccacttggcggcgtattcgtgatgaagatgtgccccacatcctgagaagcaccttacccgcaaccgctctaccactgcggggttccacacccgaagatgcccctgctgggcctccacccagaaagacctcagacgccgtagttcaaactgaggaagtggctgctccgaaaacaaactcctccaccagcccctcattggaaaccagggagccccccggagcccccgctgggggtcagctttccctcctggggtcagacgttgacgggccctccctcgccaaggctcctattagcgctcccttcgttcacgaaggactgggagtagcggtgggcggcttccctgcgtcgaggcatggatccccgtcccggtcggcccgcgtcccccccttcaactacgtaccctctcctatggtcgttgccgctacaaccgacagtgctgccgaaaaagcgcccgcaacagctagcgctaccctgttggagtag

SEQ ID NO: 294805 - DNA, 6912 bp, Artificial Sequence
  derived and/or modified sequence
atggccagcagcgtggccccctacgagcagctggtgcggcaggtggaggccctgaaagccgagaacagccatctcagacaggaacttcgcgacaacagcagccatttaagtaaactagaaacagaaacaagtggaatgaaggaagtgctcaaacatcttcagggaaagcttgaacaggaggctcgagtgctcgtcagttccgggcagacggaggtcctggagcagctcaaagcactgcagatggatatcacatccctgtataacctgaagtttcagccccctacactggggccagaacccgcggctaggacaccagagggctcccctgtgcacggatctggcccaagcaaagacagtttcggcgagttatccagggctacgattcgactgctggaagaattggatcgcgaacgctgtttcttgctgaacgagattgaaaaagaggagaaggaaaagctctggtattattcccagctgcaggggctgagcaaaagattggatgagttgccccacgtggaaacacaattctccatgcagatggacctcatccggcagcaactggagttcgaggcacaacatattcgctcacttatggaagagcgttttggcacaagcgatgaaatggtccaaagagcccagatccgagcgtccaggctcgaacagattgataaagagctgctggaggctcaggaccgggttcaacagaccgagcctcaagccctgttggcagtcaagagtgtgccggtggacgaggatccggagacggaggttccaacacacccggaggacggcacaccacagccgggcaattctaaagtagaagttgtgttttggctgctttccatgctcgccaccagagaccaggaagacactgcgaggactctcttggctatgtcgtcctctccagaatcatgtgttgctatgaggcggagcggctgcctacccctgctattacaaattttacacggaacggaggccgccgccggcgggagagcaggagccccaggcgcccccggcgccaaagatgctcgtatgcgtgccaatgccgcactgcataacatagttttctcccagcccgaccaagggctggctaggaaagagatgcgcgtactgcacgttctcgaacagatccgagcctattgtgagacctgctgggactggctgcaggcacgggacggtgggcctgagggagggggcgctggatcggcaccgattccaatagaaccccagatttgccaagcgacttgtgctgtgatgaagctgagctttgacgaagaataccgcagggcaatgaacgagctaggagggcttcaggctgtggctgagctcctccaggtagactatgagatgcataagatgactcgtgaccctttgaatttagccttgcggcgctacgccggaatgacgctgaccaatctgacctttggggatgtggccaataaagctacactgtgcgctaggaggggttgcatggaagccattgtcgcccagctggcatcagacagcgaagagctgcatcaggtggtgtccagcatcttgagaaacctttcatggagggcagacatcaacagcaaaaaagtgctgcgagaggcaggcagtgtcacggctcttgtgcagtgcgtccttagagcgaccaaggagtctactcttaagtcagtgttatctgcgctctggaatctgtctgctcactctactgaaaataaggcagctatttgccaagtggatggggctttagggttcctcgtctctacccttacctataagtgccagagcaattccctagcaataattgagtctggaggcggaatattacggaatgtcagcagtctggttgccactagggaagattaccgacaggttctgcgggatcataactgcctccaaaccctgctgcagcacctaaccagtcatagcctgacaatcgtgagtaatgcatgtggaactctgtggaaccttagcgcacggtctgcccgggatcaagagctactgtgggatctgggcgccgtgggcatgctacggaacttggtacattctaagcacaagatgatagccatgggaagcgcggccgccctcagaaacctccttgcccaccggcccgcaaaacatcaggccgccgcaactgccgtgtcccctggttcctgcgtgccatctctgtatgtgagaaagcagagagctctggaagctgagctggatgcaagacatcttgctcaagccttagaacacctggaaaaacagggtcctcccgcggccgaggccgcgactaaaaaacccctgcctcctctgaggcacttggatggtctagcgcaggactacgcttcagattccgggtgttttgacgatgacgatgctccatcaagtttagccgctgccgccgcaaccggcgagccagccagccccgcagccttaagtttattcctgggcagtccgttcctccaagggcaagcgctcgctcggaccccacctacacggagaggaggcaaagaggcggaaaaggatactagcggagaggccgccgtggcggctaaagctaaggctaaactggcgctggccgttgcccgaattgatcaattggtggaagacatctctgcacttcacacctccagtgacgatagcttcagtctatcttcgggcgacccagggcaggaggccccccgtgaggggcgagcccagtcttgtagtccatgtagaggccctgagggaggccggagggaggcaggctcacgggcacaccccctgctcaggctgaaggctgcccacgcgtctttatccaacgatagtctcaacagtggttctgccagcgatggttattgtcctagggagcatatgctcccctgccccctcgccgccctggcctctagaagagaggacccccgctgtgggcagcctaggccttctaggctggatctggatctccctgggtgtcaggccgaaccacctgcacgcgaggctacttcggctgacgcaagagtgagaactataaagctgagtcctacataccagcacgtgccattgctggagggcgccagcagggccggcgccgaacctttggccggtccaggcatcagtcccggcgcaagaaaacaggcctggctgcctgctgaccatttgtctaaagtccccgagaaactcgccgccgcccctctgtcagttgcctccaaggcccttcaaaagttggctgcccaagaaggaccattaagtctgtcccggtgcagcagtctgagttcactgagctctgccggccggccagggccaagcgaaggcggagatcttgacgacagtgatagctccctagagggcctagaagaggccggccccagcgaagccgaactggatagcacgtggcgagccccaggcgctacaagcctgccagttgcaatcccggcacctcgtagaaacagaggtagaggtctaggagtagaagatgcaaccccgagttcctcgagtgaaaactacgtccaagagactcccctggtgctgagccgatgctcgtcagtctcaagtttggggtcatttgagtccccatcgatcgctagctctattccctctgagccctgtagcggacagggctctgggacaatttccccttcagagctccctgacagtcccggtcagacgatgcccccgtcacggtccaagaccccacctcttgccccagccccgcagggacctccagaggctacacagttctctttgcaatgggagtcatatgtcaagcggtttctcgacattgctgactgccgagagcgttgccgtttgcccagtgaattggatgcgggctccgtaaggttcactgtggagaagccggacgaaaatttttcctgtgcaagctccctttccgcacttgccctgcacgagcattacgtccagcaggatgtggagctgcgcctgctcccttctgcctgccccgagcgaggtggcggagctggaggtgctgggctccacttcgctggacacaggcgcagagaggaaggacccgctcccacgggctctaggccccgcggcgcggccgaccaggaactcgagcttctccgggaatgcctgggggcggctgttcccgcaagattgagaaaggtcgcttcagcactggtcccgggccgccgtgccctccctgtgcctgtgtacatgctggtccctgctccagcacctgcgcaggaagacgacagctgcacagattcagctgaaggcacccccgttaacttttcctctgctgccagcctttccgatgagactctgcagggaccccctagagatcagccaggtgggcctgcagggaggcagcggcccactggcagaccaaccagcgcccggcaagccatgggtcatcgccataaagcaggaggcgcaggacggtctgccgaacagagccggggggccggtaagaatagggccgggctcgagctgcctctggggcggcccccaagcgcacccgctgacaaagacggaagtaaaccagggcgtacacgtggcgacggcgccctacagtctttgtgcttaactactcctacggaggaggccgtttactgtttttacggcaacgactcagatgaggaaccgcccgctgcagcacccacccccacccaccgccgcacgagcgcgatcccgcgggctttcactcgcgagcgcccacagggacgtaaagaggcccctgcgccaagtaaggctgcgcccgcagcaccacctcccgcccggactcaaccatcccttatcgccgatgaaacacccccttgttactcactgagttcctccgcatcttcactgagcgaacccgagccaagcgagcccccagccgtgcacccgaggggccgagaaccagccgtcacaaaggatcctggtcccggcgggggccgtgactcatccccatcccctagggcagctgaggagctcttgcaacgctgcataagctccgcacttccaagacggcggcccccagtgagtggtctgcgaagacgtaaaccgcgcgcaaccaggctggacgagagaccggcagaagggagtagggaacgtggggaggaggccgctggctctgacagagcatccgatctggattctgtagagtggagggctattcaagagggcgctaactcaattgtgacctggctgcaccaggccgcagccgctactcgggaagcctccagcgagtccgattccatactgtctttcgtctcaggtctaagtgtcgggtccaccctgcagcctcctaagcataggaagggaagacaggctgagggtgagatggggtcagcgaggcgacctgaaaagcgcggcgccgcgtcagtgaaaacaagcggtagtcctcgctctcccgctgggcccgaaaaacctcgaggtactcagaaaacaacaccaggtgtacccgcagtgctgcgcggcagaacagtcatctacgttcccagtccagcccctcgtgcccagcctaagggaacccctggaccccgcgccacacctaggaaggtggccccaccttgtctagcccaaccggctgcacctgccaaagtgccaagccctggacagcagcgctctcgctcccttcacaggccagccaaaacttctgaactggctactctgtctcagcctccccgatcagccacccctcctgcccgcttggccaaaactcccagctcatcctcctctcagacctcaccagcaagccaaccactgccgcggaagaggcccccagtgacgcaggccgccggcgcccttccagggccaggcgccagtcccgtgcctaagacccctgcaaggaccctgctggccaagcagcacaaaacccagaggagccctgtgcgaattccctttatgcagagaccagcaagacgtgggcccccccctctcgcgcgagctgtacctgagccagggccacgcggaagagcaggaacagaggcaggcccaggtgctcgggggggtagactcggcctggttagggtggcctccgctctctcttcaggaagtgaatcctccgacaggtccgggttccgaagacagcttaccttcataaaagagagcccaggattgcgacgcagaagatcagagctgagcagtgcagagagcgcagctagcgctcctcagggggcctcaccacggaggggtcgtcccgctctccctgctgtgttcctatgctcaagccgatgtgaagagctgcgcgccgcgccaaggcagggacccgctccagctagacaacggccaccagcggcgaggccctcaccaggcgagagacctgcccggaggaccaccagtgagtcccccagtagactgccagttagagccccggccgcccggcctgagactgtcaagcggtacgcctctctgcctcatatcagtgtagctcgaagacctgatggcgccgtaccagctgcccccgcgtcagctgacgctgcccgccgtagtagcgacggggaaccacgccctctgccacgagtcgctgcccctgggacaacttggaggcgcattagggatgaggacgtgcctcacatcttgcggtctactcttcctgccactgcactgccacttcgagggtcaaccccagaggatgcacctgcaggccccccccctcggaaaacttcagacgccgtagtgcagacggaggaagttgccgctcccaagaccaatagtagcacatccccatccctggaaacacgggagcctcccggagcccccgccgggggccagctgtcgctcctggggagcgacgtcgacggacctagcctggctaaggccccaatttctgctccattcgtccacgagggcttgggcgtggcagtaggaggctttcccgcctctcggcacgggtcaccatccaggtctgctcgggtcccgccgtttaattacgtgccctctcctatggtcgtggccgctacaacagactctgccgctgagaaggcacctgctacagcaagcgcaactctgctggagtag

SEQ ID NO: 294806 - DNA, 6090 bp, Artificial Sequence
  derived and/or modified sequence
atggcttcctctgttgccccttacgaacaactcgtgcggcaggtggaagcattaaaagctgaaaattcgcatctccggcaggagcttcgtgataactcctcccatctgtccaaattggaaacagagacatccggaatgaaggaggtcctcaagcatctacaagggaaactcgaacaggaggctagggttctggtgagtagcggccaaacagaggttttggagcaacttaaagctttgcagatggacatcacctcgctgtacaacctaaaattccagcccccaactctggggcctgaaccagccgctcgtacccccgaggggagcccagtgcatggcagcggcccttctaaagactcctttggggagctttcacgagccacaattcgcttactagaggagcttgaccgcgagcggtgctttctcctcaatgagatcgaaaaggaggagaaagaaaagctctggtactatagccagctccaaggcctgtccaaacgcctggatgagctccctcacgttgactatgagatgcacaagatgactcgggatcctcttaacttggccttgcgcagatatgctggaatgacactcaccaatctgacatttggtgacgtagcaaacaaggccaccctctgcgcccgacggggttgtatggaagccatcgtcgcacagctcgcctctgactcggaggagttacatcaggtggtgagcagcatcctgcgcaatctttcctggcgagctgatatcaactcaaagaaggtcttacgcgaggcaggctctgttactgcgttagtccagtgcgtcctgcgcgctaccaaggaaagcaccctgaagtcggtgttgagtgcgctgtggaacctgagcgcccattccactgaaaataaagcggctatttgtcaagtagacggtgcactcgggtttctggtgtcaaccctgacttataaatgccaatcgaacagcctagccatcatcgaatccggaggaggaatcttgcggaatgtatcttcactggtggctacacgagaggattaccgccaggtccttcgcgatcataattgccttcagacactgctacaacacttgacttcgcacagcctgaccatagtaagcaatgcctgtggcacactctggaacctcagtgctaggtccgcccgtgaccaggaactcctatgggatctcggtgccgtggggatgctccggaatctcgtgcattcaaaacacaagatgattgccatggggagcgccgctgcccttaggaacctgctcgcacacaggcctgccaagcaccaggctgccgcaacagccgtgagcccgggttcatgcgtgccctccctgtatgtgcggaaacagcgcgctctggaggccgaactcgatgctcggcaccttgcacaggctttagagcacctcgagaaacaggggcctcctgccgctgaagccgcaaccaagaagcccctgcctcccctgaggcacctcgatgggctcgctcaagactatgcaagcgattccggctgcttcgacgacgatgacgcgcctagctctctggcagccgcagcagctacgggtgagccagcctcaccagcagcgctcagtttgttccttggttccccattcctgcaggggcaggctctggccagaacacctcccaccaggagaggtggtaaagaggccgagaaggacacatccggcgaagccgcagtggcagcaaaggcgaaggctaagctcgctctcgcagtcgctcggatagaccaactggtggaggacatctcagccctgcacaccagttctgatgattcctttagcctgagcagcggtgatcccggacaggaggcaccccgtgaggggagagcccagtcgtgcagtccttgcagaggcccagaagggggtcgtcgcgaggctgggagtcgcgcacatcccctactacggcttaaggccgctcacgcgtctctatccaacgactccctcaacagcgggagcgcctcagatgggtattgcccgcgagaacatatgctcccttgccccttagccgcattagcttccaggagagaggatcccagatgtggccagccgagaccttccagactggatttggatctgcccggttgtcaagccgaacctcctgccagagaggcaacttctgcagatgctcgtgtcaggactatcaagttaagccctacataccagcacgtgccccttctggagggcgctagtagggctggcgctgagcccttagcgggaccagggatatcgcccggtgccaggaagcaagcctggctgcccgctgatcatctgtcaaaagtcccagagaaactggccgcagccccattgtccgtggcgagcaaggcgctccagaaactcgccgctcaggaaggtccactgtcactctcacggtgctcttcactcagtagcctgtcctccgcgggacgccctgggccaagcgaaggtggggatcttgatgactcagactcctccctggaagggctggaagaggccggtcctagcgaggctgaacttgacagcacctggcgcgctcccggtgccacaagcctccccgttgcaattcctgctcctaggcgaaatcggggaaggggactcggggtggaggatgcaacaccatccagttcctccgaaaattacgtgcaagaaacaccactcgttttatctcgctgctcttctgtcagcagcctgggcagcttcgagagtcccagtatcgcgtctagtataccctctgagccatgttctggccagggaagcggtacgatatccccatcagaactgcccgattctccaggacagacaatgccccctagcaggtcaaagacacctccgctggcacccgctccacaggggccaccagaggccactcagttttctctccagtgggagtcatacgtcaaacgttttttagatatcgctgattgcagagagaggtgtaggttgcccagtgagctggatgccggatcagtgagattcaccgtggagaagcccgacgagaatttctcttgcgcctccagcctgtcggccctggccttgcacgagcactacgtgcagcaggacgtcgagctccgcctactgccaagtgcctgtcctgagaggggtgggggagcgggaggcgctggcctacattttgctgggcaccggcgacgcgaggaaggtcccgctcctacgggatcaagaccgagaggggctgctgatcaggaactggagctgttgagggagtgcttgggcgcagccgtgccagcccgtctgcggaaagtggcctccgccttggtgccgggacgtcgcgctctgccagtcccggtttatatgctagtgccagcccctgctcctgcccaggaggacgattcctgtaccgactcagcagaaggaaccccagtcaattttagttctgcagccagtctttctgatgagacgctccaaggaccgcctcgagaccaaccgggtggccctgcgggaaggcagcgcccaacaggcagacccacctcagcgaggcaggccatggggcaccgccataaagcaggaggggcaggacgatcggcagagcagtcgcggggtgccggaaagaacagagctggcctggaactccccctgggacgacccccaagcgcacccgctgacaaggatggctctaagcccggaaggaccagaggggacggcgctttgcaatcattatgtctcaccacaccaactgaggaagccgtctactgcttctacgggaatgacagtgatgaggagcctccagctgccgcacctaccccgacccatcgtaggacgagcgccatacccagagcgttcacccgcgaacggccacagggccgtaaggaagctccagccccaagcaaggccgcaccagctgcccctccacctgctagaacgcagccttccctgatagcagatgaaacccctccttgctatagtctgagttcatctgctagcagtttatctgaaccagaacccagcgagccacccgcagtacatccaagggggcgtgagcccgcagttaccaaggaccctggccctgggggtggacgtgacagcagtcctagccctcgtgcagctgaagaactactgcaaagatgtatctcatctgccctcccgaggcgacgcccacccgtgtctggcttaaggcgcaggaagccgcgagccacaagactagacgagcgtccagccgaaggctctagagaaagaggtgaggaggctgctggaagtgacagagcgagcgatctcgattccgtagagtggcgcgctattcaggaaggcgctaactcaattgtgacctggctgcaccaggccgcagctgccaccagggaagcttccagcgaatcagacagtatcctgtccttcgttagcggactttcggtcggaagcacacttcagcccccaaaacaccgcaagggtagacaggccgaaggtgagatgggcagtgcaaggcgccctgaaaaaagaggcgcagcttccgtgaaaacatccggaagtccgagatccccggctggccctgagaaaccaaggggaacacagaagaccacaccaggcgtgccagcggtgctcagggggcgaacggtgatctacgttcccagtcctgctccacgtgcccagccaaaagggacccccggacctcgggcaacaccacgcaaagtcgcaccaccttgcctggcccagcctgccgctcccgcaaaggttccctccccgggacagcagcggtccagatctcttcacagacccgctaaaacaagcgagttagccactctgtcacagccgccaagatccgccacgccaccggctagactggctaagactccgagttcatcgtccagccagacaagccctgccagtcaaccactcccccgaaaacggcctccagtgacgcaagcagcgggtgcactaccagggcctggcgcaagtcccgtgcctaaaacacccgctcgaactttactggccaaacagcacaaaacacaaagatcacccgtgagaattccctttatgcagcggccagcgaggagaggaccaccccctctggccagggcggtacccgagcccggaccacgtggaagggccggtacggaggctggtccgggagccaggggtggtcgcttgggactggtgagagtcgccagtgcactctcctccggatcagagtcaagcgaccggtcggggttcaggagacagctgacatttatcaaagagtcgccgggtctccggagaagacggagcgaactgtcctccgctgagtctgccgctagtgctccgcagggcgcttcacctaggaggggacggccagcattaccggctgtgtttctttgttcaagtcgttgtgaggagttgcgtgccgcaccaaggcagggtccagctcccgcacgacaacggccacccgcagccaggccaagtcccggtgaacgccctgccagacggacgactagcgaaagtccttcacggctgccagtcagggccccagccgctagacccgagacggtaaaaagatacgcctcacttccccacatcagcgttgcccgtaggcccgatggggcagtccccgcagcccctgcttcagctgacgcagcacggaggagttctgatggagaaccacgtcctttacccagggtcgcagcccctggtaccacctggcgccgaatccgcgacgaagatgtaccacacattctgcggagcacgctgcctgcaactgcgctccctctcagagggagtacacctgaggacgccccagcgggtcccccaccaaggaaaaccagcgacgccgtggttcaaaccgaagaagtcgccgcacccaaaacaaacagctcaaccagtcctagtctcgagacacgcgaacctcctggcgcacccgcaggaggccagctgtctctactcgggagtgatgtcgacgggccttccttagcaaaggcccctatatcagccccattcgtgcatgaaggtctcggcgttgccgttggaggcttccccgcaagccgtcatggcagtccctcccggagtgccagagtgcctccctttaactatgtgccatcacctatggttgtggctgccacaactgatagcgctgccgagaaagcacccgcaactgcctcagccaccctgctcgagtac

SEQ ID NO: 294807 - DNA, 6911 bp, Artificial Sequence
  derived and/or modified sequence
atggcctcatcagtcgccccatacgaacagctggttcggcaggtcgaggccctgaaagcggagaatagtcatttaaggcaggaactccgcgacaatagctctcatctgtctaagcttgagaccgaaacctctggaatgaaagaggtcctaaagcatctgcagggcaaattagagcaggaggcaagggttttggtgagctcaggacaaactgaagtgcttgaacagctgaaggctctgcaaatggatattacttctctgtataacttgaagttccagccgcctaccttaggacctgagcccgcagctcggactccggaaggatcaccggtccatgggtccgggccttccaaagactctttcggcgagttaagcagagccaccatccgacttctcgaggaacttgacagggaacggtgcttcctgctgaacgagatcgaaaaggaagaaaaagagaagctgtggtactatagccaactgcagggcctgagcaaacgcctggacgaacttccgcacgtggaaacgcagtttagcatgcaaatggatttgatacggcaacagctggagtttgaagctcagcacatccggagcctaatggaagagaggttcggcactagcgacgaaatggtccagcgcgctcaaatacgtgcttctcgacttgaacagatcgacaaggaattgctcgaagcccaggacagagtgcagcagaccgagccacaggccttgcttgctgtgaagtctgtgccggtggacgaagatccagaaaccgaggtgccaactcatcccgaggacggtactccccagcctggcaactctaaggtcgaggttgttttttggttgctgtctatgctcgcaactagagaccaggaagataccgcgcgtacactcctggctatgtcatcttcacccgagtcgtgtgtggcaatgagacggtccggctgcctgcccctcctcctacagattctgcacggcaccgaagccgcagccggaggcagggcaggcgctccaggagctcctggtgctaaggatgccagaatgagagctaatgcggcactgcacaatatcgtattctcacaaccagaccaggggctggccagaaaggagatgcgcgttctacatgtgcttgaacagattcgcgcttactgtgagacctgctgggactggctgcaggcaagggatggaggcccagaggggggtggggcagggtcagctccgatccctatcgagccccaaatttgccaggcaacttgtgccgtaatgaagctgtcattcgacgaggagtatcggcgagcaatgaacgagcttggtgggctgcaggctgtggcagaacttctgcaggtggattatgaaatgcataaaatgaccagagaccctctcaacctagccctcagaagatacgccggaatgaccctgaccaacctgacgttcggagacgtggctaacaaggcaacgctctgtgctcgtcgagggtgtatggaggcaattgtagctcagctcgcctcagactctgaggaactgcatcaggtggtgagcagtatcctcagaaatctgagctggcgggctgatatcaattcaaagaaggtgttgagggaggctgggtccgtgaccgctctggtccagtgtgtactgcgggctacaaaggagtccaccctgaaaagtgtgctcagcgctctgtggaacctttctgcacactctactgaaaataaggcagccatctgtcaggtggatggcgcacttggctttctagtctctaccctaacgtacaaatgccagagtaattctctggcaatcattgagtctgggggaggaatccttcggaatgtgtcctcccttgtggctacaagggaagactacaggcaggtgctccgggatcacaactgtctacaaactctccttcagcacctgacgtcccacagtctgacaatcgtctccaatgcgtgtggcaccctctggaacttatccgcccgaagcgccagggaccaggaactcctgtgggatctgggagccgttggcatgttgagaaatttggttcattccaaacacaaaatgattgcaatgggctcagccgctgcactccgcaatctgctggcccacagacccgctaaacatcaggcagcagcgactgccgtttctcccggtagttgcgtcccttcactgtacgtacggaagcaaagggccctcgaagccgagctggatgccaggcacttggcccaggcgcttgagcacctggaaaagcaggggccacccgcagcagaggccgctacgaagaagcccctgccacccctccgacatctcgatggcctggcacaggattacgcctctgattccgggtgcttcgatgatgatgacgccccttcttccttggctgccgctgctgcaacaggcgagcctgcgtcccctgcagccctatctctgttcttagggtccccttttctgcaggggcaggcccttgcccgtacacctccaacacgccgtggaggtaaggaagccgaaaaggatacttccggagaagcagccgtcgcagctaaggctaaagcaaaactagctctggcagtggcacgaattgaccagctggtagaagatatctctgccctgcataccagttccgacgacagcttctctttgtcatccggagatcctggccaggaggcccctcgggagggcagggcacaatcgtgctccccgtgtcggggaccggaaggaggccgacgggaagccggatcacgggcacaccccctgctgagactcaaggcggctcacgcatccctctctaatgactctctaaatagcgggagtgccagtgacggatactgcccacgagagcatatgttgccctgtccactggctgcacttgcatcaagaagggaggatcccagatgcggccagcccaggccatctcgattagaccttgacttacctggatgtcaggcagaacccccagcgagagaggcgaccagcgccgatgccagggtgcgcaccattaaactcagccctacttatcaacacgttccgctgttagaaggagcaagccgcgcaggtgccgaacctctggcaggacccggtatatcacctggggctcgtaagcaggcctggttgccagctgatcatctctcaaaggtaccggaaaagctcgccgcagctccgctgagcgtcgcgagtaaggcgctgcagaagctcgctgcacaggagggccctctcagtttaagccgatgttcatccctgtcatctctcagttctgccggtcgccctgggccatcggaaggaggggacctggacgatagcgactcctcattagagggcttggaggaggccggaccatcggaagcagaacttgacagcacatggcgcgcaccaggcgcaacctccctaccagtcgccattccggcacctaggagaaatcgtgggagggggttgggcgtggaagacgctactccttcttcttcttccgaaaattacgtacaagaaacacctctcgtgctaagcagatgtagttcagtgtcctcactgggttctttcgaatcacccagtatcgcttcaagcataccctccgagccttgttcaggtcagggaagtgggactatcagccccagtgaactccccgattctccaggccagactatgcccccttcaaggtccaagacacctccactcgccccagctccacaagggcctcccgaggccacccaatttagtcttcaatgggagtcttacgtaaagcgatttttggacatcgctgactgccgcgagcgttgtcgcctgcctagcgaattagacgccggaagcgtacgattcacagtggaaaagcccgatgaaaacttttcctgcgctagttccttatctgccctagcattgcacgagcattacgtccagcaggatgtggaactaaggttacttccaagtgcctgtccagaaaggggcggaggagccggaggggctggtctgcatttcgccggacatcggaggcgcgaggagggccctgcacctacgggatctcggccacggggagccgcagaccaggagcttgaactgttgcgagagtgcctgggcgctgcagtgccggctaggctccgcaaagtagccagcgctcttgtgccaggacgtcgggcactaccagttcccgtgtatatgttggtgccagccccagctccagcccaggaggatgactcctgtactgactcggccgagggcactcctgttaatttctcctccgcagcttccctgagcgacgagactttgcagggtcctccgagagaccagcctgggggacccgctggtcgacagcgcccaaccgggaggcccacctcggctcgacaggccatgggccacaggcataaggcaggcggagctggccgatccgcagaacagtcgcgaggcgctgggaaaaatagagcaggactcgaacttccactcggtcggcctccgagtgccccagcagataaggacgggtccaagcccggaagaacgaggggggatggcgctctgcagagcctgtgtttgacgacacctaccgaggaggcagtctactgtttctatggaaacgacagcgacgaggagccacctgccgctgctccgactccaactcatcgccgtacttctgcaatccctcgagcgtttactcgcgagcgaccacagggcagaaaggaggcccctgctcccagcaaggcagctccagctgcgccaccgccagccaggacccaacccagcttgatcgccgatgaaacaccaccttgctactcattatcaagttcggcctcaagcttaagtgaaccggaaccatccgagcctcctgcggtgcacccccgaggccgtgagcctgccgtcactaaggacccaggtcccggagggggaagagactcaagcccctccccacgagctgctgaagagctgcttcagagatgcattagctccgctctgcctagacgaaggcccccagtctcaggactgcgacggaggaaaccaagagcgacaaggttagatgagcggccagccgaggggtcacgcgaaaggggagaggaggctgccggttctgatcgcgctagcgatctcgactcagtggaatggcgtgctatacaagagggcgcaaactctatcgtcacatggctgcaccaggcggctgccgcaacacgggaagctagttctgagagcgatagtattctgtctttcgtgtccggattgagcgtcggaagtacactccagccccctaagcataggaagggcagacaggcagaaggagaaatgggctccgccagacggcctgaaaaaagaggagccgctagtgtgaagactagtggtagtcctcgcagcccagccggtccagaaaagcctcgcggtactcagaaaaccactcccggtgttcctgccgtccttcgaggtcgaactgtgatatatgtgcctagtcctgccccacgggctcaacccaaggggaccccaggcccacgcgcaacgccccgaaaagtggccccaccttgcctcgctcagccagccgcaccggctaaggtaccctcacccggtcagcagcgatcccggtccctgcatcggccagccaagacctcggaactcgcaacgctgagccagccaccccgtagcgctacgcctcccgctcgcctggccaaaactccctcttcctcatcatcccagacctcccccgcaagccagcccttgcctcgcaaacgtcctcccgtgacgcaggcagctggtgccttgcccggaccgggtgctagtcccgtccccaagacccctgcgagaacgctgctggcgaagcagcataaaactcagcgctctccagtcaggatacctttcatgcagcggcctgctagaagagggcctccacccttagctcgcgctgtcccagagcctggacccagaggacgtgctggaaccgaggctgggccaggtgctaggggtggcagacttgggctcgttagagtggccagtgccctcagctcagggtctgaatctagtgatcgtagcggatttaggcgccagcttacatttattaaggaatcaccgggtctcagaaggcggaggtccgagctctcctccgccgaatccgcagcatcagcgcctcagggcgcaagccccaggcgaggaagacctgccctccctgcagtctttctctgtagttcccgatgcgaagagctccgagccgctcccaggcagggtccagcacccgcacggcagagaccccctgcagctagaccgtcacccggagagcgtccagctaggcgaaccacgtctgaatcgccaagcaggctgcctgtgagagcacccgcagcgcgtcctgagacagtaaagagatatgcatccctgccccatatttcggttgcccgacggccagacggagcggtccctgctgccccagcatcggccgatgctgccaggcggtcatcagacggcgaacccagacctcttccgcgagtggcagcgccaggaacgacctggcgcagaattagggacgaggatgttcctcacatccttcgttctacactgcccgctaccgcgctcccactgcgtggaagtacacccgaggatgctcctgcaggccctccacccaggaagacaagcgacgctgtcgtccagactgaggaagtggcagcacccaagacgaatagctctacttcgccttctctggaaactagggagccccctggcgctcctgctggagggcagttatccctgctgggcagtgatgtcgacggaccatctctggccaaggcccctatttcagcacctttcgtacatgaaggcttaggcgtggccgtcgggggatttccagcatcccggcatggctcacccagcagaagcgcaagggtccctcccttcaattacgttccatcacccatggttgtcgcagccactacggactccgcagcggagaaggcccctgcaactgcctccgcgactctactggagta

SEQ ID NO: 294808 - DNA, 6912 bp, Artificial Sequence
  derived and/or modified sequence
atggcatcaagtgtcgccccttatgaacagctggtgcgacaagtcgaagccctgaaggcagaaaactcgcacttaaggcaggaattgcgggataacagttcccatttgtccaagctcgagacagagaccagcggcatgaaggaggtactgaaacacctgcagggcaaactggaacaggaggccagagtactcgtgtcaagcggacagacagaggtcttagaacagctgaaggcactccaaatggatatcacatccctgtataacctaaagttccagcctccaactctgggccctgagcctgccgctcgtactccagagggaagccccgtgcatggatccggcccatcaaaggatagttttggagaactgagtcgcgctactatacggctcctggaggagctggatagagaacgctgctttcttctgaatgagattgaaaaggaggaaaaagaaaagctttggtactactctcagcttcagggcctgagtaaaaggcttgatgagctgccccacgttgagacacagttctcaatgcagatggatctgatccggcagcagttggagtttgaggcgcagcatatcagaagtctcatggaggaacggtttggaacatctgatgagatggtgcagcgggctcagattcgggctagcaggctggaacagattgataaggaactcctagaagcccaggaccgtgtgcagcagaccgaaccccaggccctcctcgccgtgaagtccgttccagttgacgaggatccggagacggaagtgcctacccaccccgaagacggcacacctcagcctggcaatagtaaagttgaggtggtcttctggctgctttcaatgcttgcaaccagggaccaggaggatacagcacgcacactgcttgcgatgagttcctcacccgaatcctgcgtggctatgcgcagaagtggatgtctgccgcttctgctccagatattgcatgggaccgaagctgcagccggtggcagggccggagccccaggggctcccggagccaaagacgccaggatgagggcgaacgcagcccttcacaacatcgttttcagccaacctgatcagggcctggcgagaaaagaaatgagggtattgcatgtccttgagcaaattagagcttactgcgagacttgttgggactggctgcaggcaagggatgggggtcccgaggggggaggagctggaagcgcaccaatccctatagagccccaaatttgccaagccacttgcgctgtcatgaagttgagttttgatgaggaatatcgcagagcaatgaatgaactggggggacttcaggccgtggctgagttgttgcaggtcgactatgaaatgcataaaatgacccgagatcccttgaatctggcactaagacgctatgcagggatgacgctgacaaaccttacatttggcgacgtggcgaataaagctacactctgcgccaggagaggctgcatggaagctattgtggcgcagctggcatctgactcagaagagttgcaccaggtggtaagtagtattttgcgaaacttaagttggcgcgcagatatcaactctaagaaagtgctgcgggaggccggatccgtcaccgctctcgtccagtgcgtgcttcgtgccaccaaggaaagcaccctgaaatccgtgctcagcgctctgtggaatttgtctgcccactcaaccgaaaacaaagcagctatatgtcaggtggacggtgccttaggatttctggtgagcacactgacatacaaatgccagagtaattctctggcgatcatcgaatctggcggaggtatcctgcggaacgtctcttcgctcgtcgccactagggaagactaccggcaggtgctcagggatcacaactgtttgcagactcttcttcagcatctgacatctcatagcctgactatcgtgtctaatgcctgtggaaccctgtggaacctgagtgccaggtcggcacgagaccaagagctgctgtgggatctgggggctgtaggaatgttgagaaatctcgtgcactctaagcacaaaatgatcgcaatggggtccgctgcagcactgcggaatttgttggcacaccgacccgctaagcaccaggctgccgctactgctgtgtcaccagggtcttgtgtgccctccctgtacgtgcgtaaacagcgggcactggaggcggagttagacgcaaggcacttggcgcaggccttggagcacctggagaaacagggaccccctgcagcagaggccgcaaccaagaaacccctcccgcctttacggcatttagatgggctggcccaggactacgcttcagattctggatgcttcgatgatgatgatgcaccaagctctctcgcggcagccgcagcaacgggcgagcccgcttccccggcagctctgagtctgttcctgggatcacccttcctccagggtcaggccttggcacgtacccctcccacgagaagaggcggaaaagaggcagagaaagatacctctggcgaggccgcagtagcagcgaaagcgaaggcaaagctggctctggctgtcgccagaattgaccagttggtggaggatataagtgctctccatactagttctgatgattctttcagcctgtcctccggggatcccggtcaggaagcgccaagggagggacgtgcccagtcttgttccccatgcagaggccctgagggcggaaggcgagaagctggatcaagagcccacccgctcttacgcctgaaagccgcacacgcaagcctttctaatgacagtttgaacagtggatcggcttctgacggctactgtccacgggaacacatgctgccctgtcccctggcagcactcgcatcgcggagggaagacccccgatgtggccagccacgaccatccagactggacctagacttgccagggtgtcaggctgagccccctgcaagggaggccacaagcgccgatgctagagtgaggactatcaaacttagcccaacgtatcaacacgtgccgctcctagagggggcaagtagggctggcgcagaacccctggcaggccctgggattagtcctggggctaggaagcaggcatggcttcctgctgaccatctcagtaaggtcccagagaagcttgccgcagctccattgagtgtcgcgtcaaaggccctgcaaaagttggcagcccaggaaggtcctctctccctgtctagatgcagttctctttcatccctgagtagtgctggcaggcccggacccagtgaagggggagatctcgacgactctgattcttcccttgaaggcctggaagaggctggcccttcagaagctgagctcgactcaacttggcgcgctcccggagccaccagcctccctgttgccatccctgctcctcgaagaaaccggggaagaggactcggagtggaagacgcgactccttccagttcttcggagaattacgttcaggaaacacccctcgtgctttctagatgctctagcgtcagcagtttggggtcttttgaatctcctagtattgcaagctcgatccctagcgagccttgttctggacaaggctcgggaacaatcagtccttctgagctgcccgactcacctggccaaacaatgccaccaagcaggtccaaaactcccccactggcgcctgccccacaaggtcccccagaagcaacacagttcagcctccaatgggaatcatatgttaagcggttcttggacatcgctgactgcagggagaggtgtcgcctgcccagcgagcttgacgctgggtcagttagatttaccgtggaaaaaccagatgaaaacttctcgtgtgcctcaagcttgagtgcccttgccctgcatgagcactacgtccagcaggacgttgagctgaggctgctgccctccgcttgccccgagagaggcggaggtgccggaggggctggccttcacttcgccggtcaccgcaggagggaagagggcccagccccaaccggatcccgcccacgcggtgctgccgaccaggagctggagctactccgggagtgtctgggagccgctgtgccagcacggctgcgcaaagtggcctcagccttggtgccaggcagaagagcgctgcccgtacctgtttatatgcttgtgccagcccctgctcccgcacaggaggacgattcttgtacagattcagcagaggggaccccagtgaatttttcaagtgcagcttccctgtctgatgagactctgcagggaccacctagggatcagccagggggtccagcgggtaggcagcgacccacaggaaggcctacctctgcacggcaggccatgggccaccggcataaggccggaggagccggtagatccgccgaacaatccaggggcgcaggaaagaaccgagcaggactggagctgcccttagggagacctccatcagccccagccgacaaggacggcagcaagccaggtaggaccagaggcgacggagccctgcagtccctatgcttgacgacacccaccgaagaggccgtgtactgcttttacggaaacgacagcgatgaagaaccccctgccgcagctccaacacctacgcatagaaggacctccgccattccacgcgcatttacaagagagcgtccacagggtaggaaggaagcccctgcaccatccaaagctgcaccagccgcacctccacctgcccgtactcagccgtcacttatagctgatgaaactcccccatgttacagtctttccagcagcgcttccagcctgtccgaaccagagccctcggagcctcctgccgtccatccaaggggtcgggagcccgcagttaccaaagatcccggacctggcggagggagggacagctctccgagtcctcgtgcagctgaggaactgctgcagaggtgtattagtagcgctctgcctcggcgtagaccacccgtctccggcctcaggcggagaaagcctagagcaacaagactcgatgaaagacccgctgaggggtcacgagagagaggcgaggaggctgctggcagtgaccgagcctcagatctggacagcgtggaatggagggcaatacaggaaggcgctaacagcatcgtcacatggctgcatcaggcagccgctgccacacgcgaggcatcttccgaaagcgattccatcttgagctttgtcagtgggctgagtgttggctccacgctgcagcctccgaaacacagaaaaggcagacaggcagaaggtgagatgggctccgcgcgtcggcctgaaaagcggggagccgcttcagtgaaaacctctgggagccccaggagtcctgccggtcctgaaaagcccaggggcacccagaaaaccacacctggcgtgcctgctgtgctccgcggtcgcacagtgatctatgttccttcgcctgcacccagggcacagccgaaaggaactcctgggcctcgtgccaccccacgtaaggttgcccctccgtgtctggctcagcccgcagccccagctaaagtccctagcccaggccaacagcggtcccgatccctccatcggcctgcaaagacatcagagctggctaccttgtctcagccccctcgatccgcaaccccccctgccagactggctaaaacaccttcctcatccagctcccaaacatctcctgcctcacaacctctgccgcgaaaacgccctcccgtcacgcaggcggctggggctcttcctggaccaggggcttctcccgttcctaagacccctgccagaaccttgctagcaaaacagcacaagacccagcgcagtcccgtcaggataccatttatgcagcgtcccgcaaggagaggtccaccaccccttgcaagagccgtgcccgagccaggaccgagaggaagagccggtacagaggcaggaccaggagccaggggcggtcgcctagggcttgtgcgcgtggcaagtgctctgtcatccggtagcgagagttccgatcgtagtgggttccgcagacaactgacctttatcaaggagtcaccagggcttcggagacgacgcagcgaactgagttctgccgagagcgcagcctctgcgcctcagggagcctcccctcgaaggggtcgccctgccctacccgcagtcttcctgtgcagctccagatgcgaggagctgcgtgccgcaccccgtcaggggcctgccccagctcgccagaggcccccagcagcacgaccatcccctggggaaaggcctgcacgccgtaccacttccgaaagtcctagtagactcccagtcagagcacccgcagcaagaccagaaactgtaaagaggtatgcttcactgccccacatttccgttgcaagaaggcctgatggtgctgtgcccgctgctccggcttcggccgacgctgcacggaggagctcggatggcgaacctcgtcctctccctcgcgtagcggcaccagggaccacatggaggcggatccgcgacgaggatgtcccccatatcctccgtagtacacttcccgctacagcgctccccctgcgaggttccacaccagaggacgcacccgctggccctcccccaagaaagactagtgacgccgtcgtgcagaccgaggaagtggccgcacctaaaaccaatagctccacaagtccctcacttgaaacgcgggaacctccaggcgcacccgcagggggtcagcttagccttctcggtagcgacgtggacggccctagtctcgccaaggcccctatcagtgctccctttgtgcacgaaggcttaggtgtcgcagtgggtgggttccccgcttctcggcacggttcacctagtaggtccgctcgggtgccccctttcaattatgtgccatcacctatggtagtagcagctacgacagactccgccgcagaaaaggctccagcaacggcttccgccaccttgttggagtac

SEQ ID NO: 294809 - DNA, 6090 bp, Artificial Sequence
  derived and/or modified sequence
atggccagcagcgtggccccctacgagcagctggtgagacaggtggaggccctgaaggccgagaacagccacctgagacaggagctgagagacaacagcagccacctgagcaagctggagaccgagaccagcggcatgaaggaggtgctgaagcacctgcagggcaagctggagcaggaggccagagtgctggtgagcagcggccagaccgaggtgctggagcagctgaaggccctgcagatggacatcaccagcctgtacaacctgaagttccagccccccaccctgggccccgagcccgccgccagaacccccgagggcagccccgtgcacggcagcggccccagcaaggacagcttcggcgagctgagcagagccaccatcagactgctggaggagctggacagagagagatgcttcctgctgaacgagatcgagaaggaggagaaggagaagctgtggtactacagccagctgcagggcctgagcaagagactggacgagctgccccacgtggactacgagatgcacaagatgaccagagaccccctgaacctggccctgagaagatacgccggcatgaccctgaccaacctgaccttcggcgacgtggccaacaaggccaccctgtgcgccagaagaggctgcatggaggccatcgtggcccagctggccagcgacagcgaggagctgcaccaggtggtgagcagcatcctgagaaacctgagctggagagccgacatcaacagcaagaaggtgctgagagaggccggcagcgtgaccgccctggtgcagtgcgtgctgagagccaccaaggagagcaccctgaagagcgtgctgagcgccctgtggaacctgagcgcccacagcaccgagaacaaggccgccatctgccaggtggacggcgccctgggcttcctggtgagcaccctgacctacaagtgccagagcaacagcctggccatcatcgagagcggcggcggcatcctgagaaacgtgagcagcctggtggccaccagagaggactacagacaggtgctgagagaccacaactgcctgcagaccctgctgcagcacctgaccagccacagcctgaccatcgtgagcaacgcctgcggcaccctgtggaacctgagcgccagaagcgccagagaccaggagctgctgtgggacctgggcgccgtgggcatgctgagaaacctggtgcacagcaagcacaagatgatcgccatgggcagcgccgccgccctgagaaacctgctggcccacagacccgccaagcaccaggccgccgccaccgccgtgagccccggcagctgcgtgcccagcctgtacgtgagaaagcagagagccctggaggccgagctggacgccagacacctggcccaggccctggagcacctggagaagcagggcccccccgccgccgaggccgccaccaagaagcccctgccccccctgagacacctggacggcctggcccaggactacgccagcgacagcggctgcttcgacgacgacgacgcccccagcagcctggccgccgccgccgccaccggcgagcccgccagccccgccgccctgagcctgttcctgggcagccccttcctgcagggccaggccctggccagaaccccccccaccagaagaggcggcaaggaggccgagaaggacaccagcggcgaggccgccgtggccgccaaggccaaggccaagctggccctggccgtggccagaatcgaccagctggtggaggacatcagcgccctgcacaccagcagcgacgacagcttcagcctgagcagcggcgaccccggccaggaggcccccagagagggcagagcccagagctgcagcccctgcagaggccccgagggcggcagaagagaggccggcagcagagcccaccccctgctgagactgaaggccgcccacgccagcctgagcaacgacagcctgaacagcggcagcgccagcgacggctactgccccagagagcacatgctgccctgccccctggccgccctggccagcagaagagaggaccccagatgcggccagcccagacccagcagactggacctggacctgcccggctgccaggccgagccccccgccagagaggccaccagcgccgacgccagagtgagaaccatcaagctgagccccacctaccagcacgtgcccctgctggagggcgccagcagagccggcgccgagcccctggccggccccggcatcagccccggcgccagaaagcaggcctggctgcccgccgaccacctgagcaaggtgcccgagaagctggccgccgcccccctgagcgtggccagcaaggccctgcagaagctggccgcccaggagggccccctgagcctgagcagatgcagcagcctgagcagcctgagcagcgccggcagacccggccccagcgagggcggcgacctggacgacagcgacagcagcctggagggcctggaggaggccggccccagcgaggccgagctggacagcacctggagagcccccggcgccaccagcctgcccgtggccatccccgcccccagaagaaacagaggcagaggcctgggcgtggaggacgccacccccagcagcagcagcgagaactacgtgcaggagacccccctggtgctgagcagatgcagcagcgtgagcagcctgggcagcttcgagagccccagcatcgccagcagcatccccagcgagccctgcagcggccagggcagcggcaccatcagccccagcgagctgcccgacagccccggccagaccatgccccccagcagaagcaagaccccccccctggcccccgccccccagggcccccccgaggccacccagttcagcctgcagtgggagagctacgtgaagagattcctggacatcgccgactgcagagagagatgcagactgcccagcgagctggacgccggcagcgtgagattcaccgtggagaagcccgacgagaacttcagctgcgccagcagcctgagcgccctggccctgcacgagcactacgtgcagcaggacgtggagctgagactgctgcccagcgcctgccccgagagaggcggcggcgccggcggcgccggcctgcacttcgccggccacagaagaagagaggagggccccgcccccaccggcagcagacccagaggcgccgccgaccaggagctggagctgctgagagagtgcctgggcgccgccgtgcccgccagactgagaaaggtggccagcgccctggtgcccggcagaagagccctgcccgtgcccgtgtacatgctggtgcccgcccccgcccccgcccaggaggacgacagctgcaccgacagcgccgagggcacccccgtgaacttcagcagcgccgccagcctgagcgacgagaccctgcagggcccccccagagaccagcccggcggccccgccggcagacagagacccaccggcagacccaccagcgccagacaggccatgggccacagacacaaggccggcggcgccggcagaagcgccgagcagagcagaggcgccggcaagaacagagccggcctggagctgcccctgggcagaccccccagcgcccccgccgacaaggacggcagcaagcccggcagaaccagaggcgacggcgccctgcagagcctgtgcctgaccacccccaccgaggaggccgtgtactgcttctacggcaacgacagcgacgaggagccccccgccgccgcccccacccccacccacagaagaaccagcgccatccccagagccttcaccagagagagaccccagggcagaaaggaggcccccgcccccagcaaggccgcccccgccgcccccccccccgccagaacccagcccagcctgatcgccgacgagacccccccctgctacagcctgagcagcagcgccagcagcctgagcgagcccgagcccagcgagccccccgccgtgcaccccagaggcagagagcccgccgtgaccaaggaccccggccccggcggcggcagagacagcagccccagccccagagccgccgaggagctgctgcagagatgcatcagcagcgccctgcccagaagaagaccccccgtgagcggcctgagaagaagaaagcccagagccaccagactggacgagagacccgccgagggcagcagagagagaggcgaggaggccgccggcagcgacagagccagcgacctggacagcgtggagtggagagccatccaggagggcgccaacagcatcgtgacctggctgcaccaggccgccgccgccaccagagaggccagcagcgagagcgacagcatcctgagcttcgtgagcggcctgagcgtgggcagcaccctgcagccccccaagcacagaaagggcagacaggccgagggcgagatgggcagcgccagaagacccgagaagagaggcgccgccagcgtgaagaccagcggcagccccagaagccccgccggccccgagaagcccagaggcacccagaagaccacccccggcgtgcccgccgtgctgagaggcagaaccgtgatctacgtgcccagccccgcccccagagcccagcccaagggcacccccggccccagagccacccccagaaaggtggcccccccctgcctggcccagcccgccgcccccgccaaggtgcccagccccggccagcagagaagcagaagcctgcacagacccgccaagaccagcgagctggccaccctgagccagccccccagaagcgccaccccccccgccagactggccaagacccccagcagcagcagcagccagaccagccccgccagccagcccctgcccagaaagagaccccccgtgacccaggccgccggcgccctgcccggccccggcgccagccccgtgcccaagacccccgccagaaccctgctggccaagcagcacaagacccagagaagccccgtgagaatccccttcatgcagagacccgccagaagaggccccccccccctggccagagccgtgcccgagcccggccccagaggcagagccggcaccgaggccggccccggcgccagaggcggcagactgggcctggtgagagtggccagcgccctgagcagcggcagcgagagcagcgacagaagcggcttcagaagacagctgaccttcatcaaggagagccccggcctgagaagaagaagaagcgagctgagcagcgccgagagcgccgccagcgccccccagggcgccagccccagaagaggcagacccgccctgcccgccgtgttcctgtgcagcagcagatgcgaggagctgagagccgcccccagacagggccccgcccccgccagacagagaccccccgccgccagacccagccccggcgagagacccgccagaagaaccaccagcgagagccccagcagactgcccgtgagagcccccgccgccagacccgagaccgtgaagagatacgccagcctgccccacatcagcgtggccagaagacccgacggcgccgtgcccgccgcccccgccagcgccgacgccgccagaagaagcagcgacggcgagcccagacccctgcccagagtggccgcccccggcaccacctggagaagaatcagagacgaggacgtgccccacatcctgagaagcaccctgcccgccaccgccctgcccctgagaggcagcacccccgaggacgcccccgccggccccccccccagaaagaccagcgacgccgtggtgcagaccgaggaggtggccgcccccaagaccaacagcagcaccagccccagcctggagaccagagagccccccggcgcccccgccggcggccagctgagcctgctgggcagcgacgtggacggccccagcctggccaaggcccccatcagcgcccccttcgtgcacgagggcctgggcgtggccgtgggcggcttccccgccagcagacacggcagccccagcagaagcgccagagtgccccccttcaactacgtgcccagccccatggtggtggccgccaccaccgacagcgccgccgagaaggcccccgccaccgccagcgccaccctgctggagtag

SEQ ID NO: 294810 - DNA, 6912 bp, Artificial Sequence
  derived and/or modified sequence
atggccagcagcgtggccccctacgagcagctggtgagacaggtggaggccctgaaggccgagaacagccacctgagacaggagctgagagacaacagcagccacctgagcaagctggagaccgagaccagcggcatgaaggaggtgctgaagcacctgcagggcaagctggagcaggaggccagagtgctggtgagcagcggccagaccgaggtgctggagcagctgaaggccctgcagatggacatcaccagcctgtacaacctgaagttccagccccccaccctgggccccgagcccgccgccagaacccccgagggcagccccgtgcacggcagcggccccagcaaggacagcttcggcgagctgagcagagccaccatcagactgctggaggagctggacagagagagatgcttcctgctgaacgagatcgagaaggaggagaaggagaagctgtggtactacagccagctgcagggcctgagcaagagactggacgagctgccccacgtggagacccagttcagcatgcagatggacctgatcagacagcagctggagttcgaggcccagcacatcagaagcctgatggaggagagattcggcaccagcgacgagatggtgcagagagcccagatcagagccagcagactggagcagatcgacaaggagctgctggaggcccaggacagagtgcagcagaccgagccccaggccctgctggccgtgaagagcgtgcccgtggacgaggaccccgagaccgaggtgcccacccaccccgaggacggcaccccccagcccggcaacagcaaggtggaggtggtgttctggctgctgagcatgctggccaccagagaccaggaggacaccgccagaaccctgctggccatgagcagcagccccgagagctgcgtggccatgagaagaagcggctgcctgcccctgctgctgcagatcctgcacggcaccgaggccgccgccggcggcagagccggcgcccccggcgcccccggcgccaaggacgccagaatgagagccaacgccgccctgcacaacatcgtgttcagccagcccgaccagggcctggccagaaaggagatgagagtgctgcacgtgctggagcagatcagagcctactgcgagacctgctgggactggctgcaggccagagacggcggccccgagggcggcggcgccggcagcgcccccatccccatcgagccccagatctgccaggccacctgcgccgtgatgaagctgagcttcgacgaggagtacagaagagccatgaacgagctgggcggcctgcaggccgtggccgagctgctgcaggtggactacgagatgcacaagatgaccagagaccccctgaacctggccctgagaagatacgccggcatgaccctgaccaacctgaccttcggcgacgtggccaacaaggccaccctgtgcgccagaagaggctgcatggaggccatcgtggcccagctggccagcgacagcgaggagctgcaccaggtggtgagcagcatcctgagaaacctgagctggagagccgacatcaacagcaagaaggtgctgagagaggccggcagcgtgaccgccctggtgcagtgcgtgctgagagccaccaaggagagcaccctgaagagcgtgctgagcgccctgtggaacctgagcgcccacagcaccgagaacaaggccgccatctgccaggtggacggcgccctgggcttcctggtgagcaccctgacctacaagtgccagagcaacagcctggccatcatcgagagcggcggcggcatcctgagaaacgtgagcagcctggtggccaccagagaggactacagacaggtgctgagagaccacaactgcctgcagaccctgctgcagcacctgaccagccacagcctgaccatcgtgagcaacgcctgcggcaccctgtggaacctgagcgccagaagcgccagagaccaggagctgctgtgggacctgggcgccgtgggcatgctgagaaacctggtgcacagcaagcacaagatgatcgccatgggcagcgccgccgccctgagaaacctgctggcccacagacccgccaagcaccaggccgccgccaccgccgtgagccccggcagctgcgtgcccagcctgtacgtgagaaagcagagagccctggaggccgagctggacgccagacacctggcccaggccctggagcacctggagaagcagggcccccccgccgccgaggccgccaccaagaagcccctgccccccctgagacacctggacggcctggcccaggactacgccagcgacagcggctgcttcgacgacgacgacgcccccagcagcctggccgccgccgccgccaccggcgagcccgccagccccgccgccctgagcctgttcctgggcagccccttcctgcagggccaggccctggccagaaccccccccaccagaagaggcggcaaggaggccgagaaggacaccagcggcgaggccgccgtggccgccaaggccaaggccaagctggccctggccgtggccagaatcgaccagctggtggaggacatcagcgccctgcacaccagcagcgacgacagcttcagcctgagcagcggcgaccccggccaggaggcccccagagagggcagagcccagagctgcagcccctgcagaggccccgagggcggcagaagagaggccggcagcagagcccaccccctgctgagactgaaggccgcccacgccagcctgagcaacgacagcctgaacagcggcagcgccagcgacggctactgccccagagagcacatgctgccctgccccctggccgccctggccagcagaagagaggaccccagatgcggccagcccagacccagcagactggacctggacctgcccggctgccaggccgagccccccgccagagaggccaccagcgccgacgccagagtgagaaccatcaagctgagccccacctaccagcacgtgcccctgctggagggcgccagcagagccggcgccgagcccctggccggccccggcatcagccccggcgccagaaagcaggcctggctgcccgccgaccacctgagcaaggtgcccgagaagctggccgccgcccccctgagcgtggccagcaaggccctgcagaagctggccgcccaggagggccccctgagcctgagcagatgcagcagcctgagcagcctgagcagcgccggcagacccggccccagcgagggcggcgacctggacgacagcgacagcagcctggagggcctggaggaggccggccccagcgaggccgagctggacagcacctggagagcccccggcgccaccagcctgcccgtggccatccccgcccccagaagaaacagaggcagaggcctgggcgtggaggacgccacccccagcagcagcagcgagaactacgtgcaggagacccccctggtgctgagcagatgcagcagcgtgagcagcctgggcagcttcgagagccccagcatcgccagcagcatccccagcgagccctgcagcggccagggcagcggcaccatcagccccagcgagctgcccgacagccccggccagaccatgccccccagcagaagcaagaccccccccctggcccccgccccccagggcccccccgaggccacccagttcagcctgcagtgggagagctacgtgaagagattcctggacatcgccgactgcagagagagatgcagactgcccagcgagctggacgccggcagcgtgagattcaccgtggagaagcccgacgagaacttcagctgcgccagcagcctgagcgccctggccctgcacgagcactacgtgcagcaggacgtggagctgagactgctgcccagcgcctgccccgagagaggcggcggcgccggcggcgccggcctgcacttcgccggccacagaagaagagaggagggccccgcccccaccggcagcagacccagaggcgccgccgaccaggagctggagctgctgagagagtgcctgggcgccgccgtgcccgccagactgagaaaggtggccagcgccctggtgcccggcagaagagccctgcccgtgcccgtgtacatgctggtgcccgcccccgcccccgcccaggaggacgacagctgcaccgacagcgccgagggcacccccgtgaacttcagcagcgccgccagcctgagcgacgagaccctgcagggcccccccagagaccagcccggcggccccgccggcagacagagacccaccggcagacccaccagcgccagacaggccatgggccacagacacaaggccggcggcgccggcagaagcgccgagcagagcagaggcgccggcaagaacagagccggcctggagctgcccctgggcagaccccccagcgcccccgccgacaaggacggcagcaagcccggcagaaccagaggcgacggcgccctgcagagcctgtgcctgaccacccccaccgaggaggccgtgtactgcttctacggcaacgacagcgacgaggagccccccgccgccgcccccacccccacccacagaagaaccagcgccatccccagagccttcaccagagagagaccccagggcagaaaggaggcccccgcccccagcaaggccgcccccgccgcccccccccccgccagaacccagcccagcctgatcgccgacgagacccccccctgctacagcctgagcagcagcgccagcagcctgagcgagcccgagcccagcgagccccccgccgtgcaccccagaggcagagagcccgccgtgaccaaggaccccggccccggcggcggcagagacagcagccccagccccagagccgccgaggagctgctgcagagatgcatcagcagcgccctgcccagaagaagaccccccgtgagcggcctgagaagaagaaagcccagagccaccagactggacgagagacccgccgagggcagcagagagagaggcgaggaggccgccggcagcgacagagccagcgacctggacagcgtggagtggagagccatccaggagggcgccaacagcatcgtgacctggctgcaccaggccgccgccgccaccagagaggccagcagcgagagcgacagcatcctgagcttcgtgagcggcctgagcgtgggcagcaccctgcagccccccaagcacagaaagggcagacaggccgagggcgagatgggcagcgccagaagacccgagaagagaggcgccgccagcgtgaagaccagcggcagccccagaagccccgccggccccgagaagcccagaggcacccagaagaccacccccggcgtgcccgccgtgctgagaggcagaaccgtgatctacgtgcccagccccgcccccagagcccagcccaagggcacccccggccccagagccacccccagaaaggtggcccccccctgcctggcccagcccgccgcccccgccaaggtgcccagccccggccagcagagaagcagaagcctgcacagacccgccaagaccagcgagctggccaccctgagccagccccccagaagcgccaccccccccgccagactggccaagacccccagcagcagcagcagccagaccagccccgccagccagcccctgcccagaaagagaccccccgtgacccaggccgccggcgccctgcccggccccggcgccagccccgtgcccaagacccccgccagaaccctgctggccaagcagcacaagacccagagaagccccgtgagaatccccttcatgcagagacccgccagaagaggccccccccccctggccagagccgtgcccgagcccggccccagaggcagagccggcaccgaggccggccccggcgccagaggcggcagactgggcctggtgagagtggccagcgccctgagcagcggcagcgagagcagcgacagaagcggcttcagaagacagctgaccttcatcaaggagagccccggcctgagaagaagaagaagcgagctgagcagcgccgagagcgccgccagcgccccccagggcgccagccccagaagaggcagacccgccctgcccgccgtgttcctgtgcagcagcagatgcgaggagctgagagccgcccccagacagggccccgcccccgccagacagagaccccccgccgccagacccagccccggcgagagacccgccagaagaaccaccagcgagagccccagcagactgcccgtgagagcccccgccgccagacccgagaccgtgaagagatacgccagcctgccccacatcagcgtggccagaagacccgacggcgccgtgcccgccgcccccgccagcgccgacgccgccagaagaagcagcgacggcgagcccagacccctgcccagagtggccgcccccggcaccacctggagaagaatcagagacgaggacgtgccccacatcctgagaagcaccctgcccgccaccgccctgcccctgagaggcagcacccccgaggacgcccccgccggccccccccccagaaagaccagcgacgccgtggtgcagaccgaggaggtggccgcccccaagaccaacagcagcaccagccccagcctggagaccagagagccccccggcgcccccgccggcggccagctgagcctgctgggcagcgacgtggacggccccagcctggccaaggcccccatcagcgcccccttcgtgcacgagggcctgggcgtggccgtgggcggcttccccgccagcagacacggcagccccagcagaagcgccagagtgccccccttcaactacgtgcccagccccatggtggtggccgccaccaccgacagcgccgccgagaaggcccccgccaccgccagcgccaccctgctggagtag

SEQ ID NO: 294811 - protein, 2029 aa, Artificial Sequence
  derived and/or modified sequence
MASSVAPYEQLVRQVEALKAENSHLRQELRDNSSHLSKLETETSGMKEVLKHLQGKLEQEARVLVSSGQTEVLEQLKALQMDITSLYNLKFQPPTLGPEPAARTPEGSPVHGSGPSKDSFGELSRATIRLLEELDRERCFLLNEIEKEEKEKLWYYSQLQGLSKRLDELPHVDYEMHKMTRDPLNLALRRYAGMTLTNLTFGDVANKATLCARRGCMEAIVAQLASDSEELHQVVSSILRNLSWRADINSKKVLREAGSVTALVQCVLRATKESTLKSVLSALWNLSAHSTENKAAICQVDGALGFLVSTLTYKCQSNSLAIIESGGGILRNVSSLVATREDYRQVLRDHNCLQTLLQHLTSHSLTIVSNACGTLWNLSARSARDQELLWDLGAVGMLRNLVHSKHKMIAMGSAAALRNLLAHRPAKHQAAATAVSPGSCVPSLYVRKQRALEAELDARHLAQALEHLEKQGPPAAEAATKKPLPPLRHLDGLAQDYASDSGCFDDDDAPSSLAAAAATGEPASPAALSLFLGSPFLQGQALARTPPTRRGGKEAEKDTSGEAAVAAKAKAKLALAVARIDQLVEDISALHTSSDDSFSLSSGDPGQEAPREGRAQSCSPCRGPEGGRREAGSRAHPLLRLKAAHASLSNDSLNSGSASDGYCPREHMLPCPLAALASRREDPRCGQPRPSRLDLDLPGCQAEPPAREATSADARVRTIKLSPTYQHVPLLEGASRAGAEPLAGPGISPGARKQAWLPADHLSKVPEKLAAAPLSVASKALQKLAAQEGPLSLSRCSSLSSLSSAGRPGPSEGGDLDDSDSSLEGLEEAGPSEAELDSTWRAPGATSLPVAIPAPRRNRGRGLGVEDATPSSSSENYVQETPLVLSRCSSVSSLGSFESPSIASSIPSEPCSGQGSGTISPSELPDSPGQTMPPSRSKTPPLAPAPQGPPEATQFSLQWESYVKRFLDIADCRERCRLPSELDAGSVRFTVEKPDENFSCASSLSALALHEHYVQQDVELRLLPSACPERGGGAGGAGLHFAGHRRREEGPAPTGSRPRGAADQELELLRECLGAAVPARLRKVASALVPGRRALPVPVYMLVPAPAPAQEDDSCTDSAEGTPVNFSSAASLSDETLQGPPRDQPGGPAGRQRPTGRPTSARQAMGHRHKAGGAGRSAEQSRGAGKNRAGLELPLGRPPSAPADKDGSKPGRTRGDGALQSLCLTTPTEEAVYCFYGNDSDEEPPAAAPTPTHRRTSAIPRAFTRERPQGRKEAPAPSKAAPAAPPPARTQPSLIADETPPCYSLSSSASSLSEPEPSEPPAVHPRGREPAVTKDPGPGGGRDSSPSPRAAEELLQRCISSALPRRRPPVSGLRRRKPRATRLDERPAEGSRERGEEAAGSDRASDLDSVEWRAIQEGANSIVTWLHQAAAATREASSESDSILSFVSGLSVGSTLQPPKHRKGRQAEGEMGSARRPEKRGAASVKTSGSPRSPAGPEKPRGTQKTTPGVPAVLRGRTVIYVPSPAPRAQPKGTPGPRATPRKVAPPCLAQPAAPAKVPSPGQQRSRSLHRPAKTSELATLSQPPRSATPPARLAKTPSSSSSQTSPASQPLPRKRPPVTQAAGALPGPGASPVPKTPARTLLAKQHKTQRSPVRIPFMQRPARRGPPPLARAVPEPGPRGRAGTEAGPGARGGRLGLVRVASALSSGSESSDRSGFRRQLTFIKESPGLRRRRSELSSAESAASAPQGASPRRGRPALPAVFLCSSRCEELRAAPRQGPAPARQRPPAARPSPGERPARRTTSESPSRLPVRAPAARPETVKRYASLPHISVARRPDGAVPAAPASADAARRSSDGEPRPLPRVAAPGTTWRRIRDEDVPHILRSTLPATALPLRGSTPEDAPAGPPPRKTSDAVVQTEEVAAPKTNSSTSPSLETREPPGAPAGGQLSLLGSDVDGPSLAKAPISAPFVHEGLGVAVGGFPASRHGSPSRSARVPPFNYVPSPMVVAATTDSAAEKAPATASATLLE

SEQ ID NO: 294812 - DNA, 616 bp, Artificial Sequence
  derived and/or modified sequence
gaaacaggggcacacgaaggttaagcaacctgctcaaggtcacccagctctcctgctctgaaccacatcctttgctaagaacttcatgggcagtatcccatccaaaccttgcaacaacccagaagggcctcttcttcagggaatggaagcagccgactggaccgggattggagtgtgtctcccacctgggggcgccagagggcacatatactgctgtactcgtttgtgccaccagagggcagcctccgcacatcgatctctactgcttccgagaactgtccaaaccggcgggactgagagagagaaacctggtccagggcagagaaagagaggagcccactgcagtgcgtgcaagcgatcttccacgcgtccatcctgaatgtgttaaaagcagcagttaaagagggagggctctggagttggactgtttgcgtttgaacccagactctgggcaaaagctgctgaacctctctgaatctaatagcctcatctgtgaattggaaggatactagcgaggattaaatgagagtgcataggaagggcctagccccggtgcccagcacagaggctccatatgtgtcaccgttgtcaatttctgactcatgtattcatctat

SEQ ID NO: 294813 - protein, 256 aa, Artificial Sequence
  derived and/or modified sequence
MSDSKEPRVQQLGLLVSKVPSSLSQEQSEQDAIYQNLTQLKAAVGELSEKSKLQEIYQELTQLKAAVGELPEKSKLQEIYQELTRLKAAVGELPEKSKLQEIYQELTRLKAAVGELPEKSKLQEIYQELTRLKAAVGELPEKSKLQEIYQELTELKAAVGELPEKSKLQEIYQELTQLKAAVGELPDQSKQQQIYQELTDLKTAFERLCRHCPKDWTFFQGNCYFMSNSQRNWHDSVTACQEVRAQLVVIKTAEEQ

SEQ ID NO: 294814 - DNA, 771 bp, Artificial Sequence
  derived and/or modified sequence
atgagcgactccaaagaaccaagggtccaacagttaggccttttagtctccaaagtgccaagtagtttatcccaagagcagtcagagcaagacgctatttatcaaaatttgactcagctaaaggccgctgttggagagctcagtgaaaagtcgaagctgcaagagatctaccaggagcttacacagctgaaggcggctgtcggtgagctgcccgagaaatctaagctccaggagatctaccaggaactgacacgcctgaaggccgctgtcggcgagctacccgagaagagtaaactgcaggaaatataccaggagctgactcgccttaaagctgccgtgggggagttacccgaaaaatccaaactgcaagagatttatcaggagctcacacggctgaaggccgctgtcggcgaactgcccgagaagagtaagctccaggaaatctatcaggagctgaccgaactgaaggcggccgtcggcgagctgccggagaagtccaaattgcaggagatataccaagagcttacacagctgaaggccgctgtgggcgaattgccggaccagagcaagcagcagcagatttaccaggagttgaccgacctgaagacggccttcgagagactgtgtagacactgcccaaaggactggaccttcttccagggcaactgttacttcatgtctaattcacagagaaactggcatgattccgttactgcatgccaagaggtgagggcgcagctagtggttatcaaaacagccgaggaacaatag

SEQ ID NO: 294815 - DNA, 771 bp, Artificial Sequence
  derived and/or modified sequence
atgtctgacagcaaggagccccgggtgcagcagctgggcctgctggtgtccaaggtgcccagcagcctgagccaggagcagagcgagcaggatgccatctaccagaacctgacccagctgaaggctgctgtgggggagctgtctgagaagagcaagctgcaggagatctaccaggagctgacccagctgaaggctgctgtgggggagctgcctgagaagagcaagctgcaggagatctaccaggagctgacccggctgaaggctgctgtgggggagctgcctgagaagagcaagctgcaggagatctaccaggagctgacccggctgaaggctgctgtgggggagctgcctgagaagagcaagctgcaggagatctaccaggagctgacccggctgaaggctgctgtgggggagctgcctgagaagagcaagctgcaggagatctaccaggagctgacagagctgaaggctgctgtgggggagctgcctgagaagagcaagctgcaggagatctaccaggagctgacccagctgaaggctgctgtgggggagctgcctgaccagagcaagcagcagcagatctaccaggagctgacagacctgaagacagcctttgagcggctgtgccgccactgccccaaggactggaccttcttccagggcaactgctacttcatgagcaacagccagaggaactggcatgacagcgtgacagcctgccaggaggtgcgggcccagctggtggtgatcaagacagctgaggagcagtag

SEQ ID NO: 294816 - DNA, 771 bp, Artificial Sequence
  derived and/or modified sequence
atgagcgacagcaaggagccccgggtgcagcagctgggcctgctggtcagcaaagttccctcttccctgagtcaggaacagtcggagcaggacgctatttatcagaatctcactcagctgaaagctgccgtgggggagctgagtgagaagtccaaactgcaggagatttaccaagaactgacacaactgaaagcagctgtaggtgagcttccagaaaagtcaaagctacaggaaatttaccaggaactgactcgcctgaaagcggccgtgggcgaactccccgagaaaagcaaactacaggaaatctaccaggaactgactaggctgaaggctgcggtaggagaacttcccgaaaaatccaagctgcaggaaatttaccaggagctcaccaggctcaaagccgccgttggggaacttcccgaaaaaagtaagctgcaagagatctatcaggaactgactgaactgaaggccgctgtcggcgagctgcccgaaaaaagtaaactgcaggagatctatcaggagcttacacagctgaaagcggccgttggtgaattgcctgatcaaagcaagcagcaacagatctatcaagaactaacggacctgaagaccgcttttgagcgcctgtgccggcattgcccaaaggattggacattttttcagggtaactgttactttatgagtaacagtcagaggaactggcacgatagcgtgactgcctgtcaggaagtgcgggctcaactcgtagtgatcaaaaccgctgaggaacaatag

SEQ ID NO: 294817 - DNA, 771 bp, Artificial Sequence
  derived and/or modified sequence
atgtctgatagtaaggagccacgtgtgcagcagcttggtttactagtcagcaaggtgcctagcagtctgtctcaggagcagtctgaacaggacgccatttaccagaacctgacccagttgaaggccgctgtaggcgagctttctgagaaaagtaaactccaggagatctaccaagagctaacccagttgaaggccgctgtcggggaactgcctgagaaatcgaagctccaggagatctatcaggagttaactaggctgaaggccgcagtgggcgaactcccagaaaagagtaagctgcaggaaatctaccaagagctgacccggctgaaggctgctgttggcgagctcccggagaaatctaagttgcaggagatctaccaggagcttacacggctgaaagcagccgtcggagagcttcctgagaaaagtaagctgcaggaaatctaccaggagctcaccgaactgaaagctgcagtgggcgagctgcccgaaaagagcaagttacaggaaatctaccaagagctgacccagctcaaggcagctgttggggagctgcctgatcaatcaaaacagcaacagatctatcaagagctcacagatcttaaaactgcctttgaaagactgtgtcggcactgccccaaggattggactttctttcagggaaactgctactttatgagcaactctcagcggaactggcacgattccgtgacggcctgtcaggaggttagggcccagctagttgtgattaagacggctgaagaacagtag

SEQ ID NO: 294818 - DNA, 1766 bp, Artificial Sequence
  derived and/or modified sequence
acccagcttcctgtttgtcttcctgagagacagtagatttagaaagtgaggatcagagggtggaaaataaaagctgtggtccccaggagtcctgaacatctggggacagcgggaaaacatgagtgactccaaggaaccaagggtgcagcagctgggcctcctggtgtccaaggtccccagctccctaagtcaggaacaatccgagcaagacgcaatctaccagaacctgacccagcttaaagctgcagtgggtgagctctcagagaaatccaagctgcaggagatctaccaggagctgacccagctgaaggctgcagtgggtgagttgccagagaaatccaagctgcaggagatctaccaggagctgacccggctgaaggctgcagtgggtgagttgccagagaaatccaagctgcaggagatctaccaggagctgacccggctgaaggctgcagtgggtgagttgccagagaaatccaagctgcaggagatctaccaggagctgacccggctgaaggctgcagtgggtgagttgccagagaaatccaagctgcaggagatctaccaggagctgacggagctgaaggctgcagtgggtgagttgccagagaaatccaagctgcaggagatctaccaggagctgacccagctgaaggctgcagtgggtgagttgccagaccagtccaagcagcagcaaatctatcaagaactgaccgatttgaagactgcatttgaacgcctgtgccgccactgtcccaaggactggacattcttccaaggaaactgttacttcatgtctaactcccagcggaactggcacgactccgtcaccgcctgccaggaagtgagggcccagctcgtcgtaatcaaaactgctgaggagcagaacttcctacagctgcagacttccaggagtaaccgcttctcctggatgggactttcagacctaaatcaggaaggcacgtggcaatgggtggacggctcacctctgtcacccagcttccagcggtactggaacagtggagaacccaacaatagcgggaatgaagactgtgcggaatttagtggcagtggctggaacgacaatcgatgtgacgttgacaattactggatctgcaaaaagcccgcagcctgcttcagagacgaatagttgtttccctgctagcctcagcctccattgtggtatagcagaacttcacccacttgtaagccagcgcttcttctctccatccttggaccttcacaaatgccctgagacggttctctgttcgatttttcatcccctatgaacctgggtcttattctgtccttctgatgcctccaagtttccctggtgtagagcttgtgttcttggcccatccttggagctttataagtgacctgagtgggatgcatttagggggcgggcttggtatgttgtatgaatccactctctgttccttttggagattagactatttggattcatgtgtagctgccctgtcccctggggctttatctcatccatgcaaactaccatctgctcaacttccagctacaccccgtgcacccttttgactggggacttgctggttgaaggagctcatcttgcaggctggaagcaccagggaattaattcccccagtcaaccaatggcatccagagagggcatggaggctccatacaacctcttccacccccacatctttctttgtcctatacatgtcttccatttggctgtttctgagttgtagcctttataataaagtggtaaatgttgtaactgc

SEQ ID NO: 294819 - DNA, 771 bp, Artificial Sequence
  derived and/or modified sequence
atgagcgacagcaaggagcccagagtgcagcagctgggcctgctggtgagcaaggtgcccagcagcctgagccaggagcagagcgagcaggacgccatctaccagaacctgacccagctgaaggccgccgtgggcgagctgagcgagaagagcaagctgcaggagatctaccaggagctgacccagctgaaggccgccgtgggcgagctgcccgagaagagcaagctgcaggagatctaccaggagctgaccagactgaaggccgccgtgggcgagctgcccgagaagagcaagctgcaggagatctaccaggagctgaccagactgaaggccgccgtgggcgagctgcccgagaagagcaagctgcaggagatctaccaggagctgaccagactgaaggccgccgtgggcgagctgcccgagaagagcaagctgcaggagatctaccaggagctgaccgagctgaaggccgccgtgggcgagctgcccgagaagagcaagctgcaggagatctaccaggagctgacccagctgaaggccgccgtgggcgagctgcccgaccagagcaagcagcagcagatctaccaggagctgaccgacctgaagaccgccttcgagagactgtgcagacactgccccaaggactggaccttcttccagggcaactgctacttcatgagcaacagccagagaaactggcacgacagcgtgaccgcctgccaggaggtgagagcccagctggtggtgatcaagaccgccgaggagcagtag

SEQ ID NO: 294820 - protein, 324 aa, Artificial Sequence
  derived and/or modified sequence
MSDSKEPRVQQLGLLEEDPTTSGIRLFPRDFQFQQIHGHKSSTGCLGHGALVLQLLSFMLLAGVLVAILVQVSKVPSSLSQEQSEQDAIYQNLTQLKAAVGELSEKSKLQEIYQELTQLKAAVGELPEKSKLQEIYQELTRLKAAVGELPEKSKLQEIYQELTRLKAAVGELPEKSKLQEIYQELTRLKAAVGELPEKSKLQEIYQELTELKAAVGELPEKSKLQEIYQELTQLKAAVGELPDQSKQQQIYQELTDLKTAFERLCRHCPKDWTFFQGNCYFMSNSQRNWHDSVTACQEVRAQLVVIKTAEEQLPAVLEQWRTQQ

SEQ ID NO: 294821 - DNA, 975 bp, Artificial Sequence
  derived and/or modified sequence
atgtcagatagcaaggagcctagggtccagcagctgggacttctagaagaggacccaacgacatccggaattaggttgttccctcgagattttcaattccagcagatacacggccacaagtcctcaacgggttgcttgggtcacggagctcttgtgctgcagttactgagtttcatgctcctggcaggggtgctggttgctattctggttcaggtcagtaaggtaccctctagcctttcacaggagcagagcgagcaggacgccatttaccagaaccttacccagttgaaagccgctgttggggagttatcagagaagtccaagcttcaggagatttaccaggaactgactcaactgaaagcggccgtgggggagctgccggagaagtccaaactacaggagatctaccaggagctgactaggttaaaggcagctgtgggggaacttccggaaaaatctaaactgcaggaaatttatcaagaactaactcgcctgaaggcagcggtgggagagctgcccgaaaagtccaagctgcaggaaatctaccaggaactcacacggctcaaggccgcggtcggtgagttgccagagaagagcaaacttcaggaaatataccaagaattgactgagctaaaggcagcggtgggtgagcttcccgaaaaatctaaattgcaagagatctaccaggaactgacccagttgaaagcggccgtgggtgagcttcccgatcagtctaaacagcagcagatctatcaggaactgactgatctcaagaccgcgttcgagcgtctgtgcagacattgccctaaagattggacattctttcagggcaactgctattttatgtctaattcccagcgaaattggcacgactccgtcacagcttgccaggaagtcagagcccagctggtggttattaagactgccgaagaacagttacccgcagtgctcgaacagtggagaacacagcagtag

SEQ ID NO: 294822 - DNA, 975 bp, Artificial Sequence
  derived and/or modified sequence
atgtctgacagcaaggagccccgggtgcagcagctgggcctgctggaggaggaccccaccaccagcggcatccgcctcttcccccgggacttccagttccagcagatccacggccacaagagcagcacaggctgcctgggccacggggccctggtgctgcagctgctgtccttcatgctgctggccggcgtgctggtggccatcctggtgcaggtgtccaaggtgcccagcagcctgagccaggagcagagcgagcaggatgccatctaccagaacctgacccagctgaaggctgctgtgggggagctgtctgagaagagcaagctgcaggagatctaccaggagctgacccagctgaaggctgctgtgggggagctgcctgagaagagcaagctgcaggagatctaccaggagctgacccggctgaaggctgctgtgggggagctgcctgagaagagcaagctgcaggagatctaccaggagctgacccggctgaaggctgctgtgggggagctgcctgagaagagcaagctgcaggagatctaccaggagctgacccggctgaaggctgctgtgggggagctgcctgagaagagcaagctgcaggagatctaccaggagctgacagagctgaaggctgctgtgggggagctgcctgagaagagcaagctgcaggagatctaccaggagctgacccagctgaaggctgctgtgggggagctgcctgaccagagcaagcagcagcagatctaccaggagctgacagacctgaagacagcctttgagcggctgtgccgccactgccccaaggactggaccttcttccagggcaactgctacttcatgagcaacagccagaggaactggcatgacagcgtgacagcctgccaggaggtgcgggcccagctggtggtgatcaagacagctgaggagcagctgcctgctgtgctggagcagtggaggacccagcagtag

SEQ ID NO: 294823 - DNA, 975 bp, Artificial Sequence
  derived and/or modified sequence
atgagcgacagcaaggagccccgggtgcagcagctgggcctgctggaagaggatccaacgacaagcggtatccgactgtttccacgtgacttccagttccaacagatccacgggcataagagcagtaccggatgcctgggtcacggcgctctggtgcttcagttgttatccttcatgttactggcaggcgtgttggtggccatcctggtccaagtgtctaaggtccctagctccttgtcacaggaacagtccgagcaggatgccatctatcagaatctgacccagctcaaggccgcagtaggtgagctgagcgagaaaagtaagttacaggagatttaccaagagcttacacaactgaaggcagctgttggtgagcttccggagaaatccaaacttcaagagatctatcaggagcttactaggcttaaagctgctgtcggtgaactgcctgaaaagtcgaaactgcaggaaatttaccaggagttgacgcgactcaaggcagcagtcggagagttgcccgagaagtcaaagttacaggaaatctaccaggagctcactcgtctgaaggctgcagtcggtgaactcccagagaagtccaaactacaggaaatatatcaagagctcacggagcttaaggcggctgtgggcgagctgccagagaagagcaaactccaggagatctatcaggagttgacccagcttaaggccgcagtgggcgagctgcccgaccaatccaagcaacagcaaatataccaggaactcacggacctgaagacagctttcgaacggttatgccggcattgccctaaagactggaccttctttcaggggaactgctacttcatgtccaactcccaacggaactggcacgattccgtcacagcatgccaggaggtcagagcccaattggtggtgatcaagacagcagaagaacagctgccagctgtgcttgagcagtggcgaacccagcagtag

SEQ ID NO: 294824 - DNA, 975 bp, Artificial Sequence
  derived and/or modified sequence
atgagtgactccaaggaaccaagggtgcagcagctgggcttactcgaggaagatcctacaacttcaggcatccgcctctttcccagggacttccaatttcagcaaatccacggccacaagagttccacgggatgcctaggacatggggctttggtccttcaactccttagttttatgcttctcgctggtgtcctcgttgctattctcgtccaggtttccaaagtcccctcatccctgtcccaggaacaatcggagcaggacgcgatatatcagaaccttacccagctaaaagccgctgtgggcgaactcagcgagaagtccaagctacaggagatttaccaagaactcactcagttgaaggctgctgtgggagagctcccagaaaagagtaagctgcaggaaatttaccaggaattgacgcggttgaaggccgctgtcggggaacttcctgaaaagagtaagctgcaggaaatctaccaggagttgacacggctcaaggccgctgtcggcgagctgcccgaaaaatctaagctacaggaaatttaccaggaacttactcggctgaaagccgctgtgggtgaattacctgaaaagagcaaactgcaggaaatttatcaagaactgactgaactgaaggctgcagttggtgaactccctgaaaagtctaaactgcaagaaatctaccaggagctgactcaactcaaagcggctgtcggcgaacttcccgaccagtccaagcagcagcagatttatcaggaactcaccgatttgaagaccgctttcgaaagactgtgtcgccactgtcctaaagattggacattcttccagggaaactgctacttcatgagtaacagtcagcggaattggcacgactctgtgaccgcctgtcaagaagttcgagcccaattagtcgtcattaaaacagcggaggaacaactccccgctgtgctggaacagtggaggacacaacagtag

SEQ ID NO: 294825 - DNA, 1821 bp, Artificial Sequence
  derived and/or modified sequence
acccagcttcctgtttgtcttcctgagagacagtagatttagaaagtgaggatcagagggtggaaaataaaagctgtggtccccaggagtcctgaacatctggggacagcgggaaaacatgagtgactccaaggaaccaagggtgcagcagctgggcctcctggaagaagatccaacaaccagtggcatcagactttttccaagagactttcaattccagcagatacatggccacaagagctctacagggtgtcttggccatggcgccctggtgctgcaactcctctccttcatgctcttggctggggtcctggtggccatccttgtccaagtgtccaaggtccccagctccctaagtcaggaacaatccgagcaagacgcaatctaccagaacctgacccagcttaaagctgcagtgggtgagctctcagagaaatccaagctgcaggagatctaccaggagctgacccagctgaaggctgcagtgggtgagttgccagagaaatccaagctgcaggagatctaccaggagctgacccggctgaaggctgcagtgggtgagttgccagagaaatccaagctgcaggagatctaccaggagctgacccggctgaaggctgcagtgggtgagttgccagagaaatccaagctgcaggagatctaccaggagctgacccggctgaaggctgcagtgggtgagttgccagagaaatccaagctgcaggagatctaccaggagctgacggagctgaaggctgcagtgggtgagttgccagagaaatccaagctgcaggagatctaccaggagctgacccagctgaaggctgcagtgggtgagttgccagaccagtccaagcagcagcaaatctatcaagaactgaccgatttgaagactgcatttgaacgcctgtgccgccactgtcccaaggactggacattcttccaaggaaactgttacttcatgtctaactcccagcggaactggcacgactccgtcaccgcctgccaggaagtgagggcccagctcgtcgtaatcaaaactgctgaggagcagcttccagcggtactggaacagtggagaacccaacaatagcgggaatgaagactgtgcggaatttagtggcagtggctggaacgacaatcgatgtgacgttgacaattactggatctgcaaaaagcccgcagcctgcttcagagacgaatagttgtttccctgctagcctcagcctccattgtggtatagcagaacttcacccacttgtaagccagcgcttcttctctccatccttggaccttcacaaatgccctgagacggttctctgttcgatttttcatcccctatgaacctgggtcttattctgtccttctgatgcctccaagtttccctggtgtagagcttgtgttcttggcccatccttggagctttataagtgacctgagtgggatgcatttagggggcgggcttggtatgttgtatgaatccactctctgttccttttggagattagactatttggattcatgtgtagctgccctgtcccctggggctttatctcatccatgcaaactaccatctgctcaacttccagctacaccccgtgcacccttttgactggggacttgctggttgaaggagctcatcttgcaggctggaagcaccagggaattaattcccccagtcaaccaatggcatccagagagggcatggaggctccatacaacctcttccacccccacatctttctttgtcctatacatgtcttccatttggctgtttctgagttgtagcctttataataaagtggtaaatgttgtaactgc

SEQ ID NO: 294826 - DNA, 975 bp, Artificial Sequence
  derived and/or modified sequence
atgagcgacagcaaggagcccagagtgcagcagctgggcctgctggaggaggaccccaccaccagcggcatcagactgttccccagagacttccagttccagcagatccacggccacaagagcagcaccggctgcctgggccacggcgccctggtgctgcagctgctgagcttcatgctgctggccggcgtgctggtggccatcctggtgcaggtgagcaaggtgcccagcagcctgagccaggagcagagcgagcaggacgccatctaccagaacctgacccagctgaaggccgccgtgggcgagctgagcgagaagagcaagctgcaggagatctaccaggagctgacccagctgaaggccgccgtgggcgagctgcccgagaagagcaagctgcaggagatctaccaggagctgaccagactgaaggccgccgtgggcgagctgcccgagaagagcaagctgcaggagatctaccaggagctgaccagactgaaggccgccgtgggcgagctgcccgagaagagcaagctgcaggagatctaccaggagctgaccagactgaaggccgccgtgggcgagctgcccgagaagagcaagctgcaggagatctaccaggagctgaccgagctgaaggccgccgtgggcgagctgcccgagaagagcaagctgcaggagatctaccaggagctgacccagctgaaggccgccgtgggcgagctgcccgaccagagcaagcagcagcagatctaccaggagctgaccgacctgaagaccgccttcgagagactgtgcagacactgccccaaggactggaccttcttccagggcaactgctacttcatgagcaacagccagagaaactggcacgacagcgtgaccgcctgccaggaggtgagagcccagctggtggtgatcaagaccgccgaggagcagctgcccgccgtgctggagcagtggagaacccagcagtag

SEQ ID NO: 294827 - protein, 164 aa, Artificial Sequence
  derived and/or modified sequence
MAFWTQLMLLLWKNFMYRRRQPVQLLVELLWPLFLFFILVAVRHSHPPLEHHECHFPNKPLPSAGTVPWLQGLICNVNNTCFPQLTPGEEPGRLSNFNDSLVSRLLADARTVLGGASAHRTLAGLGKLIATLRAARSTAQPQPTKQSPLEPPMLDVAELLTSLL

SEQ ID NO: 294828 - protein, 549 aa, Artificial Sequence
  derived and/or modified sequence
MLENYKNLATVGYQLFKPSLISWLEQEESRTVQRGDFQASEWKVQLKTKELALQQDVLGEPTSSGIQMIGSHNGGEVSDVKQCGDVSSEHSCLKTHVRTQNSENTFECYLYGVDFLTLHKKTSTGEQRSVFSQCGKAFSLNPDVVCQRTCTGEKAFDCSDSGKSFINHSHLQGHLRTHNGESLHEWKECGRGFIHSTDLAVRIQTHRSEKPYKCKECGKGFRYSAYLNIHMGTHTGDNPYECKECGKAFTRSCQLTQHRKTHTGEKPYKCKDCGRAFTVSSCLSQHMKIHVGEKPYECKECGIAFTRSSQLTEHLKTHTAKDPFECKICGKSFRNSSCLSDHFRIHTGIKPYKCKDCGKAFTQNSDLTKHARTHSGERPYECKECGKAFARSSRLSEHTRTHTGEKPFECVKCGKAFAISSNLSGHLRIHTGEKPFECLECGKAFTHSSSLNNHMRTHSAKKPFTCMECGKAFKFPTCVNLHMRIHTGEKPYKCKQCGKSFSYSNSFQLHERTHTGEKPYECKECGKAFSSSSSFRNHERRHADERLSA

SEQ ID NO: 294829 - DNA, 3320 bp, Artificial Sequence
  derived and/or modified sequence
gctttctccgcgccgccaaacccgttttcttcctggtggcgtttgggcttaatacagctttggcgaggtcggatgacgggtgggagccagcggtggaaggggtggcgaaagtaccggtttgccccaggccgccgaggggcctccttagagagaccttgcctgctccgctcgcgtccgccggggccgcgcgggtcctcctggcgccgccaggttcaaaaagccactcgagttgtcactgcgacggccctgggccaggagccgtttcgggatctgtcaaacaacgagttttcgtcgttcgaatcaggttgactggtccttcatccccccaatctcccgtacctggcgagtccagctcgtcgcggataccgttaaccctggataaagagaatggaggttacctctgtccgtgtagattcctaagctgtcctggagtgatccttggagtaaaggaaaggtgctttgaagcacattcagccatcagccctgtgggatggcagccactgatttgtcctatggtctttacagggacccagtctgccttcaagaaaagacagaagtagaaagggtggtggctgactgtctgacaaattgttatcaggtatgcaggaagtatatccttctccaaaatatcatacttgcatcaccaggtagacacatttccttctacacagaattatcttcagagcttcttaaagcaaataaagcctccttcaaggactgagtccctagtcgaattcccggaaggagtggagcctgtcatattgtgtttatctagcatctgctcaagagtgtgctgcagtggagggaaatcagatgacctcccagtctggttgtgttacatacaatcatgtgtaagaagtgccattcaagccgtgtcactggaggggactgacagtgagattcagtgacttttgatgatctggctgtggacttcaccccagaagaatggactttactggacccaactcagagaaacctctacagagatgtgatgctggagaactacaagaatttggccacagtaggatatcagctcttcaaacccagtctgatctcttggctggaacaagaagagtctaggacagtgcagagaggtgatttccaagcttcagaatggaaagtgcaacttaaaaccaaagagttagcccttcagcaggatgttttgggggagccaacctccagtgggattcaaatgataggaagccacaacggaggggaggtcagtgatgttaagcaatgtggagatgtctccagtgaacactcatgccttaagacacatgtgagaactcaaaatagtgagaacacatttgagtgttatctgtatggagtagacttccttactctgcacaagaaaacctctactggagagcaacgttctgtatttagtcagtgtggaaaagccttcagcctgaacccagatgttgtttgccagagaacgtgcacaggagagaaagcttttgattgcagtgactctgggaaatccttcattaatcattcacaccttcagggacatttaagaactcacaatggagaaagtctccatgaatggaaggaatgtgggagaggctttattcactccacagaccttgctgtgcgtatacaaactcacaggtcagaaaaaccctacaaatgtaaggaatgtggaaaaggatttagatattctgcataccttaatattcacatgggaacccacactggagacaatccctatgagtgtaaggagtgtgggaaagccttcaccaggtcttgtcaacttactcagcacagaaaaactcacactggagagaaaccttataaatgtaaggattgtgggagagccttcactgtttcctcttgcttaagtcaacatatgaaaatccatgtgggtgagaagccttatgaatgcaaggaatgtgggatagccttcactagatcttctcaacttactgaacatttaaaaactcacactgcaaaggatccctttgaatgtaagatatgtggaaaatcctttagaaattcctcatgcctcagtgatcactttcgaattcacactggaataaaaccctataaatgtaaggattgtgggaaagccttcactcagaactcagaccttactaagcatgcacgaactcacagtggagagaggccctatgaatgtaaggaatgtggaaaggcctttgccagatcctctcgccttagtgaacatacaagaactcacactggagagaagccttttgaatgtgtcaaatgtgggaaagcctttgctatttcttcaaatcttagtggacatttgagaattcacactggagagaagccctttgagtgcctggaatgtggtaaagcatttacgcattcctccagtcttaataatcacatgcggacccacagcgccaaaaaaccattcacgtgtatggaatgtggcaaagcttttaagtttcccacgtgtgttaaccttcacatgcggatccacactggagaaaaaccctacaaatgtaaacagtgtgggaaatccttcagttactccaattcgtttcagttacatgaacgaactcacactggagagaaaccctatgaatgtaaggagtgcgggaaagccttcagttcttccagttcctttcgaaatcatgaaagaaggcatgcggatgagagactgtcagcataaggaatgtgggaaaacctaaaggtgtccctgttctctctgaagacatgaaaactcactggggagaaaccctatgaatgtaaaaatgtggaagcaactttgtatctcaggtcttaatgaacacatatgaattcacagtggagaagaccctgcatcagggaatgtggaaatgactttgctgaattctcaagccttaccaaacacatcagaaatctcactggagagaaactgtatgaatgtagagaatctgggaatacctttctgaatcccacaaaccttaatgtgtgtatgtgaactcacattggagagaaaccctgcaatttaaatggtatggtctggatgatgccccactccatatttgtaagccctaagtcctagttccttacactataactgtatttggacatagggttttcaaacaggtgagtaacttcaaatgaggttgttgggttcgatccctaatctgacatcactggtgtccctataagggaaactgaaggaaggatacacatggagaagactgtgtggatccaccagaagatggccatctacaagccaaggacagagacctggaacagatgctttcattatggcctccagaggaaaccaaccctgtctccaccttgatattgcacttccaggctccagaactgtgaggcaataaatttctcttggttaaatc

SEQ ID NO: 294830 - DNA, 3600 bp, Artificial Sequence
  derived and/or modified sequence
gctttctccgcgccgccaaacccgttttcttcctggtggcgtttgggcttaatacagctttggcgaggtcggatgacgggtgggagccagcggtggaaggggtggcgaaagtaccggtttgccccaggccgccgaggggcctccttagagagaccttgcctgctccgctcgcgtccgccggggccgcgcgggtcctcctggcgccgccaggttcaaaaagccactcgagttgtcactgcgacggccctgggccaggagccgtttcgggatctgtcaaacaacgagttttcgtcgttcgaatcaggttgactggtccttcatccccccaatctcccgtacctggcgagtccagctcgtcgcggcaatgctaagaaaagagtgatatgcaagctgagaccaaaaatatggtatgatttagccatactgaaggggaaggaaataagagctgggcaaagcattctgtgaattggctgactccacttctatggtgagagagaggagtgcatcaaagattactcccagtagagatggtttcagcatgttggccagtctggtctcagactcctgacctcaagtgatccacccacctcggcctcccaaaatgctgggattacaggtataagccactgtgcctggccaaagataccgttaaccctggataaagagaatggaggttacctctgtccgtgtagattcctaagctgtcctggagtgatccttggagtaaaggaaaggtgctttgaagcacattcagccatcagccctgtgggatggcagccactgatttgtcctatggtctttacagggacccagtctgccttcaagaaaagacagaagtagaaagggtggtggctgactgtctgacaaattgttatcaggtatgcaggaagtatatccttctccaaaatatcatacttgcatcaccaggtagacacatttccttctacacagaattatcttcagagcttcttaaagcaaataaagcctccttcaaggactgagtccctagtcgaattcccggaaggagtggagcctgtcatattgtgtttatctagcatctgctcaagagtgtgctgcagtggagggaaatcagatgacctcccagtctggttgtgttacatacaatcatgtgtaagaagtgccattcaagccgtgtcactggaggggactgacagtgagattcagtgacttttgatgatctggctgtggacttcaccccagaagaatggactttactggacccaactcagagaaacctctacagagatgtgatgctggagaactacaagaatttggccacagtaggatatcagctcttcaaacccagtctgatctcttggctggaacaagaagagtctaggacagtgcagagaggtgatttccaagcttcagaatggaaagtgcaacttaaaaccaaagagttagcccttcagcaggatgttttgggggagccaacctccagtgggattcaaatgataggaagccacaacggaggggaggtcagtgatgttaagcaatgtggagatgtctccagtgaacactcatgccttaagacacatgtgagaactcaaaatagtgagaacacatttgagtgttatctgtatggagtagacttccttactctgcacaagaaaacctctactggagagcaacgttctgtatttagtcagtgtggaaaagccttcagcctgaacccagatgttgtttgccagagaacgtgcacaggagagaaagcttttgattgcagtgactctgggaaatccttcattaatcattcacaccttcagggacatttaagaactcacaatggagaaagtctccatgaatggaaggaatgtgggagaggctttattcactccacagaccttgctgtgcgtatacaaactcacaggtcagaaaaaccctacaaatgtaaggaatgtggaaaaggatttagatattctgcataccttaatattcacatgggaacccacactggagacaatccctatgagtgtaaggagtgtgggaaagccttcaccaggtcttgtcaacttactcagcacagaaaaactcacactggagagaaaccttataaatgtaaggattgtgggagagccttcactgtttcctcttgcttaagtcaacatatgaaaatccatgtgggtgagaagccttatgaatgcaaggaatgtgggatagccttcactagatcttctcaacttactgaacatttaaaaactcacactgcaaaggatccctttgaatgtaagatatgtggaaaatcctttagaaattcctcatgcctcagtgatcactttcgaattcacactggaataaaaccctataaatgtaaggattgtgggaaagccttcactcagaactcagaccttactaagcatgcacgaactcacagtggagagaggccctatgaatgtaaggaatgtggaaaggcctttgccagatcctctcgccttagtgaacatacaagaactcacactggagagaagccttttgaatgtgtcaaatgtgggaaagcctttgctatttcttcaaatcttagtggacatttgagaattcacactggagagaagccctttgagtgcctggaatgtggtaaagcatttacgcattcctccagtcttaataatcacatgcggacccacagcgccaaaaaaccattcacgtgtatggaatgtggcaaagcttttaagtttcccacgtgtgttaaccttcacatgcggatccacactggagaaaaaccctacaaatgtaaacagtgtgggaaatccttcagttactccaattcgtttcagttacatgaacgaactcacactggagagaaaccctatgaatgtaaggagtgcgggaaagccttcagttcttccagttcctttcgaaatcatgaaagaaggcatgcggatgagagactgtcagcataaggaatgtgggaaaacctaaaggtgtccctgttctctctgaagacatgaaaactcactggggagaaaccctatgaatgtaaaaatgtggaagcaactttgtatctcaggtcttaatgaacacatatgaattcacagtggagaagaccctgcatcagggaatgtggaaatgactttgctgaattctcaagccttaccaaacacatcagaaatctcactggagagaaactgtatgaatgtagagaatctgggaatacctttctgaatcccacaaaccttaatgtgtgtatgtgaactcacattggagagaaaccctgcaatttaaatggtatggtctggatgatgccccactccatatttgtaagccctaagtcctagttccttacactataactgtatttggacatagggttttcaaacaggtgagtaacttcaaatgaggttgttgggttcgatccctaatctgacatcactggtgtccctataagggaaactgaaggaaggatacacatggagaagactgtgtggatccaccagaagatggccatctacaagccaaggacagagacctggaacagatgctttcattatggcctccagaggaaaccaaccctgtctccaccttgatattgcacttccaggctccagaactgtgaggcaataaatttctcttggttaaatc

SEQ ID NO: 294831 - DNA, 3293 bp, Artificial Sequence
  derived and/or modified sequence
ggagccgtttcgggatctgtcaaacaacgagttttcgtcgttcgaatcaggttgactggtccttcatccccccaatctcccgtacctggcgagtccagctcgtcgcggcctgtacctccccacagagcttcaaaacgggcttttaggaagaaggaatggaggctttgaagcaatgctaagaaaagagtgatatgcaagctgagaccaaaaatatggtatgatttagccatactgaaggggaaggaaataagagctgggcaaagcattctgtgaattggctgactccacttctatggtgagagagaggagtgcatcaaagattactcccaggtttgacagagataccgttaaccctggataaagagaatggaggttacctctgtccgtgtagattcctaagctgtcctggagtgatccttggagtaaaggaaaggtgctttgaagcacattcagccatcagccctgtgggatggcagccactgatttgtcctatggtctttacagggacccagtctgccttcaagaaaagacagaagtagaaagggtggtggctgactgtctgacaaattgttatcaggtatgcaggaagtatatccttctccaaaatatcatacttgcatcaccaggtagacacatttccttctacacagaattatcttcagagcttcttaaagcaaataaagcctccttcaaggactgagtccctagtcgaattcccggaaggagtggagcctgtcatattgtgtttatctagcatctgctcaagagtgtgctgcagtggagggaaatcagatgacctcccagtctggttgtgttacatacaatcatgtgtaagaagtgccattcaagccgtgtcactggaggggactgacagattcagtgacttttgatgatctggctgtggacttcaccccagaagaatggactttactggacccaactcagagaaacctctacagagatgtgatgctggagaactacaagaatttggccacagtaggatatcagctcttcaaacccagtctgatctcttggctggaacaagaagagtctaggacagtgcagagaggtgatttccaagcttcagaatggaaagtgcaacttaaaaccaaagagttagcccttcagcaggatgttttgggggagccaacctccagtgggattcaaatgataggaagccacaacggaggggaggtcagtgatgttaagcaatgtggagatgtctccagtgaacactcatgccttaagacacatgtgagaactcaaaatagtgagaacacatttgagtgttatctgtatggagtagacttccttactctgcacaagaaaacctctactggagagcaacgttctgtatttagtcagtgtggaaaagccttcagcctgaacccagatgttgtttgccagagaacgtgcacaggagagaaagcttttgattgcagtgactctgggaaatccttcattaatcattcacaccttcagggacatttaagaactcacaatggagaaagtctccatgaatggaaggaatgtgggagaggctttattcactccacagaccttgctgtgcgtatacaaactcacaggtcagaaaaaccctacaaatgtaaggaatgtggaaaaggatttagatattctgcataccttaatattcacatgggaacccacactggagacaatccctatgagtgtaaggagtgtgggaaagccttcaccaggtcttgtcaacttactcagcacagaaaaactcacactggagagaaaccttataaatgtaaggattgtgggagagccttcactgtttcctcttgcttaagtcaacatatgaaaatccatgtgggtgagaagccttatgaatgcaaggaatgtgggatagccttcactagatcttctcaacttactgaacatttaaaaactcacactgcaaaggatccctttgaatgtaagatatgtggaaaatcctttagaaattcctcatgcctcagtgatcactttcgaattcacactggaataaaaccctataaatgtaaggattgtgggaaagccttcactcagaactcagaccttactaagcatgcacgaactcacagtggagagaggccctatgaatgtaaggaatgtggaaaggcctttgccagatcctctcgccttagtgaacatacaagaactcacactggagagaagccttttgaatgtgtcaaatgtgggaaagcctttgctatttcttcaaatcttagtggacatttgagaattcacactggagagaagccctttgagtgcctggaatgtggtaaagcatttacgcattcctccagtcttaataatcacatgcggacccacagcgccaaaaaaccattcacgtgtatggaatgtggcaaagcttttaagtttcccacgtgtgttaaccttcacatgcggatccacactggagaaaaaccctacaaatgtaaacagtgtgggaaatccttcagttactccaattcgtttcagttacatgaacgaactcacactggagagaaaccctatgaatgtaaggagtgcgggaaagccttcagttcttccagttcctttcgaaatcatgaaagaaggcatgcggatgagagactgtcagcataaggaatgtgggaaaacctaaaggtgtccctgttctctctgaagacatgaaaactcactggggagaaaccctatgaatgtaaaaatgtggaagcaactttgtatctcaggtcttaatgaacacatatgaattcacagtggagaagaccctgcatcagggaatgtggaaatgactttgctgaattctcaagccttaccaaacacatcagaaatctcactggagagaaactgtatgaatgtagagaatctgggaatacctttctgaatcccacaaaccttaatgtgtgtatgtgaactcacattggagagaaaccctgcaatttaaatggtatggtctggatgatgccccactccatatttgtaagccctaagtcctagttccttacactataactgtatttggacatagggttttcaaacaggtgagtaacttcaaatgaggttgttgggttcgatccctaatctgacatcactggtgtccctataagggaaactgaaggaaggatacacatggagaagactgtgtggatccaccagaagatggccatctacaagccaaggacagagacctggaacagatgctttcattatggcctccagaggaaaccaaccctgtctccaccttgatattgcacttccaggctccagaactgtgaggcaataaatttctcttggttaaa

SEQ ID NO: 294832 - protein, 634 aa, Artificial Sequence
  derived and/or modified sequence
MAQGVLWILLGLLLWSDPGTASLPLLMDSVIQALAELEQKVPAAKTRHTASAWLMSAPNSGPHNRLYHFLLGAWSLNATELDPCPLSPELLGLTKEVARHDVREGKEYGVVLAPDGSTVAVEPLLAGLEAGLQGRRVINLPLDSMAAPWETGDTFPDVVAIAPDVRATSSPGLRDGSPDVTTADIGANTPDATKGCPDVQASLPDAKAKSPPTMVDSLLAVTLAGNLGLTFLRGSQTQSHPDLGTEGCWDQLSAPRTFTLLDPKASLLTMAFLNGALDGVILGDYLSRTPEPRPSLSHLLSQYYGAGVARDPGFRSNFRRQNGAALTSASILAQQVWGTLVLLQRLEPVHLQLQCMSQEQLAQVAANATKEFTEAFLGCPAIHPRCRWGAAPYRGRPKLLQLPLGFLYVHHTYVPAPPCTDFTRCAANMRSMQRYHQDTQGWGDIGYSFVVGSDGYVYEGRGWHWVGAHTLGHNSRGFGVAIVGNYTAALPTEAALRTVRDTLPSCAVRAGLLRPDYALLGHRQLVRTDCPGDALFDLLRTWPHFTAVSLRSLHYTARRPSVYTSSTRPLPPACNSCARTASARPPTSRRHVYSGNLGPAFAGHSAGNIPDPVTSAYAASAQPQTQPACPFPSS

SEQ ID NO: 294833 - DNA, 863 bp, Artificial Sequence
  derived and/or modified sequence
gggaaataagagagaaaagaagagtaagaagaaatataagagccaccatggtgtccaagggtgaggaattgtttaccggggtggtgcctattctcgtcgaacttgacggggatgtgaatggacacaagttttcggtatccggagaaggagagggtgacgccacatacggaaagcttacactcaaattcatctgtacgacggggaaactgcccgtaccctggcctacgctcgtaaccacgctgacttatggagtgcagtgctttagcagataccccgaccatatgaagcagcacgacttcttcaagtcggcgatgcccgaggggtacgtgcaagagaggaccattttcttcaaagacgatggcaattacaaaacacgcgcagaagtcaagtttgagggcgatactctggtcaatcggatcgaattgaagggaatcgatttcaaagaagatggaaacatccttggccataagctcgagtacaactataactcgcataatgtctatatcatggctgacaagcagaaaaacggtatcaaagtcaactttaagatccgacacaatattgaggacggttcggtgcagcttgcggaccactatcaacagaatacgccgattggggatggtccggtccttttgccggataaccattatctctcaacccagtcagccctgagcaaagatccaaacgagaagagggaccacatggtcttgctcgaattcgtgacagcggcagggatcactctgggaatggacgagttgtacaagtgataagctgccttctgcggggcttgccttctggccatgcccttcttctctcccttgcacctgtacctcttggtctttgaataaagcctgagtaggaag

SEQ ID NO: 294834 - DNA, 905 bp, Artificial Sequence
  derived and/or modified sequence
taatacgactcactatagggaaataagagagaaaagaagagtaagaagaaatataagagccaccatggtgtccaagggtgaggaattgtttaccggggtggtgcctattctcgtcgaacttgacggggatgtgaatggacacaagttttcggtatccggagaaggagagggtgacgccacatacggaaagcttacactcaaattcatctgtacgacggggaaactgcccgtaccctggcctacgctcgtaaccacgctgacttatggagtgcagtgctttagcagataccccgaccatatgaagcagcacgacttcttcaagtcggcgatgcccgaggggtacgtgcaagagaggaccattttcttcaaagacgatggcaattacaaaacacgcgcagaagtcaagtttgagggcgatactctggtcaatcggatcgaattgaagggaatcgatttcaaagaagatggaaacatccttggccataagctcgagtacaactataactcgcataatgtctatatcatggctgacaagcagaaaaacggtatcaaagtcaactttaagatccgacacaatattgaggacggttcggtgcagcttgcggaccactatcaacagaatacgccgattggggatggtccggtccttttgccggataaccattatctctcaacccagtcagccctgagcaaagatccaaacgagaagagggaccacatggtcttgctcgaattcgtgacagcggcagggatcactctgggaatggacgagttgtacaagtgataagctgccttctgcggggcttgccttctggccatgcccttcttctctcccttgcacctgtacctcttggtctttgaataaagcctgagtaggaaggcggccgctcgagcatgcatctaga

SEQ ID NO: 294835 - DNA, 1905 bp, Artificial Sequence
  derived and/or modified sequence
atggcgcaaggcgtgttatggatactgctgggtctgttgctgtggtcagatcctggtaccgcaagcttgcctctcttaatggacagtgtcatccaagctttggcagaactggaacagaaggtgccggcagccaaaacacggcacaccgcctcagcatggctgatgagcgccccaaattcaggaccacacaataggctatatcacttcttgctcggagcttggagcctgaacgctacggagctcgacccctgccccctgagccctgaactcctggggttgacaaaagaagttgcgagacatgacgtccgcgaggggaaagagtacggggtagtgctggcgccagatggctcgacggtcgcagtggagccgctgttggccggtttggaggcaggccttcaaggtaggcgagtgattaatttgcccctggactctatggcagccccatgggaaacgggggacacttttcctgacgtggtagcaattgcaccagatgtgagggccacgagctcccccggtctgagggatgggagccctgatgtgacaactgcggacataggagcaaacacccctgatgccacaaagggatgtcctgatgttcaagctagtctgcctgatgcaaaggcaaagtctccccctacaatggtggatagcctgctggcggtgactcttgctggcaacctggggctgacctttctgagaggctcacagactcagtcgcatcccgacctggggaccgagggatgctgggaccagctgtctgctccaaggaccttcacgcttctcgatcccaaagcaagcctcctgaccatggcattcctgaatggagccctggacggtgtgatactgggcgattacctgtcccggaccccagagccccgacctagcctgtcacacctgctgagccagtactatggagccggagttgcacgggatccgggattccgatccaatttcagaaggcagaacggtgctgcactcacttcagccagcattctggcccagcaggtatggggcacactggttctcctgcaacgtctggaaccggtgcatctccagctccagtgtatgtcccaggaacagctcgcacaggtggccgctaacgctacgaaggagtttaccgaagcgttcctagggtgcccagctatccaccccaggtgtagatggggcgcagccccataccggggacggccaaagctcctgcaactgccgctgggattcctgtacgtccaccatacttacgttcctgctccaccctgcactgacttcactaggtgtgcggctaatatgagatccatgcagaggtatcatcaagatacccaaggatggggggatattggatactcctttgtggtggggagcgatggctacgtgtacgagggcagaggctggcattgggtgggggctcacactctcggacacaacagcagggggtttggcgtggccatagttggtaattacaccgcggctttgcctacagaggccgcactcaggaccgtcagggatactctgccgtcatgtgccgtcagagctggcctgctccgtcctgactacgctttactcgggcatcgccagctagtgcgcactgactgccccggtgacgctttgttcgatctgctccgcacatggcctcacttcacagcggtgtcgctgaggtcgctgcactacacagcccgacgaccgagtgtgtacacgtcatccacgcgcccactcccgcctgcttgcaatagctgcgccaggacagcctccgccagaccaccaacttcccggagacatgtatacagtggaaacctggggcctgcattcgccggacattccgcgggaaacatacccgatccagtaacatcggcctacgctgcctcggcccagcctcagacccaaccagcttgcccattcccttcctcatag

SEQ ID NO: 294836 - DNA, 1905 bp, Artificial Sequence
  derived and/or modified sequence
atggcacagggtgtgctctggatcctgttaggtttgcttctctggtccgatcccggtactgcttcactccccctattgatggactcggtaatccaagccctggccgaactcgagcagaaggtgcccgccgcgaaaacacgccatacggcttcagcatggcttatgtctgctcccaactccggtccacataatcggctttatcatttcctactcggtgcttggtctctgaatgcaacagagctagatccttgtccactgagcccagaactgttgggcttaacaaaggaggttgccagacatgacgttcgcgagggaaaggagtatggggtggttctggccccagatggcagcactgtggctgtggaacctctactggcgggtttggaggctggcctccaaggtcggcgcgtcattaacctgcctcttgactctatggccgctccttgggagacaggggacacctttcctgatgtcgtcgccattgcccctgatgtgagagctacctcatctccggggctcagagatggatctccggacgtcactacagccgacataggagctaacactcccgacgcgactaagggatgccctgacgttcaggcctctctccccgatgcgaaggccaaatcaccgccaacgatggtagactcactgctggcagttactttggctggtaacttgggtctgactttcctgagaggatcccagactcagagccaccctgatctcggaaccgaaggatgttgggaccagttgtccgcaccgagaaccttcactctcttggaccctaaggccagtctgttaaccatggccttcctcaatggggccctggacggtgtgatcttaggcgactatctgtcccgcacaccagaaccacggccttctttatctcaccttctgtcccagtattacggggccggtgtagctcgcgaccccggattcaggtctaactttaggcgtcaaaatggcgctgccttgaccagcgcttcaatactggcacaacaagtttggggaactctggtcttgctgcagcgattggaacccgttcaccttcagttgcagtgtatgtctcaggagcaacttgcccaggtggctgctaacgctactaaggagtttacagaagccttcctcgggtgccccgcaatccatccccgctgccgatggggggccgcaccatacagaggacgtcctaagctgctgcagctacccttgggcttcctttatgtccaccatacctacgttcccgcgccaccttgcaccgactttactagatgcgccgccaacatgcggtcaatgcagcgttaccaccaggatacacagggctggggtgatattgggtattcctttgtggtaggcagcgatggttacgtgtacgaaggtagaggctggcactgggttggggcgcacacactgggacataatagccggggcttcggagtggcaattgtgggcaattatactgccgccctccctacggaggccgctttgcgaacagtgagagacaccctgccaagttgcgctgtccgggctggcttactgcggccagactatgcgttgctcgggcatcggcaactggttaggacagattgtcccggggatgcccttttcgaccttctccggacctggccccacttcactgccgtgtccctgcgcagcctgcactataccgcccggagaccgtcagtatatacctccagtacccgtcctttgccccccgcgtgtaacagctgcgcacggaccgcatctgcaaggccgcccacctcacgaagacacgtctattcaggaaacctgggcccagccttcgcaggacactccgccggaaacattcctgatccggtcaccagcgcgtatgctgcatctgcccagcctcagactcagcccgcttgcccatttcctagctcatag

SEQ ID NO: 294837 - DNA, 1905 bp, Artificial Sequence
  derived and/or modified sequence
atggctcagggcgtgctgtggatccttctgggtctgttgctttggtccgatccgggcaccgcgtccctgcctttgttaatggactccgttattcaggccttggccgaattagaacagaaggttcccgccgctaaaaccagacacaccgcatccgcttggttgatgtccgccccgaactctggaccccataatcgtttgtatcacttcctcctgggtgcctggagccttaatgccacagagttagatccttgccccctatcccctgaactgcttggcctcacaaaagaggtggctagacacgatgtacgtgagggcaaggagtatggagtcgtgctggcacctgacggctctaccgtggccgttgaacctttattggcaggacttgaggccggcctgcagggccgacgagtcatcaacctccccctggacagcatggcggcaccttgggagactggagatacattccccgacgtagttgcaattgcccctgatgtgagagccacaagttccccggggctaagggatggatcaccggatgtcaccactgccgacataggcgctaacacacccgatgcaaccaaaggctgcccagatgttcaagcatcactccccgacgctaaagcgaaatcccccccaaccatggtggacagcttgctggctgtgactcttgccgggaatctcggcctgacgtttctgaggggctcccaaactcagagccaccccgacctaggaactgaagggtgttgggaccagctctccgcccctcggactttcaccttgttagaccccaaagcttctcttttaaccatggcgttcctcaacggcgcgttagacggtgtgattttgggcgactacctcagccgaacccccgaacccaggccctccctctctcatctcctgagccagtactacggagctggagtggctcgagatcccgggtttagaagtaattttagaagacagaacggcgccgccttgacaagcgcatccattctggcccagcaggtctggggtaccctagtgctacttcaaagactggaaccggtgcatctacagcttcaatgcatgtcgcaggaacaactagctcaagtggcagcaaatgctaccaaagagtttacagaggcgtttctcggatgtcctgctatacaccctcgctgccgttggggcgctgccccatacagagggagacccaaacttctgcagcttccgttaggatttctctacgtccatcacacgtatgtccccgcccccccttgtactgacttcacacggtgtgccgccaatatgagatcaatgcagagataccatcaggatacacagggttggggagacatcggttacagtttcgtggtaggatcagacggatatgtatacgaaggcagagggtggcactgggtgggggcacacacactcggacacaatagtagagggtttggagtggccatagtgggtaattatactgcagccctgcctacagaagctgctctgagaacagtacgtgacaccttgccttcctgcgccgttagagccggcttgctcagaccagattacgccctgctcgggcaccgccagttggtgcgcaccgactgcccaggcgatgcactcttcgatttactgcgtacctggccacatttcacagctgtttctctcaggtccctccattacaccgcccgccgaccaagtgtttatacgtcaagtacccggccccttccacctgcctgtaacagttgtgccagaaccgcctccgcgagaccacccacgagccgccgacatgtgtacagcgggaacctgggccctgccttcgccggtcactctgcaggaaacatacccgacccagttacttcagcctacgccgccagcgcccagccccaaacacagcctgcctgtccattcccatcgagttag

SEQ ID NO: 294838 - DNA, 2386 bp, Artificial Sequence
  derived and/or modified sequence
gcttctctcctctccctcaacacagccggtcttaccagtacagcaggcggcagctgagagtcccctctggtggccagcagcggctacagagccgtcactatggggagggacaggacttgaggggttgcctcggtccacctcactggagaatgggcagagtttatggagtctgaaccacctggtctccaggcccctctggggatgggcctggcttactgaccactgacctcagcctaggagggacagaagagactgggggagaccaggatgcccagatgaccttgacccagggtacgctgccccatgtccctgctgcctcccgcccacagctctacgagaggcaggtctgtcattcgccgctggactttgacagtggtcaaaggctctgctcagttctctgtgcctgtctccctccagcactgccgaggttctctgccgaggccaaccagaaataccccttggaagctggaatcctgcaacaatggcccagggtgtcctctggatcctactcggattgctactgtggtcagacccagggacagcctccctgcccctgctcatggactctgtcatccaggccctggctgagctggagcagaaagtgccagctgccaagaccagacacacagcttctgcgtggctgatgtcagctccaaactctggcccccacaatcgcctctaccacttcctgctgggggcatggagcctcaatgctacagagttggatccctgcccactaagcccagagctgttaggcctgaccaaggaggtggcccgacatgacgtacgagaagggaaggaatatggggtggtgctggcacctgatggctcgaccgtggctgtggagcctctgctggcggggctggaggcagggctgcaagggcgcagggtcataaatttgcccttggacagcatggctgccccttgggagactggagatacctttccagatgttgtggccattgctccagatgtaagagccacctcctccccaggactcagggatggctctccagatgtcaccactgcagatattggagccaacactccagatgctacaaaaggctgtccagatgtccaagcttccttgccagatgccaaagccaagtccccaccgaccatggtggacagcctcctggcagtcaccctggctggaaacctgggcctgaccttcctccgaggttcccagacccagagccatccagacctgggaactgagggctgctgggaccagctctctgcccctcggacctttacgcttttggaccccaaggcatctctgttaaccatggccttcctcaatggcgccctggatggggtcatccttggagactacctgagccggactcctgagccccggccatccctcagccacttgctgagccagtactatggggctggggtggccagagacccagggttccgcagcaacttccgacggcagaacggtgctgctctgacttcagcctccatcctggcccagcaggtgtggggaacccttgtccttctacagaggctggagccagtacacctccagcttcagtgcatgagccaagaacagctggcccaggtggctgccaatgctaccaaggaattcactgaggccttcctgggatgcccggccatccacccccgctgccgctggggagcggcgccttatcggggccgcccgaagctgctgcagctgccgctgggattcttgtacgtgcatcacacctacgtgcctgcaccaccctgcacggacttcacgcgctgcgcagccaacatgcgctccatgcagcgctaccaccaggacacgcaaggctggggagacatcggctacagtttcgtggtgggctcggacggctacgtgtacgagggacgcggctggcactgggtgggcgcccacacgctcggccacaactcccggggcttcggcgtggccatagtgggcaactacaccgcggcgctgcccaccgaggccgctctgcgcacggtgcgcgacacgctcccgagttgtgcggtgcgcgccggcctcctgcggccagactacgcgctgctgggccaccgccagctggtgcgcaccgactgccccggcgacgcgctcttcgacctgctgcgcacctggccgcacttcaccgcggtgagtcttcgcagcctgcactacacggcccgccgcccctccgtctacacaagctccacgaggcccctgccccctgcctgtaacagctgtgcccgcacagcctcagccaggcccccaacttcccggcggcacgtctattcaggaaacctaggcccagcctttgcgggtcactctgcgggcaacatccctgatcctgtgacttctgcctatgcagcctcagctcagccccagacccagccagcctgtcctttccccagctcctaa

SEQ ID NO: 294839 - DNA, 1905 bp, Artificial Sequence
  derived and/or modified sequence
atggcccagggcgtgctgtggatcctgctgggcctgctgctgtggagcgaccccggcaccgccagcctgcccctgctgatggacagcgtgatccaggccctggccgagctggagcagaaggtgcccgccgccaagaccagacacaccgccagcgcctggctgatgagcgcccccaacagcggcccccacaacagactgtaccacttcctgctgggcgcctggagcctgaacgccaccgagctggacccctgccccctgagccccgagctgctgggcctgaccaaggaggtggccagacacgacgtgagagagggcaaggagtacggcgtggtgctggcccccgacggcagcaccgtggccgtggagcccctgctggccggcctggaggccggcctgcagggcagaagagtgatcaacctgcccctggacagcatggccgccccctgggagaccggcgacaccttccccgacgtggtggccatcgcccccgacgtgagagccaccagcagccccggcctgagagacggcagccccgacgtgaccaccgccgacatcggcgccaacacccccgacgccaccaagggctgccccgacgtgcaggccagcctgcccgacgccaaggccaagagcccccccaccatggtggacagcctgctggccgtgaccctggccggcaacctgggcctgaccttcctgagaggcagccagacccagagccaccccgacctgggcaccgagggctgctgggaccagctgagcgcccccagaaccttcaccctgctggaccccaaggccagcctgctgaccatggccttcctgaacggcgccctggacggcgtgatcctgggcgactacctgagcagaacccccgagcccagacccagcctgagccacctgctgagccagtactacggcgccggcgtggccagagaccccggcttcagaagcaacttcagaagacagaacggcgccgccctgaccagcgccagcatcctggcccagcaggtgtggggcaccctggtgctgctgcagagactggagcccgtgcacctgcagctgcagtgcatgagccaggagcagctggcccaggtggccgccaacgccaccaaggagttcaccgaggccttcctgggctgccccgccatccaccccagatgcagatggggcgccgccccctacagaggcagacccaagctgctgcagctgcccctgggcttcctgtacgtgcaccacacctacgtgcccgcccccccctgcaccgacttcaccagatgcgccgccaacatgagaagcatgcagagataccaccaggacacccagggctggggcgacatcggctacagcttcgtggtgggcagcgacggctacgtgtacgagggcagaggctggcactgggtgggcgcccacaccctgggccacaacagcagaggcttcggcgtggccatcgtgggcaactacaccgccgccctgcccaccgaggccgccctgagaaccgtgagagacaccctgcccagctgcgccgtgagagccggcctgctgagacccgactacgccctgctgggccacagacagctggtgagaaccgactgccccggcgacgccctgttcgacctgctgagaacctggccccacttcaccgccgtgagcctgagaagcctgcactacaccgccagaagacccagcgtgtacaccagcagcaccagacccctgccccccgcctgcaacagctgcgccagaaccgccagcgccagaccccccaccagcagaagacacgtgtacagcggcaacctgggccccgccttcgccggccacagcgccggcaacatccccgaccccgtgaccagcgcctacgccgccagcgcccagccccagacccagcccgcctgccccttccccagcagctag

SEQ ID NO: 294840 - DNA, 1905 bp, Artificial Sequence
  derived and/or modified sequence
atggcgcagggtgtcctgtggattctgctgggcctgctgttgtggtcagatccgggcaccgcctccctccctcttctgatggattccgtgatccaggctctcgccgagctggaacagaaggtgccggccgccaaaactcgacatacagcctccgcttggctaatgagtgctcccaactccggaccacataataggctgtaccatttcttacttggagcatggagtctgaacgctaccgaactggatccctgtcctctgtcgcccgaattgttaggactgacaaaggaagtggcgcgtcacgacgtgcgagagggaaaggagtacggtgtggtgcttgccccagatggttccacagttgccgtggaaccgctgcttgctgggctggaggcggggctgcagggccgtcgtgtgattaatctgcctctggacagtatggctgccccctgggagactggagataccttcccagacgtggtggccatcgcaccagatgtgcgtgcgactagttcaccgggcttgcgcgatggatctcctgatgtaacgactgccgacataggggccaatactccagatgcaacgaaaggatgccctgacgtccaagccagcttgcccgacgccaaagctaagtctccccctacaatggttgactccctgctggccgtaacattagcagggaacctggggttaactttcctgcggggcagccagacccagagccacccagacttgggcaccgaaggttgctgggaccagctgtcggctccaagaacgtttaccttactcgatcccaaggccagcctcctgacaatggcatttttgaacggcgccctggacggtgtaatcttgggagactatttgagccgcacgccagagccaagaccctcactgtcacatctgctcagccagtactacggagccggtgtcgcccgggaccctggctttcgatcaaattttcgtaggcagaatggggcagccttgacctctgcgtctatcttagcccagcaggtctggggcactctggtgctcctgcagcggttagaaccagtgcacctccaactccagtgtatgtctcaggaacagcttgctcaggtggctgccaatgctactaaggaattcacggaggccttcctcggttgccccgcgattcatcccagatgtcggtggggggcggcaccgtatagagggcgacccaagttgctgcagcttcccctcggctttctctatgtccatcacacctatgtgcctgctcctccgtgcacagactttacgcggtgcgccgcaaacatgcgctcgatgcaacggtaccaccaggacacccaaggctggggagatattggctactcctttgtagtcggatctgatggatatgtgtacgaaggccgcggctggcattgggtaggagctcatactctggggcataactcccgagggttcggggtggcaattgtcggaaattataccgccgctctgccaaccgaggccgcactcagaaccgtgcgcgatactctccctagttgcgccgtcagggctggcctcctacgcccagactacgcgttgctaggccacagacagctggtccgtactgattgtcctggagatgcactttttgaccttctacgcacgtggccacatttcactgctgtgtccctcaggtcgttgcactacaccgctcgaaggccaagtgtgtacacctccagcacgcgccccctgccacctgcctgcaattcttgtgctcgcacagcttctgcccggcctcccacatcccggcgacacgtttatagcggaaacctggggcctgcttttgcagggcactcggctgggaatattcccgaccccgtgacctcagcctatgccgcttctgcacagccacagacacagccagcctgtcccttcccctctagttag

SEQ ID NO: 294841 - DNA, 1905 bp, Artificial Sequence
  derived and/or modified sequence
atggcccagggcgtgctgtggatcctgctgggcctgctgctgtggagcgaccccggcacagccagcctgcccctgctgatggattctgtcatccaggccctggccgagctggagcagaaggtgcctgctgccaagaccaggcacacagccagcgcctggctgatgtctgcccccaacagcggcccccacaaccggctgtaccacttcctgctgggcgcctggagcctgaatgccacagagctggacccctgccccctgagccctgagctgctgggcctgaccaaggaggtggcccggcatgatgtgcgggagggcaaggagtatggagtggtgctggccccagatggcagcacagtggccgtggagcccctgctggccggcctggaggccggcctgcagggcagaagagtcatcaacctgcccctggacagcatggccgccccctgggagactggagacaccttcccagatgtggtggccatcgccccagatgtgcgggccaccagcagccctggcctgagagatggcagcccagatgtgaccacagctgacattggagccaacaccccagatgccaccaagggctgcccagatgtgcaggccagcctgcctgatgccaaggccaagagcccccccaccatggtggacagcctgctggccgtgaccctggccggcaacctgggcctgaccttcctgcggggcagccagacccagagccacccagacctgggcacagagggctgctgggaccagctgagcgcccccaggaccttcaccctgctggaccccaaggccagcctgctgaccatggccttcctgaatggagccctggatggagtcatcctgggggactacctgagcaggaccccagagccccggcccagcctgagccacctgctgagccagtactacggggccggcgtggcccgggaccccggcttccgcagcaacttccggcggcagaatggagctgccctgaccagcgccagcatcctggcccagcaggtgtggggcaccctggtgctgctgcagaggctggagcctgtgcacctgcagctgcagtgcatgagccaggagcagctggcccaggtggccgccaatgccaccaaggagttcacagaggccttcctgggctgcccagccatccacccccgctgccgctggggcgccgccccctaccggggccggcccaagctgctgcagctgcccctgggcttcctgtatgtgcaccacacctacgtgcctgccccaccctgcacagacttcacccgctgtgccgccaacatgaggtccatgcagcgctaccaccaggacacccagggctggggagacatcggctacagctttgtggtgggcagtgatggctacgtgtatgagggccggggctggcactgggtgggcgcccacaccctgggccacaacagccggggcttcggcgtggccatcgtgggcaactacacagctgccctgcccacagaggccgccctgaggacagtgcgggacaccctgcccagctgtgctgtgcgggccggcctgctgcggccagactatgccctgctgggccaccggcagctggtgaggacagactgccctggagatgccctgtttgacctgctgcggacctggccccacttcaccgctgtgtccctgcggagcctgcactacacagcccggcggcccagcgtgtacaccagcagcacccggcccctgcccccagcctgcaacagctgtgccaggacagccagcgcccggccccccaccagcagaagacatgtgtacagcggcaacctgggccctgcctttgctggccacagcgctggcaacatcccagaccctgtgaccagcgcctatgctgccagcgcccagccccagacccagcctgcctgccccttccccagcagctag

SEQ ID NO: 294842 - DNA, 1905 bp, Artificial Sequence
  derived and/or modified sequence
atggcccagggcgtgctgtggatcctgctgggcctgctgctgtggagtgacccagggaccgcgtcgcttcctctcctgatggacagcgtgatccaggcactcgctgagttagaacagaaggttcctgctgcaaaaacacgccatacggcctcagcttggctgatgagtgcacctaacagcggacctcacaatcgtttgtaccactttttgctgggtgcttggtcgcttaacgccactgaactcgacccttgcccgctgtctccagagctgctggggctaactaaagaggttgctaggcatgacgtgagggagggaaaagagtatggggttgtgttggctcccgacggctctacagtggcagtcgaacctctgctcgctggtctggaggccgggctccagggtcggcgtgttatcaatctgcccctggactctatggctgcaccatgggaaacaggggacaccttcccagacgtggtggccattgctcccgatgtccgggcaacaagttctccaggattacgagacgggagccctgacgtgacaaccgctgatatcggagctaatactcctgacgcaacaaaaggatgccctgacgttcaggcatctctgcccgatgccaaggcaaagtctccccctaccatggtcgacagcctgctggctgtgaccctcgcgggaaacctcggcttgacctttctcaggggaagccaaacacagtctcaccccgatttaggtaccgaaggttgctgggaccagctgagtgccccccgcacctttaccctgctggatcctaaggcgtctctcttaacgatggcatttctgaacggggccctggatggtgtgattttgggtgactacctgagcagaacaccagaaccaaggcccagtctgagtcacttgctgtcccagtattacggagctggtgttgctcgcgacccgggctttcgttcaaactttcgccgacagaacggcgcagccctgacaagcgcttcaatactcgcccaacaggtatgggggacactggttcttttacagagactggaacccgtgcacctccaactccagtgcatgtcccaagaacagctcgcacaggtcgccgctaatgcgacaaaagaatttactgaagcattcttggggtgtccagcgatccacccccgatgtcgctggggcgccgccccataccggggccggcctaagctattgcagctgccattgggctttctctatgtgcaccacacctatgtgccagcccctccttgcacggattttaccaggtgcgccgccaacatgagaagcatgcagcgctaccaccaggacacacagggctggggagacattgggtatagctttgtcgtaggctccgatgggtatgtttatgaagggcggggatggcattgggtgggcgcccacactctgggccacaacagtcggggtttcggcgtggctatagtaggcaattataccgccgccttaccaactgaggctgctctgaggactgtgcgggatacactccccagttgtgcagtgagagcgggcctgctccgccccgactacgccctcctgggtcatcgacagctggtccgcactgactgtccaggcgacgccctgtttgatctgcttagaacttggccccatttcacggcagtatccctcagaagtctgcactacacggcgcgtcgcccttccgtgtacactagcagcacccggccccttccaccggcttgtaacagctgcgctagaactgcctctgctaggccccccacctccagacgccacgtgtatagcggaaatctgggacctgcattcgccggacactctgcgggaaacattcctgaccctgtgaccagcgcctatgccgctagcgctcagccccaaacccagcctgcttgtccgttcccctcttcctag

SEQ ID NO: 294843 - RNA, 863 nt, Artificial Sequence
  derived and/or modified sequence
gggaaauaagagagaaaagaagaguaagaagaaauauaagagccaccaugguguccaagggugaggaauuguuuaccgggguggugccuauucucgucgaacuugacggggaugugaauggacacaaguuuucgguauccggagaaggagagggugacgccacauacggaaagcuuacacucaaauucaucuguacgacggggaaacugcccguacccuggccuacgcucguaaccacgcugacuuauggagugcagugcuuuagcagauaccccgaccauaugaagcagcacgacuucuucaagucggcgaugcccgagggguacgugcaagagaggaccauuuucuucaaagacgauggcaauuacaaaacacgcgcagaagucaaguuugagggcgauacucuggucaaucggaucgaauugaagggaaucgauuucaaagaagauggaaacauccuuggccauaagcucgaguacaacuauaacucgcauaaugucuauaucauggcugacaagcagaaaaacgguaucaaagucaacuuuaagauccgacacaauauugaggacgguucggugcagcuugcggaccacuaucaacagaauacgccgauuggggaugguccgguccuuuugccggauaaccauuaucucucaacccagucagcccugagcaaagauccaaacgagaagagggaccacauggucuugcucgaauucgugacagcggcagggaucacucugggaauggacgaguuguacaagugauaagcugccuucugcggggcuugccuucuggccaugcccuucuucucucccuugcaccuguaccucuuggucuuugaauaaagccugaguaggaag

SEQ ID NO: 294844 - RNA, 1905 nt, Artificial Sequence
  derived and/or modified sequence
auggcacagggugugcucuggauccuguuagguuugcuucucugguccgaucccgguacugcuucacucccccuauugauggacucgguaauccaagcccuggccgaacucgagcagaaggugcccgccgcgaaaacacgccauacggcuucagcauggcuuaugucugcucccaacuccgguccacauaaucggcuuuaucauuuccuacucggugcuuggucucugaaugcaacagagcuagauccuuguccacugagcccagaacuguugggcuuaacaaaggagguugccagacaugacguucgcgagggaaaggaguauggggugguucuggccccagauggcagcacuguggcuguggaaccucuacuggcggguuuggaggcuggccuccaaggucggcgcgucauuaaccugccucuugacucuauggccgcuccuugggagacaggggacaccuuuccugaugucgucgccauugccccugaugugagagcuaccucaucuccggggcucagagauggaucuccggacgucacuacagccgacauaggagcuaacacucccgacgcgacuaagggaugcccugacguucaggccucucuccccgaugcgaaggccaaaucaccgccaacgaugguagacucacugcuggcaguuacuuuggcugguaacuugggucugacuuuccugagaggaucccagacucagagccacccugaucucggaaccgaaggauguugggaccaguuguccgcaccgagaaccuucacucucuuggacccuaaggccagucuguuaaccauggccuuccucaauggggcccuggacggugugaucuuaggcgacuaucugucccgcacaccagaaccacggccuucuuuaucucaccuucugucccaguauuacggggccgguguagcucgcgaccccggauucaggucuaacuuuaggcgucaaaauggcgcugccuugaccagcgcuucaauacuggcacaacaaguuuggggaacucuggucuugcugcagcgauuggaacccguucaccuucaguugcaguguaugucucaggagcaacuugcccagguggcugcuaacgcuacuaaggaguuuacagaagccuuccucgggugccccgcaauccauccccgcugccgauggggggccgcaccauacagaggacguccuaagcugcugcagcuacccuugggcuuccuuuauguccaccauaccuacguucccgcgccaccuugcaccgacuuuacuagaugcgccgccaacaugcggucaaugcagcguuaccaccaggauacacagggcuggggugauauuggguauuccuuugugguaggcagcgaugguuacguguacgaagguagaggcuggcacuggguuggggcgcacacacugggacauaauagccggggcuucggaguggcaauugugggcaauuauacugccgcccucccuacggaggccgcuuugcgaacagugagagacacccugccaaguugcgcuguccgggcuggcuuacugcggccagacuaugcguugcucgggcaucggcaacugguuaggacagauugucccggggaugcccuuuucgaccuucuccggaccuggccccacuucacugccgugucccugcgcagccugcacuauaccgcccggagaccgucaguauauaccuccaguacccguccuuugccccccgcguguaacagcugcgcacggaccgcaucugcaaggccgcccaccucacgaagacacgucuauucaggaaaccugggcccagccuucgcaggacacuccgccggaaacauuccugauccggucaccagcgcguaugcugcaucugcccagccucagacucagcccgcuugcccauuuccuagcucauag

SEQ ID NO: 294845 - RNA, 1905 nt, Artificial Sequence
  derived and/or modified sequence
auggcucagggcgugcuguggauccuucugggucuguugcuuugguccgauccgggcaccgcgucccugccuuuguuaauggacuccguuauucaggccuuggccgaauuagaacagaagguucccgccgcuaaaaccagacacaccgcauccgcuugguugauguccgccccgaacucuggaccccauaaucguuuguaucacuuccuccugggugccuggagccuuaaugccacagaguuagauccuugcccccuauccccugaacugcuuggccucacaaaagagguggcuagacacgauguacgugagggcaaggaguauggagucgugcuggcaccugacggcucuaccguggccguugaaccuuuauuggcaggacuugaggccggccugcagggccgacgagucaucaaccucccccuggacagcauggcggcaccuugggagacuggagauacauuccccgacguaguugcaauugccccugaugugagagccacaaguuccccggggcuaagggauggaucaccggaugucaccacugccgacauaggcgcuaacacacccgaugcaaccaaaggcugcccagauguucaagcaucacuccccgacgcuaaagcgaaaucccccccaaccaugguggacagcuugcuggcugugacucuugccgggaaucucggccugacguuucugaggggcucccaaacucagagccaccccgaccuaggaacugaaggguguugggaccagcucuccgccccucggacuuucaccuuguuagaccccaaagcuucucuuuuaaccauggcguuccucaacggcgcguuagacggugugauuuugggcgacuaccucagccgaacccccgaacccaggcccucccucucucaucuccugagccaguacuacggagcuggaguggcucgagaucccggguuuagaaguaauuuuagaagacagaacggcgccgccuugacaagcgcauccauucuggcccagcaggucugggguacccuagugcuacuucaaagacuggaaccggugcaucuacagcuucaaugcaugucgcaggaacaacuagcucaaguggcagcaaaugcuaccaaagaguuuacagaggcguuucucggauguccugcuauacacccucgcugccguuggggcgcugccccauacagagggagacccaaacuucugcagcuuccguuaggauuucucuacguccaucacacguauguccccgcccccccuuguacugacuucacacggugugccgccaauaugagaucaaugcagagauaccaucaggauacacaggguuggggagacaucgguuacaguuucgugguaggaucagacggauauguauacgaaggcagaggguggcacugggugggggcacacacacucggacacaauaguagaggguuuggaguggccauaguggguaauuauacugcagcccugccuacagaagcugcucugagaacaguacgugacaccuugccuuccugcgccguuagagccggcuugcucagaccagauuacgcccugcucgggcaccgccaguuggugcgcaccgacugcccaggcgaugcacucuucgauuuacugcguaccuggccacauuucacagcuguuucucucaggucccuccauuacaccgcccgccgaccaaguguuuauacgucaaguacccggccccuuccaccugccuguaacaguugugccagaaccgccuccgcgagaccacccacgagccgccgacauguguacagcgggaaccugggcccugccuucgccggucacucugcaggaaacauacccgacccaguuacuucagccuacgccgccagcgcccagccccaaacacagccugccuguccauucccaucgaguuag

SEQ ID NO: 294846 - protein, 172 aa, Artificial Sequence
  derived and/or modified sequence
MASDEGKLFVGGLSFDTNEQSLEQVFSKYGQISEVVVVKDRETQRSRGFGFVTFENIDDAKDAMMAMNGKSVDGRQIRVDQAGKSSDNRSRGYRGGSAGGRGFFRGGRGRGRGFSRGGGDRGYGGNRFESRSGGYGGSRDYYSSRSQSGGYSDRSSGGSYRDSYDSYATHNE

SEQ ID NO: 294847 - protein, 538 aa, Artificial Sequence
  derived and/or modified sequence
MGPGPPAAGAAPSPRPLSLVARLSYAVGHFLNDLCASMWFTYLLLYLHSVRAYSSRGAGLLLLLGQVADGLCTPLVGYEADRAASCCARYGPRKAWHLVGTVCVLLSFPFIFSPCLGCGAATPEWAALLYYGPFIVIFQFGWASTQISHLSLIPELVTNDHEKVELTALRYAFTVVANITVYGAAWLLLHLQGSSRVEPTQDISISDQLGGQDVPVFRNLSLLVVGVGAVFSLLFHLGTRERRRPHAEEPGEHTPLLAPATAQPLLLWKHWLREPAFYQVGILYMTTRLIVNLSQTYMAMYLTYSLHLPKKFIATIPLVMYLSGFLSSFLMKPINKCIGRNMTYFSGLLVILAFAAWVALAEGLGVAVYAAAVLLGAGCATILVTSLAMTADLIGPHTNSGAFVYGSMSFLDKVANGLAVMAIQSLHPCPSELCCRACVSFYHWAMVAVTGGVGVAAALCLCSLLLWPTRLRRSFLAWRRGRGEDKGPGYSWIPTVLVQPPRPTSPFLWEAPLAWRCTRKKWSGAGTKPWPREDWGTH

SEQ ID NO: 294848 - DNA, 1617 bp, Artificial Sequence
  derived and/or modified sequence
atgggccccggcccccccgccgccggcgccgcccccagccccagacccctgagcctggtggccagactgagctacgccgtgggccacttcctgaacgacctgtgcgccagcatgtggttcacctacctgctgctgtacctgcacagcgtgagagcctacagcagcagaggcgccggcctgctgctgctgctgggccaggtggccgacggcctgtgcacccccctggtgggctacgaggccgacagagccgccagctgctgcgccagatacggccccagaaaggcctggcacctggtgggcaccgtgtgcgtgctgctgagcttccccttcatcttcagcccctgcctgggctgcggcgccgccacccccgagtgggccgccctgctgtactacggccccttcatcgtgatcttccagttcggctgggccagcacccagatcagccacctgagcctgatccccgagctggtgaccaacgaccacgagaaggtggagctgaccgccctgagatacgccttcaccgtggtggccaacatcaccgtgtacggcgccgcctggctgctgctgcacctgcagggcagcagcagagtggagcccacccaggacatcagcatcagcgaccagctgggcggccaggacgtgcccgtgttcagaaacctgagcctgctggtggtgggcgtgggcgccgtgttcagcctgctgttccacctgggcaccagagagagaagaagaccccacgccgaggagcccggcgagcacacccccctgctggcccccgccaccgcccagcccctgctgctgtggaagcactggctgagagagcccgccttctaccaggtgggcatcctgtacatgaccaccagactgatcgtgaacctgagccagacctacatggccatgtacctgacctacagcctgcacctgcccaagaagttcatcgccaccatccccctggtgatgtacctgagcggcttcctgagcagcttcctgatgaagcccatcaacaagtgcatcggcagaaacatgacctacttcagcggcctgctggtgatcctggccttcgccgcctgggtggccctggccgagggcctgggcgtggccgtgtacgccgccgccgtgctgctgggcgccggctgcgccaccatcctggtgaccagcctggccatgaccgccgacctgatcggcccccacaccaacagcggcgccttcgtgtacggcagcatgagcttcctggacaaggtggccaacggcctggccgtgatggccatccagagcctgcacccctgccccagcgagctgtgctgcagagcctgcgtgagcttctaccactgggccatggtggccgtgaccggcggcgtgggcgtggccgccgccctgtgcctgtgcagcctgctgctgtggcccaccagactgagaagaagcttcctggcctggagaagaggcagaggcgaggacaagggccccggctacagctggatccccaccgtgctggtgcagccccccagacccaccagccccttcctgtgggaggcccccctggcctggagatgcaccagaaagaagtggagcggcgccggcaccaagccctggcccagagaggactggggcacccactag

SEQ ID NO: 294849 - DNA, 1617 bp, Artificial Sequence
  derived and/or modified sequence
atgggccccgggccgcctgctgctggcgccgcaccttcacctaggcccttgagcctcgtcgcaaggttgagttatgccgtcggacactttcttaatgacctgtgcgcaagcatgtggtttacctacctgctgctgtacctccactccgtgcgggcatactctagccgaggtgccggcctgctcctgctgttagggcaagtggccgacggactatgtacgcctctcgttggctatgaagccgacagagctgcgtcatgttgtgccaggtacggcccccggaaagcttggcacctggttggtaccgtgtgcgtgctgctttcttttccatttattttcagcccgtgtctggggtgcggcgcagccacccctgaatgggctgccctgctttactatggcccttttatcgtgatttttcagttcggctgggcttccacccagatcagtcatctctccctgatccctgagctggtaactaacgatcatgagaaggttgaactcacagcccttcgatacgcctttactgtggtggctaatattacagtctacggagctgcctggttgctcctccacctccaggggagctcgcgcgtggaacctacccaggacatcagcataagtgatcagctgggaggccaggatgtccctgttttcagaaacctgtcacttctggtcgtcggggtgggagcagtgttcagcctcctcttccacttgggcacacgcgagagacggaggccacatgctgaggaacccggggaacacactccactgctagccccagctaccgcacagcccctgcttctctggaagcactggctccgcgagccagccttttatcaagtcggtattctttacatgaccactcgtctgatagtgaatctttctcagacttatatggctatgtacctaacctactctctccatctgccaaaaaagtttattgctactatccctttggtcatgtacttaagcgggttcctttctagctttcttatgaagcccattaacaagtgtatcggacgcaacatgacttacttctccggcctgctagtgatacttgcctttgccgcctgggtggccctcgcagagggacttggggtggccgtctacgccgcggctgtgcttcttggagccggctgcgccacgatactcgtaacctcgctagcgatgactgctgatttaatcgggccacatactaactccggcgccttcgtgtatggctccatgtccttccttgataaggttgcgaatggactagcagtgatggctattcagagcttgcacccttgcccttccgaactttgttgcagggcctgtgtaagcttttatcactgggccatggtcgccgtgacagggggggtcggagttgcagctgcgttatgcctgtgctccttgctgttatggcccactcgcttgaggagaagcttcctggcatggaggcgagggcgaggtgaagataaaggccccggttatagttggatccccactgtgctggtgcagccacccagaccaacaagcccattcctttgggaggcacccctggcctggagatgcacgagaaaaaaatggagcggcgcggggaccaagccgtggcctcgggaagactggggcacacactag

SEQ ID NO: 294850 - DNA, 2284 bp, Artificial Sequence
  derived and/or modified sequence
tggggcggacgcggcggacgtgggtgagggcgcggccgtaagagagcgggacgcggggtgcccggcgcgtggtgggggtccccggcgcctgcccccacggcacccaagaaggcctggccagggtaccctccgcggagcccgggggtggggggcgcgggcccggcgccgcgatgggcccgggacccccagcggccggagcggcgccgtccccgcggccgctgtccctggtggcgcggctgagctacgccgtgggccacttcctcaacgacctgtgcgcgtccatgtggttcacctacctgctgctctacctgcactcggtgcgcgcctacagctcccgcggcgcggggctgctgctgctgctgggccaggtggccgacgggctgtgcacaccgctcgtgggctacgaggccgaccgcgccgccagctgctgcgcccgctacggcccgcgcaaggcctggcacctggtcggcaccgtctgcgtcctgctgtccttccccttcatcttcagcccctgcctgggctgtggggcggccacgcccgagtgggctgccctcctctactacggcccgttcatcgtgatcttccagtttggctgggcctccacacagatctcccacctcagcctcatcccggagctcgtcaccaacgaccatgagaaggtggagctcacggcactcaggtatgcgttcaccgtggtggccaacatcaccgtctacggcgccgcctggctcctgctgcacctgcagggctcgtcgcgggtggagcccacccaagacatcagcatcagcgaccagctggggggccaggacgtgcccgtgttccggaacctgtccctgctggtggtgggtgtcggcgccgtgttctcactgctattccacctgggcacccgggagaggcgccggccgcatgcggaggagccaggcgagcacacccccctgttggcccctgccacggcccagcccctgctgctctggaagcactggctccgggagccggctttctaccaggtgggcatactgtacatgaccaccaggctcatcgtgaacctgtcccagacctacatggccatgtacctcacctactcgctccacctgcccaagaagttcatcgcgaccattcccctggtgatgtacctcagcggcttcttgtcctccttcctcatgaagcccatcaacaagtgcattgggaggaacatgacctacttctcaggcctcctggtgatcctggcctttgccgcctgggtggcgctggcggagggactgggtgtggccgtgtacgcagcggctgtgctgctgggtgctggctgtgccaccatcctcgtcacctcgctggccatgacggccgacctcatcggtccccacacgaacagcggagcgttcgtgtacggctccatgagcttcttggataaggtggccaatgggctggcagtcatggccatccagagcctgcacccttgcccctcagagctctgctgcagggcctgcgtgagcttttaccactgggcgatggtggctgtgacgggcggcgtgggcgtggccgctgccctgtgtctctgtagcctcctgctgtggccgacccgcctgcgacgctcttttcttgcctggagaagagggaggggagaggacaagggccctggctactcctggattcctacagtccttgtccagcctccaagacccacaagtcccttcctctgggaagcccccctggcctggaggtgcaccaggaagaagtggtctggggctggcactaagccatggcccagggaagactgggggacccactaggccaggatgagacctgcacgcagtggctcacagcagcacgatttgtgacagcccgaggcggagaacaccgaacacccagtgaaggtgaggggatcagcacggcgccgccaccgtgctggaacgagactcagccacaaggaggtgcgaagctctgacccaggccacagtgcggatgcaccttgaggatgtcacgctcagtgagagacaccagacacagaagggtacgctgtgatcccacttctatgaaatgtccaggacagaccaatccacagaatcagggagaggattcgtgggtgccgggactggggagggggacctgggggtgactaggtgacataatggggacagggctgccttctgggtgatgagaatgttctggaatcagatgggatggctgcacggcgtggtgaaggtactgaacgccacctcactgtaagacggtagattttgtattttaccacaataaacaaaacaaaacaaaaccaaaccaaacccaa

SEQ ID NO: 294851 - DNA, 1617 bp, Artificial Sequence
  derived and/or modified sequence
atgggccctggccccccagctgctggggccgcccccagcccccggcccctgagcctggtggcccggctgtcctatgctgtgggccacttcctgaatgacctgtgtgcctccatgtggttcacctacctgctgctgtacctgcacagcgtgcgggcctacagcagcagaggagctggcctgctgctgctgctgggccaggtggctgatggcctgtgcacccccctggtgggctatgaggccgacagagctgccagctgctgtgcccgctatggccccaggaaggcctggcacctggtgggcaccgtgtgtgtgctgctgtccttccccttcatcttcagcccctgcctgggctgtggggccgccaccccagagtgggccgccctgctgtactacggccccttcatcgtcatcttccagtttggctgggccagcacccagatcagccacctgagcctcatccctgagctggtgaccaatgaccacgagaaggtggagctgacagccctgcgctatgccttcaccgtggtggccaacatcaccgtgtatggagctgcctggctgctgctgcacctgcagggcagcagccgggtggagcccacccaggacatcagcatcagtgaccagctgggcggccaggatgtgcctgtgttcaggaacctgagcctgctggtggtgggcgtgggcgctgtgttcagcctgctcttccacctgggcacccgggagaggagaagacctcatgctgaggagcccggggagcacacccccctgctggccccagccacagcccagcccctgctgctgtggaagcactggctgcgggagcccgccttctaccaggtgggcatcctgtacatgaccaccaggctcatcgtgaacctgagccagacctacatggccatgtacctgacctacagcctgcacctgcccaagaagttcatcgccaccatccccctggtgatgtacctgagcggcttcctgagcagcttcctgatgaagcccatcaacaagtgcatcggcaggaacatgacctacttcagcggcctgctggtgatcctggcctttgctgcctgggtggccctggccgagggcctgggcgtggccgtgtatgctgctgctgtgctgctgggcgccggctgtgccaccatcctggtgaccagcctggccatgacagctgacctgattggcccccacaccaacagcggggcctttgtgtatggctccatgtccttcctggacaaggtggccaacggcctggccgtgatggccatccagagcctgcacccctgccccagcgagctgtgctgccgggcctgtgtgtccttctaccactgggccatggtggccgtgactggaggagtgggcgtggccgccgccctgtgcctgtgcagcctgctgctgtggcccacccggctgcggcgctccttcctggcctggaggcggggccgcggggaggacaagggccctggctacagctggatccccaccgtgctggtgcagcccccccggcccaccagccccttcctgtgggaggcccccctggcctggcgctgcaccaggaagaagtggagcggggccggcaccaagccctggccccgggaggactggggcacccactag

SEQ ID NO: 294852 - DNA, 1617 bp, Artificial Sequence
  derived and/or modified sequence
atgggccccggcccccccgccgccggcgccgcccccagcccccggccactgagccttgtggcccgactcagctacgctgtcgggcatttcctgaacgatttatgcgctagcatgtggtttacgtacttgcttctttatttgcactcagtgcgggcctatagctcaaggggagccggtctgctactgctcctaggtcaggttgctgacggactgtgtactccactggtgggctacgaggccgatcgggcggccagttgctgtgccaggtacgggccccgcaaagcttggcacctcgtgggcacagtgtgcgtgctcctgtcattccctttcattttcagtccctgcttaggctgcggggccgcgacccctgaatgggctgctttgctgtactacggaccttttattgtgatatttcagtttggctgggcatcaacccagataagccacctgagtctgatcccagagctagtgactaatgatcacgagaaggtggaattgacggccctgcgttacgcctttaccgtcgtcgccaacattactgtctacggcgcggcctggctgctcttgcatttacagggcagttctcgggtggaacccacccaggacataagcatatccgatcaacttgggggccaagacgtaccagtcttcagaaatttgtctctgcttgtcgtcggcgttggtgctgtttttagcctgctgttccatctgggaaccagagaacgcagaagacctcacgctgaagagcctggggagcatactcccctgctcgcacccgccacggcgcagccattgttactttggaagcattggctccgagaaccagccttctaccaggtgggaatcttgtatatgaccacccggctcatcgtaaacctttcccagacttacatggctatgtacctgacctatagcctgcatctccccaagaagtttatagcgaccataccacttgtaatgtacctcagcggttttttatcttcgtttctcatgaagcctatcaataagtgcataggtagaaatatgacctattttagtggcttactggtgatactggctttcgccgcgtgggtcgccctggcagaggggctaggcgtcgccgtgtatgcggcagcggtgcttctaggagccgggtgcgccaccattctagtgacttcactagctatgacagccgaccttatcggccctcatacaaactctggagcttttgtttacggtagtatgagctttctcgataaagtggctaatggcttagcagtaatggcaatccagtctctccacccctgtccaagtgagctttgttgccgtgcatgcgtgtctttttatcattgggctatggtagccgtgaccgggggggttggggttgccgcggcgctttgcctttgcagcttactcctgtggcctacaaggctccgacggtccttcctggcctggagacggggtcgaggcgaagataagggacccggttatagttggataccaacagtcctcgttcaaccccccaggcccacatcacctttcttatgggaagcacctctcgcttggcgctgcacccggaagaagtggtccggtgcgggcaccaaaccatggccaagagaagattgggggactcattag

SEQ ID NO: 294853 - DNA, 1617 bp, Artificial Sequence
  derived and/or modified sequence
atgggtcctggacctcccgcagctggggctgccccatcacctaggccactcagtctggtagctagattaagttacgcggtcggacactttctgaatgacttatgcgcctctatgtggtttacctacctcctgctttacctgcactcagtgcgggcttacagttcacgaggggctggcctactcctcttactgggccaggtggccgatggactgtgtaccccattagtggggtacgaggccgatagagccgctagctgttgcgcccgatatgggcctcgcaaggcctggcacttggtcgggactgtgtgcgtcctgctgtccttccccttcatctttagtccttgcctgggctgtggcgctgccacccccgagtgggcagcgctgctttactacggcccattcatcgtgatctttcagttcggatgggctagcacacagatctcccacctgagtctcatcccagagctggtgacaaacgatcacgagaaggtcgaactgaccgccttacgatacgccttcaccgtggttgccaacatcactgtttacggagccgcatggttgctgctgcacctgcaaggctcttcccgagttgaacccactcaggatatctccattagcgaccagctgggcggacaggatgttccggtgttccgaaatctttcccttttggtggtgggggtaggcgcagtgttttctctactgtttcatctagggacgagggagcgtcgcaggcctcatgcagaggaaccaggagaacatactccgctgctggccccagcaacggcgcagcctttattgctatggaaacactggctacgcgaaccagccttttaccaggtggggattctgtacatgaccactaggctgatagttaacttatcccagacatacatggccatgtacctcacttactctctgcacctgccgaagaagtttattgccaccattccactcgtgatgtatctctccgggtttttatctagctttctgatgaaacctatcaataaatgtataggcaggaatatgacttactttagcggcctgctcgtcattttagcgtttgctgcctgggttgctttggctgagggattgggtgtcgccgtctatgccgcagccgtgctcctaggggcaggctgcgctactattcttgtaacctcactggctatgacagccgacttaatcggtccccacactaattctggtgcctttgtttacggatctatgtctttccttgataaggtggccaacgggctggctgtgatggcgatccagtccttgcacccctgcccttctgagttgtgttgtcgggcatgtgtcagtttttatcattgggcaatggttgccgttactggaggagtgggtgtcgctgccgctctatgtttatgttcactccttctctggccaaccaggttacgccgatctttcctcgcgtggagacggggaaggggagaggataagggaccagggtacagttggattcctacagtgctcgtgcaaccaccccgtccgacttcaccttttctctgggaggctccactcgcctggcgctgtaccaggaagaagtggtccggtgctggcaccaagccttggcctagggaagactggggcactcattag

SEQ ID NO: 294854 - protein, 1310 aa, Artificial Sequence
  derived and/or modified sequence
MGTGPAQTPRSTRAGPEPSPAPPGPGDTGDSDVTQEGSGPAGIRGGETVIRAGMGDSPGRGAPERRHKAQPGRARKYEWRPEGPTSMGSLGQREDLQDEDRNSAFTWKVQANNRAYNGQFKEKVILCWQRKKYKTNVIRTAKYNFYSFLPLNLYEQFHRVSNLFFLIIIILQSIPDISTLPWFSLSTPMVCLLFIRATRDLVDDMGRHKSDRAINNRPCQILMGKSFKQKKWQDLCVGDVVCLRKDNIVPADMLLLASTEPSSLCYVETVDIDGETNLKFRQALMVTHKELATIKKMASFQGTVTCEAPNSRMHHFVGCLEWNDKKYSLDIGNLLLRGCRIRNTDTCYGLVIYAGFDTKIMKNCGKIHLKRTKLDLLMNKLVVVIFISVVLVCLVLAFGFGFSVKEFKDHHYYLSGVHGSSVAAESFFVFWSFLILLSVTIPMSMFILSEFIYLGNSVFIDWDVQMYYKPQDVPAKARSTSLNDHLGQVEYIFSDKTGTLTQNILTFNKCCISGRVYGPDSEATTRPKENPYLWNKFADGKLLFHNAALLHLVRTNGDEAVREFWRLLAICHTVMVRESPRERPDQLLYQAASPDEGALVTAARNFGYVFLSRTQDTVTIMELGEERVYQVLAIMDFNSTRKRMSVLVRKPEGAICLYTKGADTVIFERLHRRGAMEFATEEALAAFAQETLRTLCLAYREVAEDIYEDWQQRHQEASLLLQNRAQALQQVYNEMEQDLRLLGATAIEDRLQDGVPETIKCLKKSNIKIWVLTGDKQETAVNIGFACELLSENMLILEEKEISRILETYWENSNNLLTRESLSQVKLALVINGDFLDKLLVSLRKEPRALAQNVNMDEAWQELGQSRRDFLYARRLSLLCRRFGLPLAAPPAQDSRARRSSEVLQERAFVDLASKCQAVICCRVTPKQKALIVALVKKYHQVVTLAIGDGANDINMIKTADVGVGLAGQEGMQAVQNSDFVLGQFCFLQRLLLVHGRWSYVRICKFLRYFFYKSMASMMVQVWFACYNGFTGQPLYEGWFLALFNLLYSTLPVLYIGLFEQDVSAEQSLEKPELYVVGQKDELFNYWVFVQAIAHGVTTSLVNFFMTLWISRDTAGPASFSDHQSFAVVVALSCLLSITMEVILIIKYWTALCVATILLSLGFYAIMTTTTQSFWLFRVSPTTFPFLYADLSVMSSPSILLVVLLSVSINTFPVLALRVIFPALKELRAKEEKVEEGPSEEIFTMEPLPHVHRESRARRSSYAFSHREGYANLITQGTILRRGPGVSSDIASESLDPSDEEAASSPKESQ

SEQ ID NO: 294855 - DNA, 3933 bp, Artificial Sequence
  derived and/or modified sequence
atgggtacagggccagcacaaactccaagaagcactagagctggccccgaaccttctccggctccccctggacccggagataccggtgattctgacgtgacacaagaggggagcggaccagccggcattcggggaggagagaccgtcattagagccggcatgggggattcccctggccgcggggctcccgaacggcgacacaaggcgcaaccgggtagggcgagaaagtatgaatggaggcccgagggcccgacgtctatgggcagcctcggacagagagaggatttgcaggatgaggacaggaattctgctttcacatggaaagttcaagccaataacagggcctacaatggccaatttaaagaaaaagtaattctctgttggcagaggaaaaaatacaaaaccaacgtcatcaggactgcaaaatacaacttttatagctttctgcctctcaatttatacgaacagttccacagggtgtctaacctattttttctcattattatcatcctacagtctatacctgatatctcaacacttccctggttctcattgtccactccaatggtgtgtctgcttttcatcagagccacccgagacttggtagacgacatgggacggcacaagtctgaccgcgctatcaataaccgcccttgtcagatcttgatgggcaaaagttttaagcagaaaaagtggcaggatctttgtgttggcgatgtggtgtgcctgagaaaggataatattgtgccagctgatatgctgctgctggcgagtacagagcctagctccttgtgctacgtggagaccgtagatatcgacggagagacaaatttaaaatttcggcaggccctcatggtgactcataaggagttagctacaattaaaaaaatggccagcttccagggcactgtgacctgtgaggcccctaacagcagaatgcatcacttcgtcggttgtttagagtggaatgacaagaaatactcgctggacataggcaatttgctgttgcgtgggtgtcggatccggaataccgacacttgttacgggttagtgatctatgctggattcgataccaagattatgaagaattgcgggaaaatccatttgaagaggaccaaactggatttgctcatgaacaagcttgtggttgttattttcatctctgttgtactggtgtgtctggttctggccttcggattcggattctccgtgaaagagttcaaagaccaccattactatctcagtggcgtgcatgggtcttctgtcgctgccgaatccttttttgtattctggtccttccttatcttgctctctgtgaccatccctatgtctatgtttatacttagcgagtttatatatttgggtaacagcgtgttcatcgattgggatgttcagatgtactacaagccgcaggatgtccctgccaaggcaagatctacttccctaaacgatcatttgggacaagttgaatatatcttttccgataaaacaggtaccctgacacaaaatatcctgaccttcaataaatgctgtataagtgggagagtctacggacccgactcagaagctaccacccggccaaaggagaatccttatttatggaacaagttcgccgacgggaagttactgtttcacaatgcagctctgcttcatctggtgaggacgaatggggatgaggcggttcgtgagttttggcgtctgctcgctatttgtcacactgttatggtgagggagtctcctcgggaaaggcccgatcagctcctttatcaggccgcctctcctgatgaaggcgctctcgtcaccgctgccaggaacttcggatacgtgttcctgagtaggacacaggataccgtgaccataatggaattaggagaagagcgagtgtaccaggttctagccataatggacttcaactccactaggaaacgtatgagtgtgctagttcgcaaaccagagggcgccatatgcttgtacaccaagggcgccgacacagtgattttcgaaaggctgcaccgccgaggagccatggagttcgccaccgaggaggccctagccgcctttgcacaagaaacactgcgaactttgtgcctggcataccgcgaggtcgcagaagacatatatgaggactggcaacagaggcaccaggaggcctccctcctgttgcaaaatcgggcccaggccctccagcaagtctacaatgagatggaacaggacctcaggttgcttggcgccactgccatcgaagatcggctacaagacggcgtgcctgagacaattaagtgtcttaaaaagtcaaacatcaagatttgggtgctcactggggacaagcaggaaaccgccgtgaacatcgggttcgcatgtgaacttctgtctgaaaatatgctgattttggaggagaaagaaatatcacgcatcctggagacatactgggagaacagcaacaacctgctaactcgcgagagcctttcccaggtcaaactggctctagtcattaacggggattttctcgataaacttttagtctcgttaaggaaagagcccagagctttagcccagaacgtcaacatggatgaggcttggcaagaactgggccagtcacgccgtgacttcttatacgcaaggaggctgagtctgctatgtagaaggtttggactgccactggcggcgccacctgctcaggatagccgcgcccgccgctccagcgaagtgcttcaagaacgcgcgtttgtagatctggccagtaagtgtcaggcggtgatatgttgccgcgtgacgccaaagcagaaagctctcattgtggctctcgtcaaaaaataccaccaggtcgtgaccctagctattggcgacggggccaacgacatcaatatgatcaaaactgcagacgtgggagttggtctcgccggccaagagggcatgcaagcagtccagaatagcgatttcgtgctgggacagttctgcttcctccaaaggctcttgctggtgcacgggcgctggagctacgtccggatctgtaaattcctgcggtattttttctacaaatccatggcctcaatgatggttcaggtgtggtttgcttgttacaatggtttcacaggacagcctctttatgaggggtggtttctggccctgtttaacctcttgtatagcactctacctgtcctgtacatcggtctgttcgaacaagacgtgtccgccgagcagagccttgaaaagcccgagctctatgttgttggtcaaaaggacgagcttttcaactactgggtgtttgttcaggctatcgcacatggtgtgacaacctctcttgttaactttttcatgaccctgtggatttctagggacactgcaggcccagcaagtttcagcgatcaccagagctttgccgtcgttgtagccctgtcgtgtttgctaagtatcacaatggaagtaatccttataatcaaatactggactgctctgtgcgtcgcgactattttgctgtctttaggattttacgccatcatgaccaccaccacgcaatctttctggctatttcgagtgtcaccaacaacttttccctttctctacgctgatcttagtgtgatgtctagtccatctatcctcttagtagtgctgttgtcagtctcaatcaatacgtttcccgtccttgcattacgggtgatatttcctgctctgaaagagctgagagccaaagaggagaaggttgaagagggtccctctgaagagatcttcacaatggagcccctgcctcacgtgcatcgcgagagccgcgctagaaggagtagctatgcattctcccaccgggagggctacgctaatctgatcactcaggggacaatcctgagacgtggtccaggcgtgtcctcagacatcgccagtgaatctctggatccatctgatgaggaggccgctagctccccgaaggaatctcagtag

SEQ ID NO: 294856 - DNA, 3933 bp, Artificial Sequence
  derived and/or modified sequence
atgggcactggacctgcccagacccccaggagcacccgggccggccctgagcccagccctgcccctcctggccctggggacaccggggacagtgatgtgacccaggagggcagcggccctgctggcatccggggcggggagaccgtcatccgggccggcatgggagacagccctggccgcggggcccctgagaggaggcacaaggcccagcccggccgggccaggaaatatgagtggaggcctgagggccccacctccatgggcagcctgggccagcgggaggacctgcaggatgaagatagaaattctgccttcacctggaaggtgcaggccaacaacagagcctacaacggccagttcaaggagaaggtgatcctgtgctggcagaggaagaagtacaagaccaacgtcatcagaacagccaagtacaacttctacagcttcctgcccctgaacctgtatgagcagttccaccgggtgagcaacctcttcttcctgatcatcatcatcctgcagagcatcccagacatcagcaccctgccctggttcagcctgagcacccccatggtgtgcctgctcttcatccgggccacccgggacctggtggatgacatgggccgccacaagagtgaccgggccatcaacaaccggccctgccagatcctgatgggcaagagcttcaagcagaagaagtggcaggacctgtgtgtgggagatgtggtgtgcctgaggaaggacaacatcgtgcctgctgacatgctgctgctggccagcacagagcccagcagcctgtgctacgtggagaccgtggacattgatggagagaccaacctgaagttccggcaggccctgatggtgacccacaaggagctggccaccatcaagaagatggccagcttccagggcaccgtgacctgtgaggcccccaacagcaggatgcaccactttgtgggctgcctggagtggaatgacaagaagtacagcctggacatcggcaacctgctgctgcggggctgccgcatccggaacacagacacctgctacggcctggtgatctatgccggctttgacaccaagatcatgaagaactgtgggaagatccacctgaagaggaccaagctggacctgctgatgaacaagctggtggtggtgatcttcatctctgtggtgctggtgtgcctggtgctggccttcggcttcggcttctctgtgaaggagttcaaggaccaccactactacctgtctggagtgcacggcagctctgtggccgctgagagcttctttgtgttctggagcttcctgatcctgctgtctgtgaccatccccatgtccatgttcatcctgtctgagttcatctacctgggcaacagcgtcttcatcgactgggatgtgcagatgtactacaagccccaggatgtgcctgccaaggcccggagcaccagcctgaatgaccacctgggccaggtggagtacatcttcagtgacaagacaggcaccctgacccagaacatcctgaccttcaacaagtgctgcatcagcggccgggtgtatggcccagattctgaggccaccacccggcccaaggagaacccctacctgtggaacaagtttgctgatggcaagctgctcttccacaatgctgccctgctgcacctggtgaggaccaatggagatgaggccgtgcgggagttctggaggctgctggccatctgccacacagtgatggtgcgggagagcccccgggagaggccagaccagctgctgtaccaggccgccagcccagatgaaggagccctggtgacagctgccaggaactttggctacgtgttcctgagcaggacccaggacacagtgaccatcatggagctgggggaggagcgggtgtaccaggtgctggccatcatggacttcaacagcaccaggaagaggatgtctgtgctggtgaggaagccagagggcgccatctgcctgtacaccaagggagctgacaccgtcatctttgagcggctgcaccggcggggggccatggagtttgccacagaggaggccctggccgcctttgcccaggagaccctgcggaccctgtgcctggcctaccgggaggtggccgaggacatctatgaggactggcagcagaggcaccaggaggccagcctgctgctgcagaacagagcccaggccctgcagcaggtgtacaatgagatggagcaggacctgcggctgctgggcgccacagccatcgaggaccggctgcaggatggagtgcctgagaccatcaagtgcctgaagaagagcaacatcaagatctgggtgctgactggagacaagcaggagacagctgtgaacattggatttgcctgtgagctgctgtctgagaacatgctgatcctggaggagaaggagatcagccgcatcctggagacctactgggagaacagcaacaacctgctgacccgggagagcctgagccaggtgaagctggccctggtgatcaacggggacttcctggacaagctgctggtgtccctgaggaaggagccccgggccctggcccagaatgtgaacatggatgaggcctggcaggagctgggccagagcagaagagacttcctgtatgcccggcggctgagcctgctgtgcagaagatttggcctgcccctggccgcccccccagcccaggacagccgggcccggcgcagcagcgaggtgctgcaggagcgggcctttgtggacctggccagcaagtgccaggccgtcatctgctgccgggtgacccccaagcagaaggccctgattgtggccctggtgaagaagtaccaccaggtggtgaccctggccatcggagatggagccaatgacatcaacatgatcaagacagcagatgtgggcgtgggcctggccggccaggagggcatgcaggccgtgcagaacagcgactttgtgctgggccagttctgcttcctgcagaggctgctgctggtgcacggccgctggagctatgtgcgcatctgcaagttcctgcgctacttcttctacaagtccatggcctccatgatggtgcaggtgtggtttgcctgctacaacggcttcaccggccagcccctgtatgagggctggttcctggccctcttcaacctgctgtacagcaccctgcctgtgctgtacatcggcctgtttgagcaggatgtgtctgctgagcagagcctggagaagccagagctgtatgtggtgggccagaaggatgagctgttcaactactgggtgtttgtgcaggccatcgcccatggagtgaccaccagcctggtgaacttcttcatgaccctgtggatcagccgggacacagctggccctgccagcttcagtgaccaccagagctttgctgtggtggtggccctgagctgcctgctgagcatcaccatggaggtgatcctgatcatcaagtactggacagccctgtgtgtggccaccatcctgctgagcctgggcttctacgccatcatgaccaccaccacccagagcttctggctgttccgggtgagccccaccaccttccccttcctgtatgctgacctgtctgtgatgagcagccccagcatcctgctggtggtgctgctgtctgtgtccatcaacaccttccctgtgctggccctgcgggtcatcttccctgccctgaaggagctgcgggccaaggaggagaaggtggaggagggccccagcgaggagatcttcaccatggagcccctgccccacgtgcaccgggagagccgggcccggcgcagcagctatgccttcagccaccgggagggctacgccaacctgatcacccagggcaccatcctgcggcggggccctggggtgtccagtgacatcgccagcgagagcctggaccccagtgatgaggaggccgccagcagccccaaggagagccagtag

SEQ ID NO: 294857 - DNA, 3933 bp, Artificial Sequence
  derived and/or modified sequence
atgggcaccggccccgcccagaccccccggagcacccgggccggcccggaacctagccccgcgccacccggccctggtgacacaggggatagcgatgtaacgcaggaggggtctggacctgccgggattcgggggggagaaacggtgatcagggccggcatgggggatagtcctggaaggggtgcgcccgagaggcgccacaaagcacagcccggacgcgcccggaaatatgagtggagacccgagggacccaccagtatgggctccctgggacaacgggaggatttgcaggacgaagataggaattccgcattcacctggaaagttcaggcaaataacagagcctacaatggacagttcaaggagaaagtgattctgtgttggcagcgaaagaagtacaagacgaacgtaatccggactgccaagtacaacttttactcattcttgcccctgaacctctatgaacagttccaccgggtatccaacttattctttctgatcattataatcctccagagtatcccagatatctcaacattaccttggttcagtttatcaacgccaatggtttgcctgctctttattcgtgctaccagggacctggtagatgatatgggcaggcataaatctgacagggctataaataatcggccgtgtcagatattgatgggtaaatccttcaaacaaaagaagtggcaagacctctgtgttggggacgtggtctgtctaagaaaagacaacattgttcctgccgatatgctacttctggcttccacggaaccttctagcctctgttatgtcgaaacagtggacattgacggagaaactaatctcaagttcagacaagccttgatggtcacacacaaggagctcgccactattaagaaaatggcctccttccaggggacggtgacttgcgaggctccaaattctaggatgcaccactttgttggttgcctagagtggaacgataaaaagtattctctcgacattggtaacctgctgctgcggggatgtagaatccgaaacactgatacttgttacggccttgtcatctatgctggctttgacaccaagatcatgaaaaattgtggtaaaatccatttaaagcggaccaaactggacctcttgatgaataagctggtggtggtaatattcatctctgtagttctggtttgtctcgtgcttgcgtttggctttgggttctccgtgaaagagtttaaggaccatcattactatctgtccggcgtgcacgggtcgtctgtggccgccgaatcctttttcgtgttctggagctttctcattttgttgtccgtaacaattcccatgagtatgttcatcctcagtgagttcatctacctggggaacagcgtgttcatcgactgggatgtgcagatgtattataagcctcaagatgtccctgccaaagccagatccacttcgctcaacgatcacctggggcaggtggaatatatcttttccgacaagacagggacactcactcagaatatcctgacctttaacaagtgctgcatcagcggtagggtgtatgggcctgactcagaagctaccacccgtcccaaagagaacccctacctgtggaacaaatttgcggacggaaagctgctctttcacaatgcggcactgctgcatctggtgagaacgaatggtgacgaagcagttcgagagttttggagacttctcgccatatgccatactgtaatggttagagaatctccaagggagcgacctgaccagcttctttaccaagcagcctcccccgacgagggagcactcgttaccgctgctcgcaatttcggatatgtgtttctcagtagaactcaagacactgtgacaatcatggagctgggggaggaacgggtctatcaggtgttggcgataatggattttaacagtactagaaagcggatgagcgtgctggtcagaaaacctgagggtgcaatttgcctttataccaaaggagccgatactgtgatcttcgagagactccatagacgcggagctatggaatttgccaccgaggaggccttagctgcgtttgcgcaggaaaccctgcggacattatgcctggcttacagagaagtcgcagaggacatatacgaagattggcaacagcggcaccaggaagcttccttgcttctccagaaccgcgcacaggccctacagcaggtgtataacgagatggaacaggatcttagattactgggcgccactgcaatagaagatcgcctgcaggacggtgtgccagaaacaatcaagtgtctgaaaaagtcaaatataaagatatgggtgctaaccggcgacaagcaggagacagctgtcaatattggttttgcatgtgagctcctctctgagaacatgctaatcctggaggaaaaggaaatctcccgcatcctagaaacctactgggagaatagtaacaatcttttgacccgagagagtctgagtcaggttaagctggccctggtcatcaacggcgatttcctggataagctgctggtgtccttgagaaaggaaccacgcgccctggctcaaaatgtaaacatggacgaagcctggcaggagctgggccagagtcggagggatttcttgtatgcacggcgattgtctctactgtgcagacgattcgggctgccattggcagccccccccgcgcaggactccagagctcgccggagcagcgaggtattgcaggaacgagccttcgtcgatctagccagcaaatgtcaggccgtcatttgttgtagggtgactcctaagcagaaggccttgatcgttgcattggtgaagaaatatcatcaggttgtcaccctggccatcggggacggagccaacgacattaacatgattaagactgcagacgttggcgtgggcctagctgggcaggagggcatgcaagctgtgcagaattcagatttcgtgctcgggcagttctgcttcttgcagagactcttactggtccacggacggtggtcttatgttcgaatttgcaagtttttgagatattttttctataagtctatggccagtatgatggtgcaagtctggtttgcttgttataatgggtttacggggcagcctctgtacgaaggatggttcctggctctttttaatctactgtactctactctgcccgtactttatattggcctgttcgagcaggacgtgtcggcagagcagagccttgaaaagcctgagctttacgttgtggggcagaaggatgagctgtttaattattgggtgttcgtgcaggcaatcgcacatggcgtaacaacaagcttggtgaatttctttatgacgttgtggatctccagagacaccgcagggcctgcgagcttcagcgatcatcagagtttcgctgtcgtggtagcgctgtcatgcctgctgtccatcacgatggaggtcatcttaattattaagtattggacagctctttgcgtcgcgactatcctactttctctgggattctacgcgatcatgactacaacaacccagtccttctggctgtttagagtaagtcctactacgttcccctttttgtatgccgacctaagcgtgatgagctccccctctatactgctagtcgtgttacttagcgtgtccatcaacaccttccccgtgttggctctgcgggttatcttccccgcactcaaggaactgcgagccaaagaagaaaaggtggaagagggaccatcagaggagatctttacaatggagcccctcccccatgtgcatagggaaagtcgcgcaaggaggagctcatacgcattttctcacagggaaggatacgcgaatctgatcacccagggtactatcttgcgtagaggaccaggggtttcctccgatatcgcgagcgagagcttggacccctcagacgaagaggcagcatctagcccaaaggagtctcagtag

SEQ ID NO: 294858 - DNA, 3933 bp, Artificial Sequence
  derived and/or modified sequence
atgggaaccgggcctgctcagacgcctcggtcaactagggccggtcccgagccaagccccgcacctccgggtcctggggacacaggcgactctgatgttacacaggagggttctggtccggctggcatccggggtggcgagactgtgatcagagccggaatgggcgactctcctgggagaggcgctccagagaggcgccacaaggcacagcccggaagggcccgtaaatatgagtggcgcccagagggtcccactagtatgggtagtctgggccagcgggaagacctgcaggacgaagacagaaactctgccttcacgtggaaagtgcaagcgaacaaccgggcttataatggtcagtttaaggaaaaagtgatactctgctggcagaggaaaaagtacaagacaaacgttattcgaacagcaaaatacaacttctacagcttcctgcctctcaatctgtatgaacagtttcatcgggtgtcaaatcttttcttcttgattatcattatactccaaagtatacccgacatttccactctgccatggttttccctgagcacaccaatggtgtgcttgctctttatccgagccacccgggacctggtggacgatatgggcagacacaaaagcgatagggccatcaataaccggccatgccagattctgatgggtaaatcattcaaacagaaaaaatggcaggacttatgcgttggagacgttgtgtgcttgcggaaagataacatcgttccagccgacatgttgctattagcaagcacagaaccgagctcattatgctacgtggagaccgtagatatcgacggcgagactaacctgaagtttcgacaggctttgatggtgacccataaagagcttgcaactataaagaaaatggccagctttcaaggcactgttacatgtgaagccccaaattctcgaatgcatcactttgttggatgcctcgagtggaatgacaagaagtattcccttgacatcggcaatctcttgctgcggggttgtcgcattcgtaatacagacacctgttatggcctagtcatttacgcgggatttgacaccaaaattatgaagaactgtggcaagatccaccttaagagaactaagctcgatttgttgatgaacaagctggtcgtcgtcattttcatatcggtagttctggtttgcctggtgctcgccttcggcttcgggttctcagtcaaggaattcaaggaccaccactactacctgagtggtgtacatggcagttcggtggctgctgagagcttttttgtgttctggtccttccttattctactctccgtcacaattccaatgagcatgttcattctgagtgaattcatctaccttgggaacagtgtttttatcgactgggatgtgcagatgtattacaagcctcaggacgtgccagccaaggccaggtccacgtccctcaacgatcacctcggccaagtggagtatatcttttccgataaaacagggaccctaactcagaacattttgacttttaataagtgctgtatcagtgggagagtatatgggcctgatagcgaggcaaccactcggcctaaggagaatccgtacctttggaataagttcgccgatgggaagctcctctttcacaacgccgcattgttgcacttagtgagaaccaacggagacgaggctgtgcgggagttctggaggctcctagcgatttgccatactgtcatggtccgcgagtcacctcgtgaacgaccagaccagttgctgtaccaggccgctagtcccgacgagggcgctctggtcacagccgctcggaatttcggatacgtgtttctctcacgcactcaggacaccgtcactatcatggaactgggagaagaaagggtctatcaggttctggccattatggattttaattccaccaggaagcggatgtctgtacttgtccggaagcctgagggcgctatctgcctctatacaaaaggggctgacaccgtgatttttgagagactacataggcgtggcgcaatggaattcgccactgaagaagcgctcgccgcttttgctcaggaaacactgcggaccttatgccttgcctacagagaagtggccgaggacatttatgaagattggcagcagagacatcaggaggcaagtctcctgctccaaaacagagcacaggctctgcagcaggtttacaacgagatggagcaggacctgagacttctcggcgctaccgccattgaggaccggctgcaagacggcgtgcccgagaccatcaaatgcctcaagaaaagcaatatcaaaatttgggtcttgaccggggacaaacaggaaaccgctgttaatatagggtttgcttgcgagttgctgtctgaaaacatgttaatacttgaggaaaaggagattagtaggatcctggaaacctactgggagaactccaataatctgctcacccgagaatctttatcccaagttaaactggctctcgttattaatggagattttctggataagcttcttgtaagcctccgaaaagaaccacgagctctagcccaaaatgttaatatggatgaggcatggcaggagctggggcagagcagacgggacttcctgtacgctaggcggctgagtctgctctgtcgcagattcggactcccccttgcggcacccccagctcaagattcaagggctaggcgttcaagtgaagtgctccaagagagggcctttgtggacttggcctcaaagtgccaggccgttatctgctgtcgtgtgacaccaaagcagaaggcgttgatcgtcgccctcgtgaaaaaataccaccaggtcgtcacgctcgctataggagatggcgcaaatgacattaacatgattaagacagctgatgtgggcgtgggattagccggacaggaggggatgcaggccgtgcagaattcagactttgtgctaggtcaattctgtttcctacagagactgcttcttgtgcacggtagatggtcgtacgtccggatatgcaaatttctcaggtatttcttttacaagagtatggccagcatgatggtgcaggtgtggttcgcttgctacaatggctttaccgggcagcctctgtacgagggctggttcctggctctgtttaacctgctgtactctaccctgcccgtgctctatatcgggctgttcgaacaggacgttagcgcggagcagagcctcgagaagccggagctctacgtcgtggggcagaaggatgagctgttcaattattgggtgttcgttcaagccatagcccatggcgtgactactagcctggtaaattttttcatgactctctggataagccgtgacactgccggtccagccagcttcagcgaccaccagtcatttgctgtggtggtggccctgagctgtttgctgtcaatcacaatggaggtgattctgattataaaatattggacagctctgtgcgtggccacaattctgctatctttaggattctacgcaataatgaccaccaccacacaaagtttttggctgtttagagtgtcccctacaacgttccccttcctatacgccgatctgtcagtcatgtcttccccctctatattgctggtggtgttgctgtccgtctctatcaacaccttccccgtactggcccttcgcgtgatattccccgcactgaaagagttgagagctaaggaggaaaaggtggaggaaggcccatctgaagagatctttacgatggagcctttaccgcacgtgcatagagagtcccgagctcggaggagctcatacgcattctcccaccgcgagggttatgccaatttaatcacacaagggacaatcttacgcaggggcccaggagtgtcttccgacatcgcatcggagtctcttgatcctagtgatgaggaggccgcaagtagcccgaaagagtctcagtag

SEQ ID NO: 294859 - DNA, 4014 bp, Artificial Sequence
  derived and/or modified sequence
gcctctcctgcgccggtgagcggcgggtgctcccactgctgtgcgtccccgggagcccgcgcaccctctctgggctccacccaggctgagagctggggtcgtggcggcgggggtggagagcgcgcccctagaggacctggggacacgggtgactcagacgtgactcaggaaggctcaggtcctgctggcatccgcggaggtgagacggtgatcagagctgggatgggagactccccaggcagaggggcacctgagaggaggcacaaggcccagcctggccgggctaggaagtatgaatggagaccagaaggccccaccagcatgggcagcctcggccagagagaagatctccaagatgaggacaggaactcagcattcacctggaaggtccaggccaacaaccgtgcctacaacgggcagttcaaggagaaggtgatcctgtgctggcaaaggaagaaatacaagaccaatgtcatccgcacggccaagtacaacttctactcgttcctgccgctgaacctgtacgagcagttccaccgcgtgtccaacctgttcttcctcatcatcatcatcctgcagagcattcccgacatctccacgctgccctggttctcgctcagtacccctatggtctgcctcctcttcatccgtgccacccgggacctggtggacgacatggggagacacaagagtgacagagccatcaacaacagaccctgccagattctgatggggaagagcttcaagcagaagaaatggcaggatctgtgcgtgggggatgtggtctgtctccgcaaggacaacatcgtcccagccgacatgctcttgctggccagcacggagcccagcagcctgtgctatgtggagacggtggacattgacggggagaccaacttgaagttcagacaggccctgatggtcacccacaaagaactggccactataaagaagatggcgtcctttcaaggcacagtgacgtgtgaggcgcctaacagtcggatgcaccacttcgtggggtgcctggaatggaatgacaagaaatactccctggacattggcaacctcctcctccgaggctgcaggattcgcaacacagacacctgctatggactggtcatttatgctgatggatacatgtttgtaggttttgacacaaaaattatgaagaactgtggcaagatccatttgaagagaaccaagctggacctcctgatgaacaagctggtggttgtgatcttcatctccgtggtgcttgtctgcctggtgttggccttcggcttcggtttctcagtcaaagaattcaaagaccaccactactacctctcgggggtgcatgggagcagcgtggccgcagagtccttcttcgtcttctggagcttcctcatcctgctcagcgtcaccatcccgatgtccatgttcatcctgtccgagttcatctacctggggaacagcgtcttcatcgactgggacgtgcagatgtactacaagccgcaggacgtgcctgccaaggcccgcagcaccagcctcaacgaccacctgggccaggtggaatacatcttctcggacaagacgggcacgctcacgcagaacatcttgaccttcaacaagtgctgcatcagcggccgcgtctatgggccggattcagaggccacgacccgacctaaggagaacccctacctctggaacaagttcgccgacgggaagctgctcttccacaatgcggccctgctgcacctcgtgcggaccaacggggacgaggccgtgcgggagttctggcgcctgctggccatctgccacacggtgatggtgcgggagagcccccgtgagcgcccagaccagctgttgtaccaggcggcctcccccgacgagggggcgctggtcaccgcagcccggaacttcggctacgtgttcctgtcccgcacccaggacaccgtcacgatcatggagctgggggaggaacgggtctaccaggtcctggccataatggacttcaacagcacgcgcaaacggatgtcggtgctggttcgaaagccagagggcgccatctgcctgtacaccaagggcgccgacacggtcatcttcgaacgcttgcacaggaggggggcaatggaatttgccacagaggaggccttggctgcctttgcccaggagaccctgcggacactgtgcctggcctacagggaggtggctgaggacatttacgaggactggcagcagcgccaccaggaggccagcctcctgctgcagaaccgggcacaggccctgcaacaggtgtacaacgagatggagcaggacctcaggctgctgggagccacagccatcgaggacagactccaggacggtgtccctgaaaccatcaaatgtctcaagaagagcaacatcaaaatatgggtgctcaccggggacaagcaggaaacggctgtgaacatcggcttcgcctgcgagctgctgtcagagaatatgctcattctggaggagaaggagattagccgcatcctggagacctactgggaaaacagtaacaaccttctaaccagggagtccctgtcgcaggtcaagctggccttggtcattaacggagacttcctggacaaactgctggtgtccctgcggaaggagccgcgcgccctggcgcagaacgtgaacatggacgaggcgtggcaggagctcggccagtccaggagggatttcctctacgccaggcgcctgtccctgctgtgccggaggttcgggctcccgctggctgcaccgccagcccaggactccagagcccgccgtagctccgaggtgctgcaggagcgcgccttcgtggacctggcgtccaagtgccaggcggtcatctgctgccgcgtgacgcccaagcagaaggccctgatcgtggccctggtcaagaagtaccaccaggtggtgaccctggccatcggggacggtgccaacgacatcaacatgatcaagaccgcggacgtgggcgtggggctggcgggccaggagggcatgcaggcagttcagaacagcgacttcgtgctcggccagttctgcttcctgcagcgcctcctgctggtgcacggccgctggtcctacgtgcggatctgcaagttcctgcgctacttcttctacaagagcatggccagcatgatggtgcaggtctggtttgcctgctacaacggcttcaccggccagcccctgtatgaaggatggttcctggctcttttcaacctcctgtacagcaccctgccagttctctacattgggctctttgagcaggacgtgagcgcagagcagagcctggagaagccggagctgtacgtggtggggcagaaggacgagctcttcaactactgggtcttcgtccaagccatcgcccatggtgtgaccacctctctggtcaacttcttcatgacactgtggatcagccgcgacacggcgggacccgccagcttcagcgaccaccagtcctttgcggtcgtggtggccctgtcttgcctgctgtccatcaccatggaggtcattcttatcatcaagtactggaccgccctgtgcgtggcgaccatcctcctcagccttggtttctacgccatcatgactaccaccacccagagcttctggctcttcagagtatcccccacgaccttcccgtttctgtatgccgacctcagcgtgatgtcctctccctccatcctgctggtggtcctgctgagtgtgtccataaacaccttccctgtcctggccctccgagtcatcttcccagccctcaaggagctacgtgccaaggaggagaaggtggaggagggccccagcgaggagattttcaccatggagcccttgcctcatgtacaccgggagtctcgtgcccgccgttccagctatgctttctcccaccgtgagggatatgcaaacctcatcactcagggcacaattctgcggaggggaccaggggtcagcagtgacatagcatctgaatccctagacccatctgatgaagaggcagcttcgagcccaaaagagtcacagtga

SEQ ID NO: 294860 - DNA, 5118 bp, Artificial Sequence
  derived and/or modified sequence
aggaccgttggcaccgggctaacggttccaccacgtccgccgccctggacgcccgcggcctgcccccccctgcctctcctgcgccgatacacttcgagtggattctggccatttgagcattctctccaactctccaatccccagtctgcccccacgggggtctcccccacctctcccccgtcccacagcctaaacccctcttcgccctgaacctcccttttcctcatgcggtgaatgggcactggccccgctcagactcccaggagcaccagagctggccctgagccaagccctgccccaccaggacctggggacacgggtgactcagacgtgactcaggaaggctcaggtcctgctggcatccgcggaggtgagacggtgatcagagctgggatgggagactccccaggcagaggggcacctgagaggaggcacaaggcccagcctggccgggctaggaagtatgaatggagaccagaaggccccaccagcatgggcagcctcggccagagagaagatctccaagatgaggacaggaactcagcattcacctggaaggtccaggccaacaaccgtgcctacaacgggcagttcaaggagaaggtgatcctgtgctggcaaaggaagaaatacaagaccaatgtcatccgcacggccaagtacaacttctactcgttcctgccgctgaacctgtacgagcagttccaccgcgtgtccaacctgttcttcctcatcatcatcatcctgcagagcattcccgacatctccacgctgccctggttctcgctcagtacccctatggtctgcctcctcttcatccgtgccacccgggacctggtggacgacatggggagacacaagagtgacagagccatcaacaacagaccctgccagattctgatggggaagagcttcaagcagaagaaatggcaggatctgtgcgtgggggatgtggtctgtctccgcaaggacaacatcgtcccagccgacatgctcttgctggccagcacggagcccagcagcctgtgctatgtggagacggtggacattgacggggagaccaacttgaagttcagacaggccctgatggtcacccacaaagaactggccactataaagaagatggcgtcctttcaaggcacagtgacgtgtgaggcgcctaacagtcggatgcaccacttcgtggggtgcctggaatggaatgacaagaaatactccctggacattggcaacctcctcctccgaggctgcaggattcgcaacacagacacctgctatggactggtcatttatgctggttttgacacaaaaattatgaagaactgtggcaagatccatttgaagagaaccaagctggacctcctgatgaacaagctggtggttgtgatcttcatctccgtggtgcttgtctgcctggtgttggccttcggcttcggtttctcagtcaaagaattcaaagaccaccactactacctctcgggggtgcatgggagcagcgtggccgcagagtccttcttcgtcttctggagcttcctcatcctgctcagcgtcaccatcccgatgtccatgttcatcctgtccgagttcatctacctggggaacagcgtcttcatcgactgggacgtgcagatgtactacaagccgcaggacgtgcctgccaaggcccgcagcaccagcctcaacgaccacctgggccaggtggaatacatcttctcggacaagacgggcacgctcacgcagaacatcttgaccttcaacaagtgctgcatcagcggccgcgtctatgggccggattcagaggccacgacccgacctaaggagaacccctacctctggaacaagttcgccgacgggaagctgctcttccacaatgcggccctgctgcacctcgtgcggaccaacggggacgaggccgtgcgggagttctggcgcctgctggccatctgccacacggtgatggtgcgggagagcccccgtgagcgcccagaccagctgttgtaccaggcggcctcccccgacgagggggcgctggtcaccgcagcccggaacttcggctacgtgttcctgtcccgcacccaggacaccgtcacgatcatggagctgggggaggaacgggtctaccaggtcctggccataatggacttcaacagcacgcgcaaacggatgtcggtgctggttcgaaagccagagggcgccatctgcctgtacaccaagggcgccgacacggtcatcttcgaacgcttgcacaggaggggggcaatggaatttgccacagaggaggccttggctgcctttgcccaggagaccctgcggacactgtgcctggcctacagggaggtggctgaggacatttacgaggactggcagcagcgccaccaggaggccagcctcctgctgcagaaccgggcacaggccctgcaacaggtgtacaacgagatggagcaggacctcaggctgctgggagccacagccatcgaggacagactccaggacggtgtccctgaaaccatcaaatgtctcaagaagagcaacatcaaaatatgggtgctcaccggggacaagcaggaaacggctgtgaacatcggcttcgcctgcgagctgctgtcagagaatatgctcattctggaggagaaggagattagccgcatcctggagacctactgggaaaacagtaacaaccttctaaccagggagtccctgtcgcaggtcaagctggccttggtcattaacggagacttcctggacaaactgctggtgtccctgcggaaggagccgcgcgccctggcgcagaacgtgaacatggacgaggcgtggcaggagctcggccagtccaggagggatttcctctacgccaggcgcctgtccctgctgtgccggaggttcgggctcccgctggctgcaccgccagcccaggactccagagcccgccgtagctccgaggtgctgcaggagcgcgccttcgtggacctggcgtccaagtgccaggcggtcatctgctgccgcgtgacgcccaagcagaaggccctgatcgtggccctggtcaagaagtaccaccaggtggtgaccctggccatcggggacggtgccaacgacatcaacatgatcaagaccgcggacgtgggcgtggggctggcgggccaggagggcatgcaggcagttcagaacagcgacttcgtgctcggccagttctgcttcctgcagcgcctcctgctggtgcacggccgctggtcctacgtgcggatctgcaagttcctgcgctacttcttctacaagagcatggccagcatgatggtgcaggtctggtttgcctgctacaacggcttcaccggccagcccctgtatgaaggatggttcctggctcttttcaacctcctgtacagcaccctgccagttctctacattgggctctttgagcaggacgtgagcgcagagcagagcctggagaagccggagctgtacgtggtggggcagaaggacgagctcttcaactactgggtcttcgtccaagccatcgcccatggtgtgaccacctctctggtcaacttcttcatgacactgtggatcagccgcgacacggcgggacccgccagcttcagcgaccaccagtcctttgcggtcgtggtggccctgtcttgcctgctgtccatcaccatggaggtcattcttatcatcaagtactggaccgccctgtgcgtggcgaccatcctcctcagccttggtttctacgccatcatgactaccaccacccagagcttctggctcttcagagtatcccccacgaccttcccgtttctgtatgccgacctcagcgtgatgtcctctccctccatcctgctggtggtcctgctgagtgtgtccataaacaccttccctgtcctggccctccgagtcatcttcccagccctcaaggagctacgtgccaaggaggagaaggtggaggagggccccagcgaggagattttcaccatggagcccttgcctcatgtacaccgggagtctcgtgcccgccgttccagctatgctttctcccaccgtgagggatatgcaaacctcatcactcagggcacaattctgcggaggggaccaggggtcagcagtgacatagcatctgaatccctagacccatctgatgaagaggcagcttcgagcccaaaagagtcacagtgacacctcaggaagatgtccttcctggggaagaagaagcaccagccacaggggcaggtgtcctcccaggaagtacagctcccccctacacctagctcatcattttctatggatagacaatccgctcttcatccagaaaaccaacctgccctccccaaatatgtgctcaccagcagcaacaggctatctgagtctttccaagagcaattgccaagggcacaggagaggtcattgtcacccaagcagaggccaccttctcctgagaagttgctgttgaccaaggagaggtcacattcttttcaggagaaatcactgttgcacagagaaagccagctgtcgtcatttgagagccagccacagcctctggggagccagtcatttctttcaggccagctgacgttggagagccagccagactcctcggaggagaagtcagcatttttgaagccctccacaccgttccggaagagctggcaaaaggagcctcacacccccaaggaggggacggtgccacttccagacaagacccacaaatctcaggtggagactctgccaccaagtctggaagaatcgtccacgtccacgagcgagcagcctatggaggtggagctgtggcccgcggagaagcagtcatcatcatccatggagtggctgctggtgcccggggaggagcagctatccttgcccccagaggagcagtcattgccctctgcggaggggaccagggttcagcagtgacgtagcatctgaatccctagacccatctgatgaagaggcatcttcgagcccaaaggagtcacgctggcatatcaggaagatgtccttcctgggaagaagaagctccagccagttctgctgcaagtcaaccagcatgcagggggccttcctctaaagacaaggactccacatgcttttctttttctaataaaccagggtccatctgaccccagcgct

SEQ ID NO: 294861 - DNA, 3933 bp, Artificial Sequence
  derived and/or modified sequence
atgggcaccggccccgcccagacccccagaagcaccagagccggccccgagcccagccccgccccccccggccccggcgacaccggcgacagcgacgtgacccaggagggcagcggccccgccggcatcagaggcggcgagaccgtgatcagagccggcatgggcgacagccccggcagaggcgcccccgagagaagacacaaggcccagcccggcagagccagaaagtacgagtggagacccgagggccccaccagcatgggcagcctgggccagagagaggacctgcaggacgaggacagaaacagcgccttcacctggaaggtgcaggccaacaacagagcctacaacggccagttcaaggagaaggtgatcctgtgctggcagagaaagaagtacaagaccaacgtgatcagaaccgccaagtacaacttctacagcttcctgcccctgaacctgtacgagcagttccacagagtgagcaacctgttcttcctgatcatcatcatcctgcagagcatccccgacatcagcaccctgccctggttcagcctgagcacccccatggtgtgcctgctgttcatcagagccaccagagacctggtggacgacatgggcagacacaagagcgacagagccatcaacaacagaccctgccagatcctgatgggcaagagcttcaagcagaagaagtggcaggacctgtgcgtgggcgacgtggtgtgcctgagaaaggacaacatcgtgcccgccgacatgctgctgctggccagcaccgagcccagcagcctgtgctacgtggagaccgtggacatcgacggcgagaccaacctgaagttcagacaggccctgatggtgacccacaaggagctggccaccatcaagaagatggccagcttccagggcaccgtgacctgcgaggcccccaacagcagaatgcaccacttcgtgggctgcctggagtggaacgacaagaagtacagcctggacatcggcaacctgctgctgagaggctgcagaatcagaaacaccgacacctgctacggcctggtgatctacgccggcttcgacaccaagatcatgaagaactgcggcaagatccacctgaagagaaccaagctggacctgctgatgaacaagctggtggtggtgatcttcatcagcgtggtgctggtgtgcctggtgctggccttcggcttcggcttcagcgtgaaggagttcaaggaccaccactactacctgagcggcgtgcacggcagcagcgtggccgccgagagcttcttcgtgttctggagcttcctgatcctgctgagcgtgaccatccccatgagcatgttcatcctgagcgagttcatctacctgggcaacagcgtgttcatcgactgggacgtgcagatgtactacaagccccaggacgtgcccgccaaggccagaagcaccagcctgaacgaccacctgggccaggtggagtacatcttcagcgacaagaccggcaccctgacccagaacatcctgaccttcaacaagtgctgcatcagcggcagagtgtacggccccgacagcgaggccaccaccagacccaaggagaacccctacctgtggaacaagttcgccgacggcaagctgctgttccacaacgccgccctgctgcacctggtgagaaccaacggcgacgaggccgtgagagagttctggagactgctggccatctgccacaccgtgatggtgagagagagccccagagagagacccgaccagctgctgtaccaggccgccagccccgacgagggcgccctggtgaccgccgccagaaacttcggctacgtgttcctgagcagaacccaggacaccgtgaccatcatggagctgggcgaggagagagtgtaccaggtgctggccatcatggacttcaacagcaccagaaagagaatgagcgtgctggtgagaaagcccgagggcgccatctgcctgtacaccaagggcgccgacaccgtgatcttcgagagactgcacagaagaggcgccatggagttcgccaccgaggaggccctggccgccttcgcccaggagaccctgagaaccctgtgcctggcctacagagaggtggccgaggacatctacgaggactggcagcagagacaccaggaggccagcctgctgctgcagaacagagcccaggccctgcagcaggtgtacaacgagatggagcaggacctgagactgctgggcgccaccgccatcgaggacagactgcaggacggcgtgcccgagaccatcaagtgcctgaagaagagcaacatcaagatctgggtgctgaccggcgacaagcaggagaccgccgtgaacatcggcttcgcctgcgagctgctgagcgagaacatgctgatcctggaggagaaggagatcagcagaatcctggagacctactgggagaacagcaacaacctgctgaccagagagagcctgagccaggtgaagctggccctggtgatcaacggcgacttcctggacaagctgctggtgagcctgagaaaggagcccagagccctggcccagaacgtgaacatggacgaggcctggcaggagctgggccagagcagaagagacttcctgtacgccagaagactgagcctgctgtgcagaagattcggcctgcccctggccgccccccccgcccaggacagcagagccagaagaagcagcgaggtgctgcaggagagagccttcgtggacctggccagcaagtgccaggccgtgatctgctgcagagtgacccccaagcagaaggccctgatcgtggccctggtgaagaagtaccaccaggtggtgaccctggccatcggcgacggcgccaacgacatcaacatgatcaagaccgccgacgtgggcgtgggcctggccggccaggagggcatgcaggccgtgcagaacagcgacttcgtgctgggccagttctgcttcctgcagagactgctgctggtgcacggcagatggagctacgtgagaatctgcaagttcctgagatacttcttctacaagagcatggccagcatgatggtgcaggtgtggttcgcctgctacaacggcttcaccggccagcccctgtacgagggctggttcctggccctgttcaacctgctgtacagcaccctgcccgtgctgtacatcggcctgttcgagcaggacgtgagcgccgagcagagcctggagaagcccgagctgtacgtggtgggccagaaggacgagctgttcaactactgggtgttcgtgcaggccatcgcccacggcgtgaccaccagcctggtgaacttcttcatgaccctgtggatcagcagagacaccgccggccccgccagcttcagcgaccaccagagcttcgccgtggtggtggccctgagctgcctgctgagcatcaccatggaggtgatcctgatcatcaagtactggaccgccctgtgcgtggccaccatcctgctgagcctgggcttctacgccatcatgaccaccaccacccagagcttctggctgttcagagtgagccccaccaccttccccttcctgtacgccgacctgagcgtgatgagcagccccagcatcctgctggtggtgctgctgagcgtgagcatcaacaccttccccgtgctggccctgagagtgatcttccccgccctgaaggagctgagagccaaggaggagaaggtggaggagggccccagcgaggagatcttcaccatggagcccctgccccacgtgcacagagagagcagagccagaagaagcagctacgccttcagccacagagagggctacgccaacctgatcacccagggcaccatcctgagaagaggccccggcgtgagcagcgacatcgccagcgagagcctggaccccagcgacgaggaggccgccagcagccccaaggagagccagtag

SEQ ID NO: 294862 - DNA, 1737 bp, Artificial Sequence
  derived and/or modified sequence
atgggcgatagccccggtagaggagcacctgaaaggcgacacaaggcacaacctggacgggcacggaaatacgagtggcggccagagggccccacaagcatgggttcgctgggccagcgcgaagacctgcaagatgaggatcgcaatagcgcattcacatggaaagtccaagcaaataacagggcctataatgggcagttcaaagaaaaagtgattctatgctggcaacggaagaagtataaaaccaacgtgataaggactgcgaagtataacttttactcttttctccctctaaacctatatgagcagttccaccgcgtgtctaacctcttctttctgatcataataatcctgcaatccatccctgacatttcgacattgccatggttctcactgtcaactcccatggtgtgcctactgtttatccgtgccacccgcgacctggttgacgacatggggcgtcataagtctgacagagccattaataatcggccatgccagattttaatgggaaagagctttaaacagaaaaaatggcaagatctctgcgtgggtgacgtggtatgcctgagaaaagacaatattgtccctgccgacatgctcctgttagctagtaccgagccatcctcactttgctatgtggaaacagttgacattgacggagaaacaaacctgaagttccggcaagccctgatggtgacacacaaggagctggcaaccattaaaaagatggcctctttccagggaaccgtgacctgcgaggcccctaattctcgtatgcatcattttgtaggttgtctggaatggaatgataaaaagtatagcctggacatcggcaatctgttgctccgcggatgcaggattaggaatacagatacatgttatggcttggtgatctacgcaggctttgacaccaagatcatgaaaaattgtgggaagattcacctgaagagaactaagcttgatcttttaatgaacaagcttgtggtggtaatattcatcagcgtagtgttggtgtgcctggtcttagctttcgggtttggcttctcggtgaaggagtttaaggaccatcactattacttgtccggcgtgcacggctcaagtgtggcagccgaatccttctttgtgttctggtctttccttatattattgtctgttaccatccctatgagcatgttcatcctcagcgaattcatctatctaggtaatagtgtttttattgattgggacgtgcaaatgtactacaaacctcaagatgtgccagccaaggcaaggagtacttccttgaatgaccatctcggccaagtcgaatatatatttagtgacaagaccggtacactgactcaaaatatattaaccttcaataagtgctgcataagcgggcgggtctatggtgcagcccctacccccgagctccccgctggatccagcatcttcaaagggctacgagtccccgagaaccagagccatgtttggcctcacgcacagcatctgcgtcccaatctaaaccaggggaccgttgcacggtggccaggattcttatggcggggtcctggcaagttttttttcttccttcgccagtctctgaccctctccacccaggcggggatgcagtggtgcaatttgggctccctccagtcaccaccaccaaggttcaagagattttcctggctctcgctcccaagcagctgggattaccggcacctcccaccacacctgatcttcttgtatttctag

SEQ ID NO: 294863 - DNA, 1737 bp, Artificial Sequence
  derived and/or modified sequence
atgggagacagccctggccgcggggcccctgagcggcggcacaaggcccagcccggccgggccaggaaatatgagtggaggcctgagggccccacctccatgggcagcctgggccagcgggaggacctgcaggatgaggacaggaacagcgccttcacctggaaggtgcaggccaacaacagagcctacaacggccagttcaaggagaaggtgatcctgtgctggcagaggaagaagtacaagaccaacgtcatcagaacagccaagtacaacttctacagcttcctgcccctgaacctgtatgagcagttccaccgggtgagcaacctcttcttcctgatcatcatcatcctgcagagcatcccagacatcagcaccctgccctggttcagcctgagcacccccatggtgtgcctgctcttcatccgggccacccgggacctggtggatgacatgggccgccacaagagtgaccgggccatcaacaaccggccctgccagatcctgatgggcaagagcttcaagcagaagaagtggcaggacctgtgtgtgggagatgtggtgtgcctgaggaaggacaacatcgtgcctgctgacatgctgctgctggccagcacagagcccagcagcctgtgctacgtggagaccgtggacattgatggagagaccaacctgaagttccggcaggccctgatggtgacccacaaggagctggccaccatcaagaagatggccagcttccagggcaccgtgacctgtgaggcccccaacagcaggatgcaccactttgtgggctgcctggagtggaatgacaagaagtacagcctggacatcggcaacctgctgctgcggggctgccgcatccggaacacagacacctgctacggcctggtgatctatgccggctttgacaccaagatcatgaagaactgtgggaagatccacctgaagaggaccaagctggacctgctgatgaacaagctggtggtggtgatcttcatctctgtggtgctggtgtgcctggtgctggcctttggatttggcttctctgtgaaggagttcaaggaccaccactactacctgagcggcgtgcacggcagctctgtggccgctgagagcttctttgtgttctggagcttcctgatcctgctgtctgtgaccatccccatgtccatgttcatcctgtctgagttcatctacctgggcaacagcgtcttcatcgactgggatgtgcagatgtactacaagccccaggatgtgcctgccaaggcccggagcaccagcctgaatgaccacctgggccaggtggagtacatcttcagtgacaagacaggcaccctgacccagaacatcctgaccttcaacaagtgctgcatcagcggccgggtgtatggagctgcccccaccccagagctgcctgctggcagcagcatcttcaagggcctgcgggtgcctgagaaccagagccacgtgtggccccacgcccagcacctgcggcccaacctgaaccagggcaccgtggcccgctggccaggcttcctgtggaggggccctgggaagttcttcttcttcctgcggcagagcctgaccctgagcacccaggccggcatgcagtggtgcaacctgggcagcctgcagagccccccaccccgcttcaagcgcttctcctggctgagcctgcccagctcctgggactaccgccacctgcccccccacctgatcttcctgtacttctag

SEQ ID NO: 294864 - DNA, 1737 bp, Artificial Sequence
  derived and/or modified sequence
atgggcgacagccccggccggggcgcccccgagcggcggcacaaggcccagcccggacgggcacgaaaatacgagtggcgaccagagggccctacaagcatgggctctttggggcagagggaagatctccaggacgaggaccgcaattcggctttcacatggaaggtccaagcgaacaatcgggcctacaatggccagtttaaggagaaagtgattttgtgttggcagagaaaaaagtacaagaccaatgtgattcgcacagctaaatacaatttttactctttcctgcccctgaatttgtatgagcagttccacagagtctccaacctgtttttcctgatcatcattattctgcagtcgatacccgacataagcactctgccatggtttagcttgagtactcccatggtgtgtctgctcttcattagggcgacacgggacttagtggatgatatgggacggcacaagtccgatagagccattaacaatcgcccgtgtcaaattctgatgggcaagagtttcaagcagaaaaaatggcaggacctgtgtgtgggggatgtcgtgtgcctgcggaaagataatattgtgccagctgatatgctgttgttggcgtctaccgagcccagttccctatgctatgtggagactgtggacattgatggagaaaccaatctgaagtttcggcaagccttgatggtgacccataaggaactagcaacaattaagaaaatggcttcttttcaagggacggtgacatgcgaagctcccaacagccgaatgcatcacttcgtcggttgtttggagtggaacgacaaaaaatatagccttgacatcggaaatttactgctgcggggctgccgaatacggaacaccgatacctgctatgggctcgtgatatacgctgggtttgatactaaaattatgaagaactgtgggaaaatccaccttaagcgcacaaagctggacctactgatgaacaagttggtcgtggtgatctttatcagcgttgtgctggtgtgtctagtgctcgcttttggcttcggttttagcgtgaaagagtttaaggatcaccactactacctgagtggtgtgcacggctctagcgtcgcagccgagagctttttcgtcttttggtcattcctcatcttactctcagtaacaatccccatgtccatgttcattctctcggagttcatttacctcggtaattctgtctttatagactgggatgtgcagatgtactataagcctcaagacgtgcctgccaaagcccgatccacctcactgaacgatcatctcggacaagtcgaatacattttttcagacaaaactggcaccctgactcagaatattctgactttcaataaatgttgcatttctggccgcgtatacggggctgctcctactcccgagctgccggcgggctcatctattttcaaaggcttgcgcgtccccgagaaccaaagtcatgtgtggccacacgcccagcacctgagaccgaatctgaaccaaggcacagttgctagatggcctggctttctgtggagaggcccaggtaaattcttcttctttctgagacagtccttgacgctttcaactcaagccgggatgcagtggtgcaatctgggatcactgcagtctccgccacctaggttcaaacgattctcatggctgagcctgccctcctcatgggattaccgccatttaccacctcacctgatcttcttgtatttctag

SEQ ID NO: 294865 - DNA, 1737 bp, Artificial Sequence
  derived and/or modified sequence
atgggggattcacccggtagaggggcaccagaacggagacataaagctcagcccggtagggccagaaaatatgagtggcggcctgagggcccaaccagcatgggctctctgggccaaagagaggacttacaggacgaagatcggaactctgcgttcacctggaaggtccaggccaataacagggcatataacggacagtttaaagaaaaggtcatcctctgttggcagcggaagaagtacaaaacaaacgtcatcaggacagccaaatataacttctactccttcttacccctgaatctgtatgaacagtttcacagagtgagtaatctgttttttctaatcatcatcattctccagtccattcccgacattagcacattaccctggttctcgctgtctacacctatggtttgcttacttttcattagggcaaccagggatttggttgatgatatgggcagacataaatccgatagggcaatcaacaaccgcccttgtcagatcctgatgggcaagtcttttaaacagaagaaatggcaggacctgtgtgtcggagatgtagtttgcctgcgaaaggacaacatagttccagccgacatgttgttgcttgcttctacggagcccagtagcttatgttacgtggaaactgtggacatcgatggagaaacaaatcttaaatttcggcaggctctaatggtgactcataaggagctcgcaaccatcaagaagatggcctcattccagggcacagttacttgtgaggcccctaattcacggatgcatcatttcgtcgggtgtctcgagtggaatgacaagaagtactctctggatattggcaatctcctcttgcgcggttgtcgcatcagaaataccgacacttgctacggcctggtgatctacgcgggtttcgacaccaagataatgaaaaattgtgggaaaatacacctgaagcgcaccaagctcgatctgcttatgaacaagctggttgtcgtcattttcatcagcgtggtgcttgtgtgtttagtgctggcatttggcttcggcttttcggtcaaggagttcaaggatcatcattattatctctctggagtccatggatccagtgtggccgctgagagtttctttgtcttttggagctttctgatacttttgtctgtcacgatccctatgagtatgttcatactttccgagtttatctatctaggcaactccgtcttcattgattgggatgttcagatgtactacaagcctcaggatgtccctgctaaggctcgtagcacgagcctgaatgatcacctgggacaggtagagtatatttttagtgacaagaccggaacactgacccagaatatcctgactttcaataagtgctgcatcagcggcagagtgtatggggcagcgccaactcccgagctgccagccggaagtagcatctttaaaggcctgagggtacccgagaaccagtctcacgtttggcctcatgcgcagcacctaagacctaatttgaatcaggggactgtggccagatggcctggctttctgtggagggggccaggcaagttcttcttttttcttcgccaatccctcactttgagcacccaggccggtatgcagtggtgtaatcttgggtcactccagtcaccaccgccaagatttaagcggttttcttggctttccctgccatccagctgggattaccgacaccttcctcctcatctgattttcctttatttttag

SEQ ID NO: 294866 - DNA, 2758 bp, Artificial Sequence
  derived and/or modified sequence
gtttcaggaccgttggcaccgggctaacggttccaccacgtccgccgccctggacgcccgcggcctgcccccccctgcctctcctgcgccggacctggggacacgggtgactcagacgtgactcaggaaggctcaggtcctgctggcatccgcggaggtgagacggtgatcagagctgggatgggagactccccaggcagaggggcacctgagaggaggcacaaggcccagcctggccgggctaggaagtatgaatggagaccagaaggccccaccagcatgggcagcctcggccagagagaagatctccaagatgaggacaggaactcagcattcacctggaaggtccaggccaacaaccgtgcctacaacgggcagttcaaggagaaggtgatcctgtgctggcaaaggaagaaatacaagaccaatgtcatccgcacggccaagtacaacttctactcgttcctgccgctgaacctgtacgagcagttccaccgcgtgtccaacctgttcttcctcatcatcatcatcctgcagagcattcccgacatctccacgctgccctggttctcgctcagtacccctatggtctgcctcctcttcatccgtgccacccgggacctggtggacgacatggggagacacaagagtgacagagccatcaacaacagaccctgccagattctgatggggaagagcttcaagcagaagaaatggcaggatctgtgcgtgggggatgtggtctgtctccgcaaggacaacatcgtcccagccgacatgctcttgctggccagcacggagcccagcagcctgtgctatgtggagacggtggacattgacggggagaccaacttgaagttcagacaggccctgatggtcacccacaaagaactggccactataaagaagatggcgtcctttcaaggcacagtgacgtgtgaggcgcctaacagtcggatgcaccacttcgtggggtgcctggaatggaatgacaagaaatactccctggacattggcaacctcctcctccgaggctgcaggattcgcaacacagacacctgctatggactggtcatttatgctggttttgacacaaaaattatgaagaactgtggcaagatccatttgaagagaaccaagctggacctcctgatgaacaagctggtggttgtgatcttcatctccgtggtgcttgtctgcctggtgttggccttcggcttcggtttctcagtcaaagaattcaaagaccaccactactacctctcgggggtgcatgggagcagcgtggccgcagagtccttcttcgtcttctggagcttcctcatcctgctcagcgtcaccatcccgatgtccatgttcatcctgtccgagttcatctacctggggaacagcgtcttcatcgactgggacgtgcagatgtactacaagccgcaggacgtgcctgccaaggcccgcagcaccagcctcaacgaccacctgggccaggtggaatacatcttctcggacaagacgggcacgctcacgcagaacatcttgaccttcaacaagtgctgcatcagcggccgcgtctatggtgcggccccgacacctgagctcccagctgggtcctcgatcttcaaggggctcagggtgcctgagaaccagagccacgtctggccccatgcccagcacctccgcccgaatctgaaccagggaaccgtagccagatggcctggtttcctttggagggggccaggaaaattttttttttttttgaggcagagtctcactctgtctacccaggcaggaatgcagtggtgcaatcttggctcactgcaatctccacctcccaggttcaagcgattctcctggctcagcctcccgagtagctgggattacaggcacctgccaccacacctaatttttttgtatttttagcagagatggggtttcaccatgttggccatgctggtctcgaactcctggcctccggcgatccacctgcctcggcctcccaaagtgctgggattacaggcgtgagccaccacgcccggccgactttttttttttttttctctctgagacggagttttgctctcgttgcccaggctggagtgcagtggtgcgatctctgctcactgaaacctccgcctcctgggttgattctcccgcctcagcctcccaagtagctgggattacagttgcgtgccaccccgcctggctaatttttgtattttttttttcagtagagatggggtttcaccctgtttcccaggctggtctcgaactcctgacttcaggtgatctgcctgcctcagcctccaaaatattggcattgcaggcatgagccaccacacctagccaaacttttaaacagtgtgtatttatttattttttgagatggggtcttgctctgccgcccaggctggaatgcagtggtgcaatcatagcttattgcagcctcgaattcctgggctcaagcaatcctcccacttcagcttcccaagtagccgggactacaggagagtgccaccttacccagcttatttttgtattttttgtcaagacagggaatccctatgttgcccaggctggtcttgaactcctgggcttaagcgatccgcctgcctccgcttttcaaagcactggaattacagatgtgagccaccacacccggccactgctcttcttttgactttcacaagcctttatttgtggatgctgaaattcgaattgctgagtatttctcagatcacaaaataaaatagttttgtttgtt

SEQ ID NO: 294867 - DNA, 1737 bp, Artificial Sequence
  derived and/or modified sequence
atgggcgacagccccggcagaggcgcccccgagagaagacacaaggcccagcccggcagagccagaaagtacgagtggagacccgagggccccaccagcatgggcagcctgggccagagagaggacctgcaggacgaggacagaaacagcgccttcacctggaaggtgcaggccaacaacagagcctacaacggccagttcaaggagaaggtgatcctgtgctggcagagaaagaagtacaagaccaacgtgatcagaaccgccaagtacaacttctacagcttcctgcccctgaacctgtacgagcagttccacagagtgagcaacctgttcttcctgatcatcatcatcctgcagagcatccccgacatcagcaccctgccctggttcagcctgagcacccccatggtgtgcctgctgttcatcagagccaccagagacctggtggacgacatgggcagacacaagagcgacagagccatcaacaacagaccctgccagatcctgatgggcaagagcttcaagcagaagaagtggcaggacctgtgcgtgggcgacgtggtgtgcctgagaaaggacaacatcgtgcccgccgacatgctgctgctggccagcaccgagcccagcagcctgtgctacgtggagaccgtggacatcgacggcgagaccaacctgaagttcagacaggccctgatggtgacccacaaggagctggccaccatcaagaagatggccagcttccagggcaccgtgacctgcgaggcccccaacagcagaatgcaccacttcgtgggctgcctggagtggaacgacaagaagtacagcctggacatcggcaacctgctgctgagaggctgcagaatcagaaacaccgacacctgctacggcctggtgatctacgccggcttcgacaccaagatcatgaagaactgcggcaagatccacctgaagagaaccaagctggacctgctgatgaacaagctggtggtggtgatcttcatcagcgtggtgctggtgtgcctggtgctggccttcggcttcggcttcagcgtgaaggagttcaaggaccaccactactacctgagcggcgtgcacggcagcagcgtggccgccgagagcttcttcgtgttctggagcttcctgatcctgctgagcgtgaccatccccatgagcatgttcatcctgagcgagttcatctacctgggcaacagcgtgttcatcgactgggacgtgcagatgtactacaagccccaggacgtgcccgccaaggccagaagcaccagcctgaacgaccacctgggccaggtggagtacatcttcagcgacaagaccggcaccctgacccagaacatcctgaccttcaacaagtgctgcatcagcggcagagtgtacggcgccgcccccacccccgagctgcccgccggcagcagcatcttcaagggcctgagagtgcccgagaaccagagccacgtgtggccccacgcccagcacctgagacccaacctgaaccagggcaccgtggccagatggcccggcttcctgtggagaggccccggcaagttcttcttcttcctgagacagagcctgaccctgagcacccaggccggcatgcagtggtgcaacctgggcagcctgcagagccccccccccagattcaagagattcagctggctgagcctgcccagcagctgggactacagacacctgcccccccacctgatcttcctgtacttctag

SEQ ID NO: 294868 - protein, 1004 aa, Artificial Sequence
  derived and/or modified sequence
MHQIISKYPLLNTVETLTAAGTLIAKVKAFHYESNNDLEKQEFEKALETIAVAFSSTVSEFLMGEVDSSTLLAVPPGDSSQSMESLYGPGSEGTPPSLEDCDAGCLPAEEVDVLLQRCEGGVDAALLYAKNMAKYMKDLISYLEKRTTLEMEFAKGLQKIAHNCRQSVMQEPHMPLLSIYSLALEQDLEFGHSMVQAVGTLQTQTFMQPLTLRRLEHEKRRKEIKEAWHRAQRKLQEAESNLRKAKQGYVQRCEDHDKARFLVAKAEEEQAGSAPGAGSTATKTLDKRRRLEEEAKNKAEEAMATYRTCVADAKTQKQELEDTKVTALRQIQEVIRQSDQTIKSATISYYQMMHMQTAPLPVHFQMLCESSKLYDPGQQYASHVRQLQRDQEPDVHYDFEPHVSANAWSPVMRARKSSFNVSDVARPEAAGSPPEEGGCTEGTPAKDHRGECPAGPRGGRWLPATHPGPSPETPLSPAGRGHQVHKSWPLSISDSDSGLDPGPGAGDFKKFERTSSSGTMSSTEELVDPDGGAGASAFEQADLNGMTPELPVAVPSGPFRHEGLSKAARTHRLRKLRTPAKCRECNSYVYFQGAECEECCLACHKKCLETLAIQCGHKKLQGRLQLFGQDFSHAARSAPDGVPFIVKKCVCEIERRALRTKGIYRVNGVKTRVEKLCQAFENGKELVELSQASPHDISNVLKLYLRQLPEPLISFRLYHELVGLAKDSLKAEAEAKAASRGRQDGSESEAVAVALAGRLRELLRDLPPENRASLQYLLRHLRRIVEVEQDNKMTPGNLGIVFGPTLLRPRPTEATVSLSSLVDYPHQARVIETLIVHYGLVFEEEPEETPGGQDESSNQRAEVVVQVPYLEAGEAVVYPLQEAAADGCRESRVVSNDSDSDLEEASELLSSSEASALGHLSFLEQQQSEASLEVASGSHSGSEEQLEATAREDGDGDEDGPAQQLSGFNTNQSNNVLQAPLPPMRLRGGRMTLGSCRERQPEFV

SEQ ID NO: 294869 - DNA, 3015 bp, Artificial Sequence
  derived and/or modified sequence
atgcaccaaattatctctaaataccctcttcttaataccgttgaaaccctcaccgccgccggaacccttattgccaaagtgaaagcctttcattatgagagcaacaatgacctcgaaaagcaggagtttgagaaggctctagagacaatcgctgtagctttcagcagcacagtgtcggagttcctgatgggcgaagtggacagctctacgcttctagctgttcccccaggggatagttcacaaagcatggagtctctgtatggaccgggttctgaaggcactcctccttctttggaggactgtgacgccggctgcctcccagcagaagaagtggatgtccttctacagagatgtgagggaggcgtggatgcagcactgctatacgcaaaaaatatggccaagtacatgaaagacctcatttcctatttggagaaaaggacaacactcgagatggagttcgcaaaaggcctgcagaaaattgcgcataattgtagacagagcgtgatgcaggagcctcacatgcctctgctctcaatatactctctggctctggaacaggatttggagttcggacactccatggtgcaggcagtcgggaccctccagacccagacctttatgcagccactcacactgagaagactcgagcacgagaaaaggaggaaagagattaaagaagcatggcaccgggcgcagagaaaactgcaagaggctgagtcgaacctccgaaaagccaaacagggatacgtccagcggtgtgaggatcacgataaggcacgattcctggtagccaaggcggaggaggagcaggcaggcagcgcaccaggggccggctccacagcaacaaagaccttagacaaacgtaggcgccttgaggaggaagcgaaaaataaagctgaggaggctatggccacctatagaacttgtgtggctgacgccaagacacagaaacaggagttagaggatacaaaggttaccgccctacggcaaatccaggaagttattagacagagcgaccagaccattaaatcagcaaccatctcctactaccagatgatgcacatgcagacagcgccattacctgtccactttcagatgctgtgcgagtcatccaagctatatgaccctggtcagcaatacgcatcccacgtgcggcaactgcagcgtgaccaggagcccgacgtacattatgacttcgaaccacatgtctctgccaatgcctggtcccccgtgatgagggcgcggaaatcttctttcaacgtgtccgacgtagcaagacctgaagccgccggcagcccccctgaggagggcgggtgcactgagggcaccccagccaaggaccatcgtggcgaatgtccagcagggccgcgggggggaaggtggctacccgctacgcaccctggcccaagcccggagaccccgctgagccccgctggccggggtcatcaggtgcacaaatcatggcccctctctatcagcgactccgattcaggcctggatcccggaccaggcgcaggagactttaagaaattcgaaaggacaagttcaagcggaactatgtcctcaactgaggaattggtggaccccgatggaggagctggagcatcagccttcgagcaagctgatctgaatgggatgacccccgaattgccagttgcagtgcctagtggaccttttagacacgagggcttgagtaaggctgcccggacgcatcgtctacgcaaactacgcacgcccgccaaatgccgggagtgtaactcctatgtctatttccagggggcagagtgcgaggagtgttgcttagcctgtcataaaaaatgcctagaaaccctggcaattcaatgtggccataagaaattacaaggccgcttgcagctcttcggccaagattttagtcacgctgctaggtccgcgccagatggcgtgccctttatagttaagaagtgtgtgtgcgaaatcgaaaggcgggccctgaggacaaaagggatttatcgtgtcaacggagtcaaaacacgagtggaaaagttatgccaggcatttgagaacgggaaggagctagtggaactctcccaagctagtcctcacgacatctctaatgtactgaagctatatcttcgccagctccccgaaccactcatctccttccggctgtatcacgaactggttggtttagcaaaggactccctgaaagccgaggccgaagcgaaagccgctagccggggaagacaagatggctccgagagtgaagcggtggccgtagcacttgcaggaagactcagggagctccttagagacctgcctcccgaaaaccgagcgtcattgcagtacttgctcagacacctgcgaagaattgttgaggtggaacaagataacaagatgacacctgggaatctcggcatagtgttcgggcccaccctgctgagacctcgccccaccgaagcaacggtttcattgtcttccctggtggactacccacatcaggcacgggtgattgagacacttattgtccattacgggttagtattcgaagaagagcctgaggaaactccgggcggtcaggatgagtcctcaaatcagcgcgcagaggtagtggtccaggtcccctacctagaagcaggagaagccgtggtgtaccctctgcaagaggctgctgcggatggttgcagagaaagccgggtggtgtctaatgattcggacagcgatttagaggaagcatccgagctgctgagttccagtgaggcatccgcacttggacacctttcttttctggagcagcagcagtcagaggccagcctggaagtggcttcgggttcacatagcggctccgaggaacagcttgaggcaaccgcacgcgaggatggtgacggtgatgaggatggcccagctcagcaactctccggttttaataccaaccagtccaataatgttttgcaggcccctttacctccgatgcggctgcgcggcggtcgcatgacgctgggttcctgcagagaaagacagccagagttcgtttag

SEQ ID NO: 294870 - DNA, 3339 bp, Artificial Sequence
  derived and/or modified sequence
gacaatgtggtcccgaagcggccagcgccgggagctgcagcgctgagacccccagcccgccccctcgggctcccggccggggccccatcatgttctccaggaagaaacgagagctcatgaaaaccccttccatctcgaaaaagaaccgcgcgggaagccccagcccgcagccctcggggacctccttgaggcccgccgcccgcgggcccacgagtgcctgggtgaggctctgcgtgtcatgcatcagatcatctccaagtacccgctgctgaacaccgtggagacgctcaccgcagccggcaccctcattgccaaggtcaaagccttccattatgagagcaacaatgatctggagaaacaggagttcgagaaggccctggagacgattgctgtggccttcagtagcacagtgtccgagttcctcatgggtgaagtggacagcagcaccctcctagcagtgcctcctggggactcgagccagtccatggaaagcctgtatggaccgggcagtgagggcacgcctcccagcctggaagactgtgacgccggctgcctgcccgccgaggaggtggacgtgctgctacagcgctgtgaggggggcgtggatgccgcactgctgtatgccaagaacatggccaagtacatgaaggacctcatcagctacctggagaagcggacgacgctggagatggagtttgccaagggcctgcagaagatcgctcacaactgcagacagagcgtcatgcaggagccccacatgccgctcctgtccatctactcgctggccctggagcaggacctggagttcggccacagcatggtgcaggcggtgggcaccttgcagacccagaccttcatgcagcccctgaccctgcggcggcttgaacacgagaagcgcaggaaggagatcaaggaggcctggcaccgtgcccagaggaagctgcaagaggcggagtccaacctgcgcaaggccaagcagggttacgtgcagcgctgcgaggaccacgacaaggctcgcttcctcgtggccaaggcggaggaggagcaggctggcagcgcgccgggagcaggcagcacggccaccaagaccctggacaagcggcggcggctggaggaggaggccaagaacaaggcggaggaagctatggccacctaccgcacctgcgtggccgacgcgaagacgcagaagcaggagctggaggataccaaggtgacggcgctgcggcagatccaggaggtcatccggcagagcgaccaaaccatcaagtcggccacgatctcctactaccagatgatgcatatgcagacggcgccgctgcccgtgcacttccagatgctgtgtgagagcagcaagctgtatgacccaggccagcagtacgcctcccacgtgcgccagctgcagcgggaccaggagcccgatgtgcactacgactttgagccccacgtctccgccaacgcctggtcccccgtcatgcgtgcccggaagagcagcttcaacgtgagtgatgtggcgcggccggaggctgccgggagccccccagaagaaggcgggtgcactgagggcacacctgccaaggaccacaggggtgagtgtccggcggggcccaggggcggacgctggctccctgcgacccaccctggcccttcaccagagacgcctctttctccagccgggcgaggacaccaggttcacaagtcatggccgctctcgatctcagactcggacagtgggctggaccccggccctggcgcaggggactttaagaagttcgagcggacgtcatccagtggtaccatgtcgtccacggaggagctggtggacccagacggtggagccggggcttcagcctttgagcaggctgacctcaacggcatgacccccgagctgccggtggccgtgcccagtggaccgttccgccacgaggggctgtccaaggcggcccgtactcaccggctccggaagctccgcacgcccgccaagtgccgcgagtgcaacagctacgtctacttccagggtgctgagtgtgaagagtgctgcctggcctgccacaagaaatgtctggagacgctggccatacagtgcgggcacaagaagctgcaaggccgcctgcagctgttcggccaggacttcagccacgcggcccgcagcgcccccgacggcgtgcccttcatcgtcaagaagtgcgtctgcgagatcgagcggcgggcgctgcgcaccaagggcatctaccgggtcaatggggtaaagacacgcgtggagaagctgtgccaggccttcgagaacggcaaggagctggtcgagctgtcgcaggcctcgccccacgacatcagcaacgtcctcaagctctacctgcgtcagcttcccgagccgctcatctccttccgcctctaccacgagctcgtagggctggccaaggacagcctgaaggcagaggccgaggccaaggcggcgtcccggggccggcaggacggctcggagagcgaggcagtggcggtggccctggcaggtcggctgcgggagctcctgcgggacctgccgcctgagaaccgggcctcgctgcagtacctgctgcgtcacctacgcaggatcgtggaggtggagcaggacaacaagatgacccccgggaacctgggcatcgtgttcgggcccacgctgcttcggccacggcccaccgaggccaccgtgtccctctcctccctggtggattatccccatcaggcccgcgtcatcgagactctcatcgtccactacggcctggtcttcgaggaggagccggaggagacccccgggggccaggacgagtcatccaaccagcgagctgaggtagtcgtccaggtgccgtacctggaggcgggcgaggcggtggtctacccgctgcaggaggcggcggcggacgggtgcagagaatcccgagttgtgtccaacgattcggactcggacctagaggaggcctccgagctgctgtcctcatcggaggccagtgccctgggccacctcagcttcctggagcagcagcagagcgaggccagcctagaggtggcttctggcagccacagcggcagtgaggagcagctggaggccacagcccgggaggacggggacggggacgaggacggcccggcccagcagctctcaggattcaacaccaaccagtccaacaacgtgctgcaggccccactgccccccatgaggctccgtggcgggcggatgacactgggctcctgcagggaaaggcagccggaattcgtgtgagctggggtggggctgggaccacaggtggcttctctcttgcctgctcctgtccctccagcacgtcccctgcaccacggcatagctta

SEQ ID NO: 294871 - DNA, 3015 bp, Artificial Sequence
  derived and/or modified sequence
atgcaccagatcatcagcaagtaccccctgctgaacacagtggagaccctgacagctgctggcaccctcatcgccaaggtgaaggccttccactatgagagcaacaatgacctggagaagcaggagtttgagaaggccctggagaccatcgctgtggccttcagcagcacagtgtctgagttcctgatgggagaggtggacagcagcaccctgctggccgtgcccccaggggacagcagccagagcatggagagcctgtatggccctggcagcgagggcaccccacccagcctggaggactgtgatgctggctgcctgcctgctgaggaggtggatgtgctgctgcagagatgtgagggcggcgtggatgctgccctgctgtatgccaagaacatggccaagtacatgaaggacctgatctcctacctggagaagaggaccaccctggagatggagtttgccaagggcctgcagaagatcgcccacaactgccggcagagcgtgatgcaggagccccacatgcccctgctgagcatctacagcctggccctggagcaggacctggagtttggccacagcatggtgcaggccgtgggcaccctgcagacccagaccttcatgcagcccctgaccctgcggcggctggagcacgagaagaggaggaaggagatcaaggaggcctggcaccgggcccagaggaagctgcaggaggccgagagcaacctgaggaaggccaagcagggctacgtgcagagatgtgaggaccatgacaaggcccgcttcctggtggccaaggccgaggaggagcaggccggcagcgcccctggagctggcagcacagccaccaagaccctggacaagagaagaaggctggaggaggaggccaagaacaaggccgaggaggccatggccacctaccgcacctgtgtggctgatgccaagacccagaagcaggagctggaggacaccaaggtgacagccctgcggcagatccaggaggtgatccggcagagcgaccagaccatcaagagcgccaccatctcctactaccagatgatgcacatgcagacagcccccctgcctgtgcacttccagatgctgtgtgagagcagcaagctgtatgaccccggccagcagtatgccagccacgtgcggcagctgcagagggaccaggagccagatgtgcactatgactttgagccccacgtgtctgccaatgcctggagccctgtgatgagggccaggaagagcagcttcaacgtgtctgatgtggcccggcctgaggccgccggcagccccccagaggagggcggctgcacagagggcaccccagccaaggaccacagaggagaatgtcctgctggcccccggggcggccgctggctgcctgccacccaccctggccccagccctgagacccccctgagccctgctggccggggccaccaggtgcacaagtcctggcccctgagcatcagtgacagcgacagcggcctggaccccggccctggagctggggacttcaagaagtttgagaggaccagcagcagcggcaccatgagcagcacagaggagctggtggaccctgatggaggagctggggccagcgcctttgagcaggccgacctgaatggcatgaccccagagctgcctgtggccgtgcccagcggccccttcagacatgagggcctgagcaaggccgcccggacccaccggctgaggaagctgcggaccccagccaagtgccgggagtgcaacagctatgtgtacttccagggcgcagaatgtgaggagtgctgcctggcctgccacaagaagtgcctggagaccctggccatccagtgtggccacaagaagctgcagggccgcctgcagctgtttggccaggacttcagccacgccgcccggagcgccccagatggagtgcccttcatcgtgaagaagtgtgtgtgtgaaattgaaagaagagccctgcggaccaagggcatctacagagtgaatggagtgaagaccagggtggagaagctgtgccaggcctttgaaaatggcaaggagctggtggagctgagccaggccagcccccatgacatcagcaatgtgctgaagctgtacctgcggcagctgcctgagcccctcatctccttccggctgtaccacgagctggtgggcctggccaaggacagcctgaaggccgaggccgaggccaaggccgccagccggggccggcaggacggcagcgagagcgaggccgtggccgtggccctggccggccgcctgcgggagctgctgcgggacctgcccccagaaaatagagccagcctgcagtacctgctgcggcacctgcggcgcatcgtggaggtggagcaggacaacaagatgaccccaggcaacctgggcatcgtgtttggccccaccctgctgcggccccggcccacagaggccaccgtgtccctgagcagcctggtggactacccccaccaggcccgggtgattgagaccctgattgtgcactacggcctggtgtttgaggaggagcctgaggagacccctgggggccaggatgagagcagcaaccagagagctgaggtggtggtgcaggtgccctacctggaggccggggaggccgtggtgtaccccctgcaggaggccgctgctgatggctgccgggagagccgggtggtgtccaatgacagcgacagcgacctggaggaggccagcgagctgctgagcagcagcgaggccagcgccctgggccacctgtccttcctggagcagcagcagagcgaggccagcctggaggtggccagcggcagccacagcggcagcgaggagcagctggaggccacagcccgggaggatggagatggagatgaagatggccctgcccagcagctgagcggcttcaacaccaaccagagcaacaacgtgctgcaggcccccctgccccccatgaggctgcggggcggccgcatgaccctgggcagctgccgggagcggcagcctgagtttgtgtag

SEQ ID NO: 294872 - DNA, 3015 bp, Artificial Sequence
  derived and/or modified sequence
atgcaccagatcatcagcaagtaccccctgctgaacaccgtggagaccctcacagctgccggtacactcatcgcaaaagtcaaggccttccattatgagtcaaacaacgacctggaaaagcaagagtttgagaaggctctcgaaactatcgccgtagctttctcctcgaccgtaagcgaatttttgatgggagaggtggactcttctaccctattagccgttccccccggtgactcatcacaatctatggagagtctgtatggacctggcagtgagggcacgcctccttctctcgaggattgtgatgctgggtgcctccccgccgaggaggtggacgtcctgcttcagagatgcgagggtggggtcgatgctgcgctgctttacgctaagaatatggccaagtacatgaaggacctaatcagctatctggaaaaacgcaccaccctagaaatggaatttgcaaaaggcctgcaaaaaattgcccataactgccggcagtcggtgatgcaggagccccacatgccccttctgagcatctactctctggccctagagcaggacctggagttcggtcactctatggtgcaggcagtcggaacactgcagacccagaccttcatgcaacctttgacactccggcggctcgagcacgagaaacggcgaaaggagattaaggaagcttggcacagagcacagcgtaagttgcaagaggccgagagtaacctgagaaaagctaaacagggctacgtccagcggtgtgaggatcatgataaggcccgcttcttggttgctaaggccgaggaagaacaggccggatcagccccaggggctggaagcaccgcaaccaaaacgttagacaagagaaggagactggaggaggaggctaaaaacaaggccgaagaggccatggcaacttacagaacatgcgtggctgacgctaagactcagaagcaggaactcgaggacaccaaagttacggccctcaggcagatccaagaagttatccgccagtccgaccagaccataaagtcggccacaatctcgtattatcagatgatgcacatgcagaccgcaccgctgcccgtccacttccagatgctgtgcgaaagtagtaagctctatgatccaggccagcaatacgccagtcacgttcgtcaactccagagagaccaggagcctgatgttcattacgacttcgaacctcatgtctccgccaatgcttggtcacctgtcatgcgagctcggaaatcctcattcaatgtgagcgacgtggctcgtcctgaggccgcagggagtcctcctgaggaaggaggttgcacggagggcacgccagcaaaggaccacagaggtgagtgtccagctggtccccgtggcggtagatggctaccagcaacacatcccggaccatctcccgaaacacccctgagtccagccgggcgcggccaccaggtacataaatcatggcccctgtcgatctccgactctgacagcgggttagacccgggaccaggcgccggcgatttcaagaagtttgagcgaactagcagtagtgggaccatgtcttctaccgaagagttagttgaccctgatgggggggctggcgcctccgctttcgagcaagcagatttgaacgggatgacccccgagctgcccgtggcagtgccttcaggtcccttcaggcacgagggtctgagcaaggctgccagaacccataggctcagaaaactgcggacaccagctaagtgcagggagtgcaactcctatgtctactttcagggtgccgagtgcgaggagtgctgcctggcttgtcacaagaaatgcctagagacgctggcgatccagtgtgggcacaaaaagctccaaggccgcttgcagttgttcggacaggatttttcacatgctgcacggagtgctccagatggggtgccctttatagttaaaaaatgtgtttgtgagatcgaacggcgcgccctgcgtactaaaggaatttatcgcgtgaacggagttaagaccagagttgagaagctatgccaggccttcgaaaatggtaaggagctagtggagctgagccaggctagcccccacgatatatcaaatgttctaaaactgtacctgcggcaactgccggaacctctgatctccttcaggttatatcacgagctggtgggactggccaaggatagcctgaaggcggaagccgaggcaaaagccgcctcacgcgggaggcaagatggcagcgaatcagaagcagtggctgttgcacttgccggccggttaagagaactcctccgagatttgcccccggagaacagagcgtcgctgcagtacttgcttcgtcacctaaggcggatcgtggaagtcgagcaggacaataaaatgacgcccggcaatctcgggatcgtatttggccccacactattgcggccccgtcctaccgaggctaccgtgtctctcagctctctcgtcgattatccccatcaggctcgcgtgatcgagaccctgatcgtccattatgggctagtcttcgaggaagaacctgaagagacaccaggcggccaggacgagagctctaaccaaagggccgaagttgtggtgcaggtaccctacctggaggcaggagaggcagtggtgtatcccctccaggaagccgctgctgatggatgcagggagagcagagtcgtctccaacgactctgattccgacctagaagaggctagcgagttgctaagctccagcgaggctagcgcactaggtcacctttcctttctcgaacagcagcagagcgaagcaagcttggaggtggcttcaggatcccactcagggtctgaggagcaacttgaggccactgcgcgtgaagatggggacggtgacgaagatggcccagcccagcagttgagtggtttcaacacaaaccagagtaataacgtgctccaagctccgctgcctcccatgcgacttaggggaggacgtatgactctggggagctgtcgcgagcggcagcctgagtttgtgtag

SEQ ID NO: 294873 - DNA, 3015 bp, Artificial Sequence
  derived and/or modified sequence
atgcaccaaattatcagtaaatatcctcttctgaacaccgtggagactcttaccgcggcaggcaccctgattgccaaagtgaaagcatttcactatgaaagtaacaatgacttggagaagcaagagttcgagaaagctctggagactattgctgtggccttcagctctactgtttctgagtttctgatgggcgaggtcgactcctctaccctgctggccgtccctcccggagactcttcccagagcatggagtccctctatggtcccggatccgagggcacaccacccagcttggaagattgcgatgcgggttgcctccctgccgaggaggtggacgtcctgctccagagatgcgaaggtggagttgatgcggctctgctgtacgctaagaacatggccaaatacatgaaggatctgatcagttacctcgagaagcgaactacactggagatggagtttgcgaaggggttacagaaaatcgctcacaactgccgccagtccgttatgcaggaacctcatatgccgttgctcagcatttattccctcgcactggagcaggacttagagttcggccactccatggtgcaagcagtcggcacactacaaacccaaaccttcatgcagccgcttacccttcgcaggctggaacatgagaagcggaggaaagagataaaggaggcatggcatagagcccagcgtaaactgcaggaggctgagtccaacctgagaaaggccaagcagggatatgttcaacgctgtgaggaccatgacaaagctcgcttcctcgtggcaaaagcggaagaagagcaggccggtagtgcccctggggcaggcagtaccgccaccaaaaccctggataaacgccgtagactggaggaggaggccaagaataaagccgaggaagccatggccacctataggacctgcgtggccgacgctaaaacgcagaaacaggagttggaggacacaaaggttactgccttgagacaaattcaagaagtgataagacaatctgaccaaaccatcaagagcgctactatttcctactatcaaatgatgcatatgcaaacggcccctctccccgtacactttcaaatgttatgcgaaagctccaaattgtacgacccaggacagcagtatgcttcccacgtacgacaacttcagagggaccaggaacctgatgtccactatgacttcgagccccatgtctcagccaacgcctggagtccggttatgagggctagaaagagctcgtttaatgtgtcggacgttgcacgaccagaagccgcaggttcaccacctgaggaaggtggctgtaccgaaggaacccccgcaaaggaccaccgaggagagtgtcctgcagggcctagggggggtcgctggctcccagctacacatcctggtcccagccccgagactccacttagccctgccggtcgcggtcatcaagtgcacaagagttggcccctgtcgatcagcgacagcgattccggcttagaccctggtcctggagctggggatttcaagaaatttgagcgcacttcctcttccggtacaatgagctctactgaagaactagtcgatcctgatggaggcgcaggggcaagtgcttttgagcaggccgacttaaatggaatgactcccgaactgccagtagccgtaccctctgggcctttccggcacgaaggactctcaaaggcagccaggacccacaggttacgtaaattaagaacccctgccaaatgtcgcgaatgtaactcatatgtgtactttcaaggcgctgaatgtgaagaatgctgtctggcatgccacaagaagtgcttggaaaccctggctattcagtgcggccataaaaaattacaaggaagactgcagcttttcggacaggatttttctcacgcagccagatctgctcctgatggcgttccgtttatagtaaagaaatgtgtgtgtgaaatcgagagacgggctttgcgtacgaagggaatttatcgcgtgaatggtgtgaagacgcgcgtggaaaaactgtgccaggcctttgagaacggcaaagaactcgttgaactctctcaagctagtcctcacgacatttcaaacgttctcaagctttacctgagacagctgcctgaacctcttataagctttcgcctgtaccatgaactcgttgggctggcgaaagacagcctgaaggccgaagccgaggcaaaggctgcttctcggggacgtcaagatgggtctgaatctgaagccgtcgccgtcgccctcgccggtagacttcgcgaactgctgcgagatttgccgcctgaaaaccgggcatcgctccagtatttactccgacacttacggagaatcgttgaagtggagcaggacaataaaatgacacctggaaatctgggtatcgtatttggtccaacgctactgaggccacggccaacggaagctaccgtgtcactttccagcctcgtggattatccccatcaagccagagtgatcgaaactctgattgtgcactatggactggtgttcgaagaagaacctgaagaaactcccggaggccaggacgagagtagcaaccaacgtgccgaagtcgtggtacaggttccttatctagaggcaggagaagccgtagtatacccattgcaggaagctgcagccgatgggtgtcgggagtcccgggttgtgagtaacgattccgacagtgatctggaagaggcctcggaactcctgtcatcatccgaggccagtgccctggggcatcttagctttctcgaacagcagcagtcagaggccagtctcgaagtggcctccggttctcattcgggcagcgaggagcagctggaagccaccgctcgtgaagacggcgatggcgatgaggatggccctgctcagcagctgtccggcttcaacactaatcagtcgaacaatgtcctccaggcaccactcccacctatgagacttcggggaggtcgcatgactctagggagttgcagagagcgtcagcctgaatttgtttag

SEQ ID NO: 294874 - DNA, 3015 bp, Artificial Sequence
  derived and/or modified sequence
atgcaccagatcatcagcaagtaccccctgctgaacaccgtggagaccctgaccgccgccggcaccctgatcgccaaggtgaaggccttccactacgagagcaacaacgacctggagaagcaggagttcgagaaggccctggagaccatcgccgtggccttcagcagcaccgtgagcgagttcctgatgggcgaggtggacagcagcaccctgctggccgtgccccccggcgacagcagccagagcatggagagcctgtacggccccggcagcgagggcaccccccccagcctggaggactgcgacgccggctgcctgcccgccgaggaggtggacgtgctgctgcagagatgcgagggcggcgtggacgccgccctgctgtacgccaagaacatggccaagtacatgaaggacctgatcagctacctggagaagagaaccaccctggagatggagttcgccaagggcctgcagaagatcgcccacaactgcagacagagcgtgatgcaggagccccacatgcccctgctgagcatctacagcctggccctggagcaggacctggagttcggccacagcatggtgcaggccgtgggcaccctgcagacccagaccttcatgcagcccctgaccctgagaagactggagcacgagaagagaagaaaggagatcaaggaggcctggcacagagcccagagaaagctgcaggaggccgagagcaacctgagaaaggccaagcagggctacgtgcagagatgcgaggaccacgacaaggccagattcctggtggccaaggccgaggaggagcaggccggcagcgcccccggcgccggcagcaccgccaccaagaccctggacaagagaagaagactggaggaggaggccaagaacaaggccgaggaggccatggccacctacagaacctgcgtggccgacgccaagacccagaagcaggagctggaggacaccaaggtgaccgccctgagacagatccaggaggtgatcagacagagcgaccagaccatcaagagcgccaccatcagctactaccagatgatgcacatgcagaccgcccccctgcccgtgcacttccagatgctgtgcgagagcagcaagctgtacgaccccggccagcagtacgccagccacgtgagacagctgcagagagaccaggagcccgacgtgcactacgacttcgagccccacgtgagcgccaacgcctggagccccgtgatgagagccagaaagagcagcttcaacgtgagcgacgtggccagacccgaggccgccggcagcccccccgaggagggcggctgcaccgagggcacccccgccaaggaccacagaggcgagtgccccgccggccccagaggcggcagatggctgcccgccacccaccccggccccagccccgagacccccctgagccccgccggcagaggccaccaggtgcacaagagctggcccctgagcatcagcgacagcgacagcggcctggaccccggccccggcgccggcgacttcaagaagttcgagagaaccagcagcagcggcaccatgagcagcaccgaggagctggtggaccccgacggcggcgccggcgccagcgccttcgagcaggccgacctgaacggcatgacccccgagctgcccgtggccgtgcccagcggccccttcagacacgagggcctgagcaaggccgccagaacccacagactgagaaagctgagaacccccgccaagtgcagagagtgcaacagctacgtgtacttccagggcgccgagtgcgaggagtgctgcctggcctgccacaagaagtgcctggagaccctggccatccagtgcggccacaagaagctgcagggcagactgcagctgttcggccaggacttcagccacgccgccagaagcgcccccgacggcgtgcccttcatcgtgaagaagtgcgtgtgcgagatcgagagaagagccctgagaaccaagggcatctacagagtgaacggcgtgaagaccagagtggagaagctgtgccaggccttcgagaacggcaaggagctggtggagctgagccaggccagcccccacgacatcagcaacgtgctgaagctgtacctgagacagctgcccgagcccctgatcagcttcagactgtaccacgagctggtgggcctggccaaggacagcctgaaggccgaggccgaggccaaggccgccagcagaggcagacaggacggcagcgagagcgaggccgtggccgtggccctggccggcagactgagagagctgctgagagacctgccccccgagaacagagccagcctgcagtacctgctgagacacctgagaagaatcgtggaggtggagcaggacaacaagatgacccccggcaacctgggcatcgtgttcggccccaccctgctgagacccagacccaccgaggccaccgtgagcctgagcagcctggtggactacccccaccaggccagagtgatcgagaccctgatcgtgcactacggcctggtgttcgaggaggagcccgaggagacccccggcggccaggacgagagcagcaaccagagagccgaggtggtggtgcaggtgccctacctggaggccggcgaggccgtggtgtaccccctgcaggaggccgccgccgacggctgcagagagagcagagtggtgagcaacgacagcgacagcgacctggaggaggccagcgagctgctgagcagcagcgaggccagcgccctgggccacctgagcttcctggagcagcagcagagcgaggccagcctggaggtggccagcggcagccacagcggcagcgaggagcagctggaggccaccgccagagaggacggcgacggcgacgaggacggccccgcccagcagctgagcggcttcaacaccaaccagagcaacaacgtgctgcaggcccccctgccccccatgagactgagaggcggcagaatgaccctgggcagctgcagagagagacagcccgagttcgtgtag

SEQ ID NO: 294875 - protein, 1124 aa, Artificial Sequence
  derived and/or modified sequence
MAPPSEETPLIPQRSCSLLSTEAGALHVLLPARGPGPPQRLSFSFGDHLAEDLCVQAAKASGILPVYHSLFALATEDLSCWFPPSHIFSVEDASTQVLLYRIRFYFPNWFGLEKCHRFGLRKDLASAILDLPVLEHLFAQHRSDLVSGRLPVGLSLKEQGECLSLAVLDLARMAREQAQRPGELLKTVSYKACLPPSLRDLIQGLSFVTRRRIRRTVRRALRRVAACQADRHSLMAKYIMDLERLDPAGAAETFHVGLPGALGGHDGLGLLRVAGDGGIAWTQGEQEVLQPFCDFPEIVDISIKQAPRVGPAGEHRLVTVTRTDNQILEAEFPGLPEALSFVALVDGYFRLTTDSQHFFCKEVAPPRLLEEVAEQCHGPITLDFAINKLKTGGSRPGSYVLRRSPQDFDSFLLTVCVQNPLGPDYKGCLIRRSPTGTFLLVGLSRPHSSLRELLATCWDGGLHVDGVAVTLTSCCIPRPKEKSNLIVVQRGHSPPTSSLVQPQSQYQLSQMTFHKIPADSLEWHENLGHGSFTKIYRGCRHEVVDGEARKTEVLLKVMDAKHKNCMESFLEAASLMSQVSYRHLVLLHGVCMAGDSTMVQEFVHLGAIDMYLRKRGHLVPASWKLQVVKQLAYALNYLEDKGLPHGNVSARKVLLAREGADGSPPFIKLSDPGVSPAVLSLEMLTDRIPWVAPECLREAQTLSLEADKWGFGATVWEVFSGVTMPISALDPAKKLQFYEDRQQLPAPKWTELALLIQQCMAYEPVQRPSFRAVIRDLNSLISSDYELLSDPTPGALAPRDGLWNGAQLYACQDPTIFEERHLKYISQLGKGNFGSVELCRYDPLGDNTGALVAVKQLQHSGPDQQRDFQREIQILKALHSDFIVKYRGVSYGPGRQSLRLVMEYLPSGCLRDFLQRHRARLDASRLLLYSSQICKGMEYLGSRRCVHRDLAARNILVESEAHVKIADFGLAKLLPLDKDYYVVREPGQSPIFWYAPESLSDNIFSRQSDVWSFGVVLYELFTYCDKSCSPSAEFLRMMGCERDVPALCRLLELLEEGQRLPAPPACPAEVHELMKLCWAPSPQDRPSFSALGPQLDMLWSGSRGCETHAFTAHPEGKHHSLSFS

SEQ ID NO: 294876 - protein, 1094 aa, Artificial Sequence
  derived and/or modified sequence
MAPPSEETPLIPQRSCSLLSTEAGALHVLLPARGPGPPQRLSFSFGDHLAEDLCVQAAKASGILPVYHSLFALATEDLSCWFPPSHIFSVEDASTQVLLYRIRFYFPNWFGLEKCHRFGLRKDLASAILDLPVLEHLFAQHRSDLVSGRLPVGLSLKEQGECLSLAVLDLARMAREQAQRPGELLKTVSYKACLPPSLRDLIQGLSFVTRRRIRRTVRRALRRVAACQADRHSLMAKYIMDLERLDPAGAAETFHVGLPGALGGHDGLGLLRVAGDGGIAWTQGEQEVLQPFCDFPEIVDISIKQAPRVGPAGEHRLVTVTRTDNQILEAEFPGLPEALSFVALVDGYFRLTTDSQHFFCKEVAPPRLLEEVAEQCHGPITLDFAINKLKTGGSRPGSYVLRRSPQDFDSFLLTVCVQNPLGPDYKGCLIRRSPTGTFLLVGLSRPHSSLRELLATCWDGGLHVDGVAVTLTSCCIPRPKEKSNLIVVQRGHSPPTSSLVQPQSQYQLSQMTFHKIPADSLEWHENLGHGSFTKIYRGCRHEVVDGEARKTEVLLKVMDAKHKNCMESFLEAASLMSQVSYRHLVLLHGVCMAGDSTMVQEFVHLGAIDMYLRKRGHLVPASWKLQVVKQLAYALNYLEDKGLPHGNVSARKVLLAREGADGSPPFIKLSDPGVSPAVLSLEMLTDRIPWVAPECLREAQTLSLEADKWGFGATVWEVFSGVTMPISALDPAKKLQFYEDRQQLPAPKWTELALLIQQCMAYEPVQRPSFRAVIRDLNSLISSDYELLSDPTPGALAPRDGLWNGAQLYACQDPTIFEERHLKYISQLGKGNFGSVELCRYDPLGDNTGALVAVKQLQHSGPDQQRDFQREIQILKALHSDFIVKYRGVSYGPGRQSLRLVMEYLPSGCLRDFLQRHRARLDASRLLLYSSQICKGMEYLGSRRCVHRDLAARNILVESEAHVKIADFGLAKLLPLDKDYYVVREPGQSPIFWYAPESLSDNIFSRQSDVWSFGVVLYELFTYCDKSCSPSAEFLRMMGCERDVPALCRLLELLEEGQRLPAPPACPAEVSAAGLASVSQSVDWAGVSGKPAGA

SEQ ID NO: 294877 - DNA, 3375 bp, Artificial Sequence
  derived and/or modified sequence
atggcccctccatccgaggagacccctcttattccacagcgctcctgttccctgttgtccaccgaggctggtgctctgcacgttcttcttcctgcccgtgggcctggtccccctcagcgcctctcattctccttcggtgaccacctagctgaggatttgtgcgtccaagcagccaaggccagcgggattctacccgtgtatcactccttattcgccctggccaccgaagacttgtcctgttggtttccaccgtctcatatctttagtgtggaggacgccagcactcaagtgttgctctaccggattaggttctattttccaaattggttcggactggaaaagtgtcatcgatttggcttgcgcaaggatctcgcttccgccatccttgacctgccagttctggagcatttatttgctcagcacagatctgatcttgtgagcggacgcctgccagtgggactctccctaaaggagcagggggaatgcctatctcttgcggtactggaccttgctcggatggctagggaacaggctcaacgccccggcgaacttttaaaaacagtatcctacaaggcatgtctgcctccatccctacgcgatcttatccaaggactctctttcgtcactcgccgaagaataagaaggacggtgcgaagagcccttcggcgtgtggccgcttgccaggcagatcggcacagtctgatggctaagtacattatggatctagaacggctggatccagccggcgctgcggagaccttccacgtagggctccctggagcgcttggaggtcatgatggcctcggcctcttacgcgtggcaggcgacggcggcattgcctggacacaaggagagcaagaagtgctgcagcctttttgcgattttcctgagattgtggacatctctattaagcaagctccaagagtaggaccagctggagagcatagattagtgactgtcacccgcacggataatcaaattctggaggcagagtttcccgggctgccagaggctctttcatttgtggcgttggtggatggttactttcggttgacaaccgactcgcagcatttcttctgtaaggaggtggcccctcccaggctgctggaagaagtagccgagcagtgtcacggcccaatcacactagactttgcaatcaataagcttaaaactgggggcagccgaccaggaagttatgtgcttcgaaggtctccccaggattttgattccttcctgctgactgtctgcgtgcaaaacccactggggccagattacaaggggtgtctgatccggcgtagccctacgggcaccttcctgctcgttggactttcccggccccatagctcgttgcgcgagttactggcgacgtgttgggacgggggccttcacgtggacggcgtggccgtgaccctgaccagctgctgcatcccaaggccaaaggagaaatctaacctgatcgtcgtccagagagggcatagcccgcctaccagctccttggtccagcctcagtcacagtaccagctttctcagatgaccttccacaagattcctgcagactcactagagtggcatgagaatttgggccacggttcttttactaagatttatcgcggctgtcgccatgaggttgtcgatggagaggccagaaagacagaagtactgctgaaagtgatggatgcaaaacataaaaattgtatggaaagctttttggaggccgcttccctcatgtcccaggtatcttaccggcatctggtgcttctgcacggcgtttgtatggccggggatagcactatggtgcaggaatttgtgcatctgggggccatcgatatgtacctcagaaagaggggacacctggtaccagctagctggaaactgcaggttgtgaagcagcttgcttatgcccttaattatctcgaagacaaggggctgccacatggaaacgtcagcgcaaggaaagtgttactggccagagaaggtgccgacgggagcccacctttcataaaactgtctgatccaggcgtgtcgcccgcagtcctgagcctcgagatgctcaccgaccgaatcccctgggtggcaccggagtgcctaagagaggctcaaacactctccctggaggcagataagtgggggttcggggcaaccgtttgggaggtgttttccggggttacgatgccgatctcggccctggacccggccaaaaagctccagttttatgaggaccggcaacagctcccggctccaaagtggacggaattggctttgctgattcagcagtgcatggcatatgagccagtccagcgcccttctttccgggccgtgatccgtgaccttaacagcttgattagctcagactacgaattgctgagcgatccaactccgggagcactagcccctcgcgatggtctctggaatggagctcagctttacgcctgccaagatccaaccattttcgaggaaaggcacctgaagtacatttctcagctcggaaaaggcaactttggatcggtcgaactgtgccggtacgaccctctgggggacaacacaggggctcttgttgccgtcaagcagcttcagcattctggtcccgaccaacagcgagacttccagagagagatccagatcctcaaagctctgcactccgattttatcgttaaataccggggcgtgtcatatggtcctggacgccagtctctgcgcctggttatggagtacctgccttccgggtgcctgcgggattttctgcagcgtcaccgcgcgagactggatgcaagccggctccttctatatagcagtcaaatttgcaagggaatggagtaccttggctcacgcagatgtgtgcatagggatctcgctgcccgcaacatcctcgtcgaaagcgaggcccatgtgaagatagctgacttcgggctcgctaaactgctgcccctggacaaggactattacgtggtgcgggaaccaggtcaatctcccatcttctggtatgcgcctgagagcctgtcagataatatttttagtaggcagtcggacgtgtggtcattcggagtcgtactatatgagctctttacttattgcgataaaagttgcagcccttccgcagaatttttgcggatgatgggatgcgaacgggatgttcccgctctgtgcagactgcttgagcttttggaagaggggcagcgcctcccggctcccccagcatgcccagctgaagtacacgagctcatgaagctgtgctgggcaccgagtccacaggatcggccaagctttagcgctttggggccacagcttgatatgctgtggtccggatccaggggctgcgagacccacgcattcacagcacatccagagggaaaacaccacagcttgagcttcagctag

SEQ ID NO: 294878 - DNA, 3375 bp, Artificial Sequence
  derived and/or modified sequence
atggctccaccttctgaggagactccactgattcctcagcgcagctgttccctcctcagcactgaggctggtgcattacatgttctacttccggctagaggccccggaccaccccagaggctgtctttcagttttggcgaccatctggccgaggacctgtgtgtccaggcagcaaaggcttctggaatcctgccagtgtaccattcacttttcgctctggcaaccgaggacttgtcttgctggttccctccaagccacatcttttccgtagaggacgcctccacacaggtgctgctatataggattagattttatttccccaactggttcggtctggaaaaatgtcacagattcgggctgcgcaaagatttggcctctgctatactggacctacctgtgctcgaacacctgtttgcgcagcaccgctctgacctggtatcaggacgcttgcctgtgggactgagtcttaaagaacagggagaatgtctgagcctggcggtcttagacctggctagaatggctcgtgaacaggcccagaggcctggagaactgctcaagacagtgtcctataaagcctgtttacctccctcactgagagacttgattcagggactcagctttgttactcgcaggcggatccgacgaacggtgaggagagccttgcggcgtgtggccgcctgtcaagccgaccgtcattcacttatggcgaaatatatcatggatctcgagaggctggaccctgctggcgccgccgagactttccacgtgggcttgcctggggcactggggggccacgacggactgggtctcctccgagtagccggagacggaggcattgcatggacccagggagaacaagaagtgcttcagcctttttgcgacttcccagagatcgttgacatctcaattaagcaggcaccgcgggtgggtcctgccggcgagcacaggctggtgactgtgacaaggaccgacaatcagatcctggaagctgaattccctggtctgcccgaggccttgtcatttgtcgcactcgtggacggctactttaggttgactaccgactcccagcactttttttgtaaggaggtggccccacctcgcttgctagaggaggttgccgaacaatgccacggaccaattactctcgacttcgctattaacaaactgaagaccggaggcagtagacctggcagctacgtcctccggcggtccccacaggacttcgacagttttctgttgacagtctgcgttcagaaccccctcgggcctgattataagggctgcttgattcggagaagcccaaccggaaccttcctgctcgttggtctgtctaggccgcatagtagccttagagagttgctggctacttgttgggatgggggcctgcacgttgacggcgtagcagtgacactcaccagctgttgtattcccaggcctaaggagaaaagtaacctgatcgtggtgcagcggggtcactcgccccccactagctcactggtgcagccacagtcacagtaccagttatcacagatgactttccacaaaatacccgcagactcactggaatggcacgagaacctgggccacggttccttcacaaaaatttacaggggatgtcggcacgaagtcgttgatggcgaagccagaaaaacagaggtactattgaaggtgatggacgctaagcacaaaaattgcatggagtcatttttggaggctgcctcccttatgtcccaggtgtcgtaccgccatctggtgctgctgcatggtgtttgtatggcaggcgactccactatggtccaggagttcgttcatctaggcgccatcgacatgtacctccggaagcggggacacctggtgccagctagctggaaattacaagtggtgaaacagcttgcctacgcactgaattatttggaagataagggactgccacacgggaacgtgagcgcccgcaaggtccttcttgccagagaaggtgcggatgggagcccgccttttatcaagctgtctgatccgggtgtgtctccagctgtcctgagtttggaaatgctgactgacagaataccctgggtggctccagagtgtctgcgcgaggctcagactctgtccctcgaggccgacaagtggggttttggtgccaccgtctgggaggtgttttcaggtgttacgatgcctatctcagcactggaccccgccaaaaagctgcagttctatgaagaccgtcagcagctcccggcccctaaatggaccgagttggccctgctcatacagcagtgcatggcgtacgaacccgttcagagaccttcctttagagccgttataagggatctgaattccctgatttctagtgattacgagctgttgtccgatccgacacccggcgcgttggcgcctagagatggtctttggaatggagcccagctctatgcctgccaggatcctaccatctttgaagaacggcatctgaagtacataagtcagctcggtaaaggcaattttggtagcgttgagctctgcaggtatgatccgttgggggacaacacgggagctctggtagcagtgaaacagcttcaacatagtggtccagatcagcagcgcgatttccagagggaaatccagattctgaaggcactccatagcgactttattgtaaagtacagaggcgtgtcctatgggccaggtcgccagagcctgagactcgtgatggagtacttaccttccggatgtctgcgagatttcctccagaggcatcgcgctcggctcgatgctagcagactactcttgtactcttcccagatttgtaaggggatggagtatctcggcagccggcgctgcgtgcaccgcgaccttgccgcacggaacatcctggtggaatccgaagcacatgtcaagattgccgactttggcttggcaaagttgctacctcttgataaagattattatgtggtgcgtgagcccgggcagagcccaattttttggtatgctccagaaagtctatcagacaacatatttagtcgtcaaagtgatgtgtggtcttttggcgtggtgctttatgaactgttcacctactgcgataaatcctgcagtccctccgcagaattcttgaggatgatgggttgtgaacgtgacgtgccagccctgtgccggctgctcgagctcctggaggaaggtcaacggcttcctgccccacccgcctgccccgccgaggtgcatgaactaatgaaactgtgttgggccccaagcccccaggatagaccatccttttccgctctcggcccccagctggacatgttgtggtccggatctcggggttgcgagacccacgctttcactgcccacccagagggtaaacaccacagtctgtctttcagctag

SEQ ID NO: 294879 - DNA, 3285 bp, Artificial Sequence
  derived and/or modified sequence
atggcccctccctccgaagaaactcctctgatccctcagagaagctgcagcctgctctcaactgaggccggagcgctgcacgttttactgccggcccgagggccaggcccacctcaaagactctcattttcatttggcgaccacctggccgaagacttgtgcgtccaggctgccaaggcttccggcatcctgcctgtttatcactccttatttgctctggcaaccgaggatctctcttgttggtttccaccatcccatattttctccgtggaggatgcgtccacacaggtcctgctgtacagaatcagattctattttcccaactggtttggattagagaagtgtcacagatttggtctgaggaaagatctggcctcagccatactagatcttccggtgctggagcacctgttcgcccagcatcgctccgatctcgtgtccggaaggttaccagtgggcctgagtctgaaagagcagggagagtgtctatccctggccgtacttgatctggctagaatggccagagagcaggctcagcgacccggcgagctgctgaagacagtttcatataaagcttgcttacccccatctctaagagatctgatccaggggctttcatttgtaacaagaaggaggatcaggaggaccgtcaggagggccctacggcgagtggctgcgtgccaggctgacagacactccctgatggctaaatacatcatggacctggagcgcctcgatccagctggcgcagcggaaacctttcatgttggtctacctggagcattgggaggacacgatgggcttgggttgcttagagtggccggcgacggcggcattgcctggacacagggagaacaggaggtccttcagccgttctgcgatttccccgaaattgttgatatctcgatcaagcaggccccccgcgtcggcccagctggagagcaccgtctcgtgaccgtcacacggaccgataaccagatcctggaagccgagttccccggactacctgaggcactgagcttcgtcgcactggtcgatggatacttcagactgacgacagattcgcagcatttcttctgcaaagaggtggccccaccgagactacttgaagaggtggcagagcagtgccacggcccaattaccctagatttcgctattaacaaactgaaaactggtggatctcgacctggttcatacgtgctgcgcagatccccgcaggattttgattcatttcttctgacagtctgcgtgcagaacccactcgggccagattataaaggctgcttgatccgaagaagccctaccgggacatttctgttggttggcctctctagacctcatagctctctgcgagagctactggctacctgctgggatggcggcctccatgtggacggggtggccgtgacactaacgagctgttgcattccgcgccctaaagagaaaagtaacctaattgtagtgcagagaggccactcccctccaacttcttccctcgtacagccccaaagccagtatcaactgtctcagatgacgtttcacaagatcccagctgacagcttagagtggcacgagaatctgggtcatggaagtttcacaaagatctatagaggctgcaggcacgaagtggtggacggcgaagccaggaagactgaagttctcttgaaagtgatggatgccaagcacaagaactgcatggagtcttttctcgaagccgctagcttgatgagtcaggtctcttatcggcatctggtgttgctgcatggtgtgtgtatggccggggatagcaccatggtgcaagagtttgtgcatctgggggcaatcgacatgtaccttcggaaacgcggccaccttgtcccagcttcgtggaaactgcaagtcgtcaaacaactcgcctacgcccttaactacctcgaggataagggcctccctcacgggaacgtgtccgcaagaaaagtcctgctggctcgcgagggggcggatggatcacctccattcatcaaactgagcgatccaggagtgagccctgccgtcctttctcttgagatgttgactgaccggatcccatgggttgcgcctgagtgcctacgggaagcacagacactctcgctggaggctgataagtggggttttggtgctactgtgtgggaagtcttctccggtgtgactatgcccatctccgccttagatccagccaaaaaactccagttttacgaggatcggcagcagctgcctgcacccaagtggacagaactagcactgctgatccagcaatgcatggcctatgaaccagtgcagcggccttcttttagggcagtgatccgcgacctcaattcactgatttcgagcgactatgaacttttgtccgaccccacgccaggagccctggcgcccagagacggactttggaatggggcccagctctatgcctgtcaagaccctacaatttttgaagaacgccatctgaagtatatctctcaactcggcaaggggaacttcggctcggtcgagctgtgccgatacgatccactgggcgacaacaccggcgccctggttgcggtgaagcagctgcagcacagcgggcctgaccaacagcgggatttccagcgcgagatccagattctgaaggcactgcatagtgacttcatcgtgaagtatcgaggcgtcagctatggacctggacgtcagtctctgagactggttatggagtatttaccttccggatgcctacgggatttcttacagcggcaccgcgcccgactggacgcctctcgacttctgttgtattccagccagatctgtaaggggatggaataccttggcagccgccgttgtgtgcaccgggacctcgcagcacggaacatcttagttgagtcagaagctcacgtgaagatagctgatttcgggctcgccaagcttcttcctttagataaagactactatgtggtaagagaacccggccagagccctatcttttggtacgcccctgagtctctgagcgacaacatcttctcaagacagtctgacgtatggagctttggagtcgtgttatacgaactgtttacatattgcgacaaatcatgcagtccctctgctgagtttctccggatgatgggatgcgaacgggatgtgccagcattgtgccggttactcgagctgctagaggaagggcagaggctgcctgcgccccccgcctgccctgccgaggtctcagctgctggcctggccagtgtctctcagtcagtcgattgggcaggcgtctctgggaaacccgcgggggcatag

SEQ ID NO: 294880 - DNA, 3375 bp, Artificial Sequence
  derived and/or modified sequence
atggcccctccttctgaggagacccccctcatcccccagaggagctgcagcctgctgagcacagaagctggggccctgcacgtgctgctgcctgcccggggccctggccccccccagaggctgtccttctcctttggagaccacctggccgaggacctgtgtgtgcaggccgccaaggccagcggcatcctgcctgtgtaccacagcctgtttgccctggccacagaggacctgagctgctggttcccccccagccacatcttctctgtggaggatgccagcacccaggtgctgctgtaccgcatccgcttctacttccccaactggtttggcctggagaagtgccaccgcttcggcctgaggaaggacctggccagcgccatcctggacctgcctgtgctggagcacctgtttgcccagcacagaagtgacctggtgtctggccgcctgcctgtgggcctgagcctgaaggagcagggagaatgtctgagcctggccgtgctggacctggccaggatggcccgggagcaggcccagaggcctggagagctgctgaagacagtgtcctacaaggcctgcctgccccccagcctgcgggacctgatccagggcctgagctttgtgacccggcggcgcatccggaggacagtgcggcgggccctgcggcgggtggccgcctgccaggccgacagacacagcctgatggccaagtacatcatggacctggagcggctggaccctgctggagctgctgagaccttccacgtgggcctgcccggggccctgggcggccatgatggcctgggcctgctgcgggtggccggagatggcggcatcgcctggacccagggcgagcaggaggtgctgcagcccttctgtgacttccctgagatcgtggacatcagcatcaagcaggccccccgggtgggccctgctggggagcaccggctggtgacagtgaccaggacagacaaccagatcctggaggccgagttccctggcctgcctgaggccctgagctttgtggccctggtggatggctacttccggctgaccacagacagccagcacttcttctgcaaggaggtggccccaccccggctgctggaggaggtggccgagcagtgccacggccccatcaccctggactttgccatcaacaagctgaagacaggaggcagccggcccggcagctatgtgctgcggcgcagcccccaggactttgacagcttcctgctgactgtgtgtgtgcagaaccccctgggccctgactacaagggctgcctgatcagaagaagccccaccggcaccttcctgctggtgggcctgagccggccccacagcagcctgcgggagctgctggccacctgctgggatggcggcctgcacgtggatggagtggccgtgaccctgaccagctgctgcatcccccggcccaaggagaagagcaacctgattgtggtgcagaggggccacagcccccccaccagcagcctggtgcagccccagagccagtaccagctgagccagatgaccttccacaagatcccagctgacagcctggagtggcatgagaacctgggccacggcagcttcaccaagatctaccggggctgcagacatgaggtggtggatggagaggccaggaagacagaggtgctgctgaaggtgatggatgccaagcacaagaactgcatggagagcttcctggaggccgccagcctgatgagccaggtgtcctaccgccacctggtgctgctgcacggcgtgtgcatggccggggacagcaccatggtgcaggagtttgtgcacctgggcgccatcgacatgtacctgaggaagaggggccacctggtgcctgcctcctggaagctgcaggtggtgaagcagctggcctatgccctgaactacctggaggacaagggcctgccccatggaaatgtgtctgccaggaaggtgctgctggcccgggagggcgcagatggcagcccccccttcatcaagctgagtgaccccggggtgtccccagctgtgctgagcctggagatgctgacagaccgcatcccctgggtggcccctgagtgcctgcgggaggcccagaccctgagcctggaggccgacaagtggggctttggagccaccgtgtgggaggtgttcagcggcgtgaccatgcccatcagcgccctggaccctgccaagaagctgcagttctatgaagatcggcagcagctgcctgcccccaagtggacagagctggccctgctgatccagcagtgcatggcctatgagcctgtgcagaggcccagcttccgggccgtcatccgggacctgaacagcctcatcagcagtgactatgagctgctgagtgaccccacccctggggccctggcccccagagatggcctgtggaatggagcccagctgtatgcctgccaggaccccaccatctttgaggagcggcacctgaagtacatcagccagctgggcaagggcaactttggatctgtggagctgtgccgctatgaccccctgggggacaacacaggagccctggtggccgtgaagcagctgcagcacagcggccctgaccagcagagggacttccagcgggagatccagatcctgaaggccctgcacagcgacttcatcgtgaagtaccggggcgtgtcctatggccctggccggcagagcctgcggctggtgatggagtacctgcccagcggctgcctgcgggacttcctgcagaggcaccgggcccggctggatgccagccggctgctgctgtacagcagccagatctgcaagggcatggagtacctgggcagcagaagatgtgtgcaccgggacctggccgccaggaacatcctggtggagagcgaggcccacgtgaagattgctgactttggcctggccaagctgctgcccctggacaaggactactacgtggtgcgggagcccggccagagccccatcttctggtacgcccctgagagcctgagtgacaacatcttcagccggcagagtgatgtgtggagctttggagtggtgctgtatgagctgttcacctactgtgacaagagctgcagccccagcgctgagttcctgaggatgatgggctgtgaaagagatgtgcctgccctgtgccgcctgctggagctgctggaggagggccagaggctgcctgcccccccagcctgcccagctgaggtgcatgagctgatgaagctgtgctgggcccccagcccccaggaccggcccagcttcagcgccctgggcccccagctggacatgctgtggagcggcagccggggctgtgagacccacgccttcaccgcccaccctgagggcaagcaccacagcctgtccttctcctag

SEQ ID NO: 294881 - DNA, 3285 bp, Artificial Sequence
  derived and/or modified sequence
atggcccctccttctgaggagacccccctcatcccccagaggagctgcagcctgctgagcacagaagctggggccctgcacgtgctgctgcctgcccggggccctggccccccccagaggctgtccttctcctttggagaccacctggccgaggacctgtgtgtgcaggccgccaaggccagcggcatcctgcctgtgtaccacagcctgtttgccctggccacagaggacctgagctgctggttcccccccagccacatcttctctgtggaggatgccagcacccaggtgctgctgtaccgcatccgcttctacttccccaactggtttggcctggagaagtgccaccgcttcggcctgaggaaggacctggccagcgccatcctggacctgcctgtgctggagcacctgtttgcccagcacagaagtgacctggtgtctggccgcctgcctgtgggcctgagcctgaaggagcagggagaatgtctgagcctggccgtgctggacctggccaggatggcccgggagcaggcccagaggcctggagagctgctgaagacagtgtcctacaaggcctgcctgccccccagcctgcgggacctgatccagggcctgagctttgtgacccggcggcgcatccggaggacagtgcggcgggccctgcggcgggtggccgcctgccaggccgacagacacagcctgatggccaagtacatcatggacctggagcggctggaccctgctggagctgctgagaccttccacgtgggcctgcccggggccctgggcggccatgatggcctgggcctgctgcgggtggccggagatggcggcatcgcctggacccagggcgagcaggaggtgctgcagcccttctgtgacttccctgagatcgtggacatcagcatcaagcaggccccccgggtgggccctgctggggagcaccggctggtgacagtgaccaggacagacaaccagatcctggaggccgagttccctggcctgcctgaggccctgagctttgtggccctggtggatggctacttccggctgaccacagacagccagcacttcttctgcaaggaggtggccccaccccggctgctggaggaggtggccgagcagtgccacggccccatcaccctggactttgccatcaacaagctgaagacaggaggcagccggcccggcagctatgtgctgcggcgcagcccccaggactttgacagcttcctgctgactgtgtgtgtgcagaaccccctgggccctgactacaagggctgcctgatcagaagaagccccaccggcaccttcctgctggtgggcctgagccggccccacagcagcctgcgggagctgctggccacctgctgggatggcggcctgcacgtggatggagtggccgtgaccctgaccagctgctgcatcccccggcccaaggagaagagcaacctgattgtggtgcagaggggccacagcccccccaccagcagcctggtgcagccccagagccagtaccagctgagccagatgaccttccacaagatcccagctgacagcctggagtggcatgagaacctgggccacggcagcttcaccaagatctaccggggctgcagacatgaggtggtggatggagaggccaggaagacagaggtgctgctgaaggtgatggatgccaagcacaagaactgcatggagagcttcctggaggccgccagcctgatgagccaggtgtcctaccgccacctggtgctgctgcacggcgtgtgcatggccggggacagcaccatggtgcaggagtttgtgcacctgggcgccatcgacatgtacctgaggaagaggggccacctggtgcctgcctcctggaagctgcaggtggtgaagcagctggcctatgccctgaactacctggaggacaagggcctgccccatggaaatgtgtctgccaggaaggtgctgctggcccgggagggcgcagatggcagcccccccttcatcaagctgagtgaccccggggtgtccccagctgtgctgagcctggagatgctgacagaccgcatcccctgggtggcccctgagtgcctgcgggaggcccagaccctgagcctggaggccgacaagtggggctttggagccaccgtgtgggaggtgttcagcggcgtgaccatgcccatcagcgccctggaccctgccaagaagctgcagttctatgaagatcggcagcagctgcctgcccccaagtggacagagctggccctgctgatccagcagtgcatggcctatgagcctgtgcagaggcccagcttccgggccgtcatccgggacctgaacagcctcatcagcagtgactatgagctgctgagtgaccccacccctggggccctggcccccagagatggcctgtggaatggagcccagctgtatgcctgccaggaccccaccatctttgaggagcggcacctgaagtacatcagccagctgggcaagggcaactttggatctgtggagctgtgccgctatgaccccctgggggacaacacaggagccctggtggccgtgaagcagctgcagcacagcggccctgaccagcagagggacttccagcgggagatccagatcctgaaggccctgcacagcgacttcatcgtgaagtaccggggcgtgtcctatggccctggccggcagagcctgcggctggtgatggagtacctgcccagcggctgcctgcgggacttcctgcagaggcaccgggcccggctggatgccagccggctgctgctgtacagcagccagatctgcaagggcatggagtacctgggcagcagaagatgtgtgcaccgggacctggccgccaggaacatcctggtggagagcgaggcccacgtgaagattgctgactttggcctggccaagctgctgcccctggacaaggactactacgtggtgcgggagcccggccagagccccatcttctggtacgcccctgagagcctgagtgacaacatcttcagccggcagagtgatgtgtggagctttggagtggtgctgtatgagctgttcacctactgtgacaagagctgcagccccagcgctgagttcctgaggatgatgggctgtgaaagagatgtgcctgccctgtgccgcctgctggagctgctggaggagggccagaggctgcctgcccccccagcctgcccagctgaggtgtctgctgctggcctggcctctgtgtcccagagcgtggactgggccggcgtgtctgggaagccagctggggcctag

SEQ ID NO: 294882 - DNA, 3375 bp, Artificial Sequence
  derived and/or modified sequence
atggccccccccagcgaggagacccccctgatcccccagcggagctgcagcctgctgagtaccgaggcaggcgccctgcatgtcctgctcccggctagaggccccggcccgccgcagaggctctcctttagctttggagaccacttggctgaagatctttgcgtccaggcggcgaaggcttctggaatccttcctgtgtatcacagcttgtttgcccttgccacggaagacctgtcctgttggtttccaccatcacatatcttcagtgtcgaggatgcatccactcaggtgctcctctacaggatcagattctacttcccgaactggtttggcctggagaaatgtcacagatttggactacgcaaggatctcgcttcagcgattctggacctgcctgtgctcgaacacctgttcgcccagcacaggagtgacctagtaagtggccggttgccagtgggattatctctcaaagagcaaggagagtgtctgtcactggccgttctcgacttagcaaggatggcccgcgagcaggcccagcggccaggagagttgttaaagaccgtttcatataaagcttgcctccccccatcactgcgcgacttgatccagggcttgtcctttgtcaccagaagaagaatccggcgaacagtacgccgtgcactgagacgggtcgcagcttgccaggctgatagacactctttaatggcaaagtacatcatggacctggaaagacttgatcctgctggggctgctgagacgttccatgttggcctgcccggagcacttggcggtcacgacggcttgggcttactgagggtcgcaggtgacggcgggatcgcatggactcagggagaacaggaggttctccagccattttgtgattttcccgagatcgtcgacatcagtattaagcaagcaccacgcgtcgggcctgcaggtgaacaccggctggttactgtgacacgaacagataatcagattctggaggccgagttccccggtttgcccgaggccctgagttttgtggccttggtcgatgggtatttccgactgacgacagactctcagcactttttctgtaaagaggtggctcctccacgcctgctagaggaggtggctgaacagtgccacggacccataacattggactttgcgataaataaactgaaaacaggaggctccagacccggttcctatgttctgaggcgcagcccacaagactttgattcgttccttctcacagtgtgtgtgcagaatccattgggacccgactataaaggctgcctgatccggcggtcacctactggcacattcctcctagtgggtctctctagacctcacagctcactccgagagctcctggcaacatgctgggacggcggcctgcacgttgatggagttgcggtcaccctcacaagctgttgtatacccagacccaaagaaaaatccaatctgatagtagttcagaggggccactccccaccaaccagcagcctggtacagcctcagtcccagtaccagctttctcagatgacattccacaagatccctgctgactccctggaatggcacgaaaacctgggccatgggtcctttaccaagatctacagggggtgtagacacgaagtggtggacggtgaagcccggaagactgaggtgcttctcaaggtaatggacgccaaacacaagaattgcatggagagctttctggaggctgccagtctgatgtcccaggtgtcatatcggcaccttgtactattgcatggcgtctgcatggctggagattccaccatggttcaagagttcgtccatctgggagccatcgatatgtacttgaggaaacgggggcacctggtccccgccagctggaagcttcaagttgttaaacaactcgcttacgcgctgaattacctggaggataaaggcctgccacacgggaacgtgagtgcccggaaggtcttactggcacgcgagggggccgacggctcacctccgtttattaaattaagcgatccaggagtctcccccgccgtcctgagcttggaaatgcttactgaccgcattccgtgggtggctcccgaatgtctaagggaagcacaaacattgtctttggaggcagataagtggggcttcggggctaccgtttgggaggtgttttccggcgtgacaatgccaatttcagccctggaccctgctaaaaaattgcagttttatgaggaccggcaacagcttccagctcccaaatggacagaattggcccttctgatccaacaatgcatggcttacgagcctgtacagagaccatcttttcgcgcggtaatcagagatctgaactccctaatcagctctgattacgagttgctttcggaccccacaccaggcgcactggcccccagggatggtctttggaatggagcccagctatacgcatgtcaggacccaaccattttcgaagaacgccatcttaagtacatctcccaattgggaaagggcaacttcggttccgttgaactatgtcgctacgatcctctcggagataatacaggtgcactggtggctgtcaagcagctgcagcatagcggtcctgaccaacagcgcgattttcagagagagatccagatcttgaaggctctgcacagcgatttcatcgtcaagtatcgcggtgtatcatatggccccggtaggcagtccctccgcttagtgatggagtaccttccttctggatgcctgagagatttcctgcagcgtcatagagccagacttgacgccagtagattgttgctctacagctcacagatatgtaaagggatggagtacctcggatctcgccgctgcgtccatcgcgacctggcagctagaaatatcctcgttgagtccgaagctcatgtgaagatcgccgactttggcttagccaaactgctccccttggacaaagactattacgtagtgagagagcctggccagtctcctatcttttggtatgcgcccgagagtttgagtgacaacatcttctccagacagtccgacgtctggtcttttggcgtcgtgttgtatgagctcttcacttactgcgacaaatcgtgctctcctagtgccgagttcctccgtatgatggggtgtgaaagggacgtgcctgccctctgccgtttactggagctgctggaagaaggccagcgcttgcccgcccccccggcttgcccggccgaagttcacgaactgatgaagctgtgctgggccccatccccgcaggatagaccgtctttctctgccctgggtccccagctcgacatgttgtggtctggtagcaggggatgtgaaacacatgctttcaccgcccaccctgaagggaaacaccactccctcagtttctcttag

SEQ ID NO: 294883 - DNA, 3375 bp, Artificial Sequence
  derived and/or modified sequence
atggccccccccagcgaggagacccccctgatcccccagcggagctgcagtctactgagtacagaagctggagccctgcacgtccttctgcccgcgcgggggccaggtcccccccaaagactgagcttttctttcggcgaccatcttgccgaggacctgtgtgttcaagccgccaaggcatctggtattctgcctgtctatcactcattgtttgcactcgcgaccgaggatctatcttgttggttcccgccctcgcacattttctcggtggaagacgcctcgactcaagtgctcctctataggattcggttctacttcccgaattggttcggcttagagaagtgccacaggttcgggcttaggaaggacttggcctctgctatcttagatctcccagtactcgagcatcttttcgcccagcaccgttctgatctcgtgtcgggaaggctccctgtgggactctccttgaaggagcagggagaatgcttaagcttggctgttcttgacctggctagaatggcaagggaacaggcccagcggccaggggagttactcaaaactgtgagctacaaggcgtgtctcccccccagcctgcgcgatttgatacaggggctatctttcgtgactagaaggaggatccgccggacggtgcggcgcgccctgaggagagtggctgcctgccaggctgatcgtcattcactcatggccaagtatattatggatttggaaaggctagaccccgcaggcgccgcggaaactttccacgtggggctgcctggagctcttggcgggcacgatgggttaggcttgctaagggtagccggcgatgggggcatcgcctggacccagggagaacaggaagtcctgcagcccttttgtgactttcccgagatcgttgatatctctattaaacaggcccccagggttggacctgcgggtgagcacagactcgtgacagtgaccaggacggataatcaaattctcgaggctgaatttcctggcttgcctgaagcgctgagcttcgtcgctctggttgacggatatttccggttgacgacagactcgcagcattttttctgcaaagaggtcgctcctccccggcttctggaagaagtcgcagagcagtgccacggacctattacattagatttcgccatcaacaaactaaagacaggcggatctcgcccgggctcctacgtgttgcggagaagccctcaggattttgattcctttcttctgaccgtctgcgtgcagaatccactcggccctgactataagggttgtctgattaggcgttcccccactggcaccttcttgctggtcgggttgtcccggccccatagctctctcagagagcttctggccacctgctgggatggaggcctgcacgtcgatggggtggcagttacccttacgtcttgctgcatccctcgccccaaggagaaatctaacctgatcgtggttcaacgcggtcattcgccgcccacctcatccctggtacaacctcaaagtcagtaccagttatctcaaatgactttccataagatcccagcagattccctcgagtggcacgagaacttgggccatgggagcttcacgaagatatatagaggatgtaggcacgaagtagtggacggtgaggcccggaagaccgaggttctcctgaaggtgatggatgctaagcacaagaactgcatggaatccttcctcgaagccgctagcctcatgtctcaagtctcttaccgccacttagttcttctgcatggcgtgtgcatggctggtgatagcaccatggtgcaggaatttgttcacctcggcgccatcgacatgtatctaaggaaacgaggccacctagttcctgcttcatggaagctccaggtggtcaagcagctggcatatgccctgaattatctcgaggacaagggcttaccacacggaaacgttagcgccaggaaggtcctgctggctagggagggtgcagacggctcccctccgtttatcaagctgtccgatccgggcgtgtcacccgccgtgttgagcttggaaatgctgaccgacaggatcccgtgggtcgccccagaatgtcttagagaggcgcaaaccctgtctcttgaagccgataagtggggatttggagcgacggtctgggaagtgttttcaggtgtcacaatgcccattagcgctctggaccctgcgaaaaagctccagttttatgaagacagacagcagctcccagcgccgaaatggaccgagctggcgctgttaatccagcagtgcatggcgtatgaacctgtgcaacgcccgtcgtttagggctgtaatcagggatttgaatagtctcatctcatcagattatgaacttctgtctgatcctacaccgggcgcgctggctcctagagacggactgtggaatggtgcccagctgtatgcgtgccaagatcccaccatctttgaggagaggcacctaaagtacatctcccagctgggaaagggtaactttggaagtgtcgagctctgccgctatgaccctctgggtgataataccggagcgctggtggctgttaagcagctgcagcattcaggacccgatcagcagcgggatttccagagggagatacagatactgaaagccctgcactccgattttatcgtgaaatatcgcggagtatcctatggccccggcaggcaaagtcttcgtctggtgatggaatatcttcctagcggatgcttgcgcgatttccttcagcggcatcgcgctagactggacgcaagccggcttttgctctactcttctcagatctgcaagggtatggagtacttgggatcacggcgttgcgttcacagggacctcgctgctaggaatatcctggttgagtccgaagcccacgtgaagatcgccgactttggcttggctaagttgttaccgcttgacaaggattactacgtcgtgcgggagcccggccaatcgccaattttttggtacgctcctgagagcctgtcagacaatatattttcccgtcagtccgacgtgtggtcctttggcgtggtgctctacgagctttttacatattgtgacaaaagctgtagcccatctgccgagttcctgcgcatgatgggatgcgagagagacgtccccgccctgtgccgattgctggaactgctcgaagagggtcagagactacccgccccgcctgcctgccctgcagaagtccatgaattgatgaagctgtgttgggcacccagccctcaggaccgtccatccttctctgcgctcgggccccagcttgacatgctgtggtcgggatccaggggatgcgagacacacgcatttacggctcacccagagggaaagcatcactccctgtccttctcctag

SEQ ID NO: 294884 - DNA, 3285 bp, Artificial Sequence
  derived and/or modified sequence
atggccccccccagcgaggagacccccctgatcccccagcggagctgttcactgttgagcaccgaagccggagcattacatgtcctactgccagctcggggaccggggcccccacagcgcttgagctttagctttggggaccacctcgcagaggacctgtgcgtgcaagcagcaaaagccagtgggattctccctgtgtatcatagcttgttcgctttagccactgaagatttaagttgttggttcccgccctcccacatctttagtgttgaggacgcttctacccaagtcttactataccgcataagattttacttccccaactggtttgggttagagaaatgtcacagattcggcctgaggaaagatctggcaagtgcaatactggatctcccggtcctggagcacctcttcgcacagcaccggtctgatctggtctctgggaggctccctgtggggttatcacttaaagagcaaggcgagtgtcttagtttggccgtattggatctggccagaatggcaagagagcaggctcaacggcctggtgagttgttgaagacagtctcctataaagcttgcctcccccctagcctccgggatctgatccagggcctgtcttttgtgaccagaaggcggatcaggaggacagtgcggcgagctcttcgcagggtggctgcatgccaggctgacaggcacagtctcatggcaaagtacataatggatctcgagcgactggaccctgctggagcagccgagacgttccatgttggactgccgggtgccttgggcggccacgatggcttgggcctgctcagagtggccggcgatggcggcattgcatggacccaaggcgaacaggaagttctccagccgttctgtgactttcccgagattgttgacatcagcattaagcaggcaccaagggtgggccccgctggcgagcaccggctggtgacagttaccagaacagacaatcaaattctggaggcagaattcccaggactgcctgaggcattatccttcgtggctttagtggacgggtacttcagactcaccactgactctcagcatttcttttgtaaggaagtagccccccctagactgctggaagaggtggctgagcaatgccacggacctattactctggattttgcaattaataagctcaagaccggaggcagccgacccgggagctacgttctgcgaaggtcaccacaggactttgattccttcttgctgacagtgtgtgttcagaacccccttggtcccgactacaaggggtgtctgattcggagaagtcctacaggaaccttcctgctggtgggtctgagcaggccacacagttcactgagagagcttttagcaacctgttgggatggtggtctccacgtggacggggtcgccgtcacactcacaagttgctgtattccgcgccccaaagaaaagtccaacttaatagttgttcagcgcggacactccccgcctacctcgtccctcgtccagcctcaatcccaatatcagctctcccagatgacctttcataagatccctgctgacagtctcgaatggcatgaaaacctgggccatggaagctttactaagatatatcgcggctgcagacacgaggttgtggatggcgaggcccggaaaacggaggtgttactcaaggttatggatgctaagcacaagaattgtatggagagttttctggaagccgcatccttaatgtcccaggtgagttacagacacctggtattgctccacggcgtgtgcatggctggcgactctacgatggtccaggaattcgtccatcttggtgctattgatatgtatttgcggaaaaggggacaccttgtgccagcgagctggaaattgcaagttgtcaagcagctggcctacgcgttgaactacctagaggacaagggcttgccacacgggaatgtgtcagcccggaaggtgcttctcgcccgggaaggggctgacggatctccgcccttcatcaaactgtcagaccccggggttagtcctgcagtcctgtcactggagatgctcactgatcggattccctgggtggcccccgaatgcctccgcgaggcacagaccctcagcttggaagccgacaagtggggatttggtgccaccgtttgggaagtcttctccggtgtaactatgcccattagcgctctggaccctgctaagaagttgcagttctacgaagacaggcagcagctccctgcaccgaagtggactgagctggctttacttatccagcagtgcatggcatatgagcccgttcagcggccttctttcagggccgtcatccgtgacttaaactcactgatctcttcagattacgagttgttatctgacccaacacctggcgcgctggctccacgcgatgggctgtggaacggggcccagctctacgcctgccaggatcccaccattttcgaggaacgccatctgaaatacatttcacaactcggtaagggaaacttcggttcagtcgaactttgccgctatgaccccttgggcgataacactggtgctttggtcgcagtgaaacagctacagcactctggccctgatcagcagcgcgactttcaacgagaaatccagatactcaaggctctgcatagcgacttcatcgtgaagtaccgaggggtgagttacggcccgggaagacagtccctgaggctggtgatggagtacttgcctagcggctgtctgagagatttccttcaacgccaccgagctaggctggatgcgtcccgtctgctcctctactcctctcagatctgtaaaggaatggagtatttgggttcaagacgctgcgtgcacagagatctggccgctcggaatatactggtggaaagcgaagcacatgtgaaaatcgccgattttgggcttgccaagctcctaccactcgataaggactactacgtggtgcgcgagcccggacaaagccccatattctggtatgcccccgaatccctaagcgataacattttttctaggcagtccgacgtctggagcttcggggtcgtcctctacgagctttttacatattgcgacaaatcttgcagcccaagcgctgaattcttaagaatgatgggttgtgaacgtgacgttcctgccctctgccgcctactggaactgctcgaagaaggccagaggctcccagcacctcctgcatgccctgcagaagtttctgcggccggactcgccagcgtcagccagtccgttgattgggcaggcgtgtccggcaagcctgcaggcgcctag

SEQ ID NO: 294885 - DNA, 3375 bp, Artificial Sequence
  derived and/or modified sequence
atggcccctcctagcgaggagacaccactcatacctcagaggtcatgtagtctgctttcaaccgaagcaggagctctccacgtgctgttgccagcacgcggtccaggccctccccagcggctcagtttctcttttggagatcatctagccgaagacctgtgcgtgcaggccgcaaaagcctctggaattctgcctgtctaccacagcctctttgcgctcgcaacagaggatctgagctgctggttcccacccagtcatattttctccgtcgaggacgcatccacacaagtgcttctgtacaggatacggttctactttcccaattggtttggactagaaaaatgtcataggttcggactgagaaaggacctggctagtgcgattctggacctgcccgtgttggagcacttgttcgctcaacacaggagtgacctagtctcaggcaggctcccggtcggcctgtcactaaaagaacagggggagtgtctgtctttagctgtactggacctcgctcgtatggcgagggaacaggctcagcgaccaggggaactcctgaaaacagtatcctacaaggcctgcctcccgccatccttgagagacttaatccagggactgtcctttgtgacgcgaagacgcatacgccgtactgtccggagggctcttaggagggtggctgcctgccaggctgatcgacactctcttatggcaaaatatatcatggacctggagagactggacccggctggtgccgcagagacctttcacgtcggcctgccaggcgcactcgggggacacgacggactcggattgctgcgcgtcgccggtgacggtggcatcgcctggacccagggtgagcaggaggttctgcagcccttttgtgattttccggagatcgtagatatcagcataaagcaagccccaagggtcggtcctgccggtgaacaccggcttgttacggtgactcgaactgataatcaaattctcgaggccgaatttcctggtcttcccgaagccctgtcattcgtggctctggtcgatgggtactttaggttgaccactgacagccagcacttcttctgcaaggaggtggcaccaccgcgactgctggaggaagtggccgaacagtgccacggtcccattactctggattttgctattaataaactgaagaccgggggttccaggcccggatcttatgttctgcggagatctccacaggacttcgacagcttcttgctgaccgtttgtgtccagaatcccctggggccagattacaagggatgcctcataaggaggagtcccactgggacatttctgctggtgggccttagtcgcccacattccagccttagggagcttcttgctacttgctgggacgggggactacacgtggacggtgtcgccgttaccctcaccagctgttgcatcccaaggccgaaagagaagagcaatttgatcgtggtgcaaaggggacactcaccgcctacctcttctctagttcagccccagagccagtaccagttgtctcaaatgacttttcataaaatcccggcagatagcctggagtggcacgagaacttggggcatggctcttttaccaagatctatcgaggctgcagacatgaggtggttgatggggaggccaggaagaccgaggtgctgctcaaggtgatggatgcaaagcacaagaactgcatggagagcttcctggaagccgctagcctaatgtctcaagtcagctatagacacctggtactgctccatggtgtatgcatggccggagactcaacaatggtgcaagagtttgtgcaccttggagcaattgatatgtaccttcgaaaaaggggtcacctggtaccagcaagctggaagctacaagtagtcaagcaactggcctacgccttgaattacctcgaagacaagggattaccacacggcaacgtgagtgcgagaaaagtattgttggcgagggaaggggctgacggctccccccctttcatcaagctttccgatcccggtgttagcccagctgtgctatcgctggaaatgttgactgatagaatcccctgggtggctcccgagtgtcttcgagaggctcaaaccctaagtctggaggcagacaagtggggttttggcgctaccgtctgggaggtgttctccggggtaacgatgcctatctccgctctggaccctgccaaaaagctgcagttttacgaagaccgtcagcaactacctgcacctaagtggactgagcttgctctcctgattcagcagtgcatggcatatgagccagtgcagaggccgtcattccgcgctgtgattcgagacctcaatagtttaatctcctcagactacgagttacttagcgaccctaccccaggcgctttagcaccccgagatggcctgtggaatggcgctcagttgtacgcgtgtcaagatccaaccatattcgaggaaagacaccttaagtatatctcccagctgggaaagggcaactttggctccgtggaactctgccgttacgaccccctgggggacaatactggggctctagttgcggtgaagcagttacagcattctggtcctgatcagcagcgcgatttccagagagagatccagattctcaaagcgctgcattcagacttcatcgttaagtacaggggggtgtcatatggcccaggacggcaatctctgcgtttagtcatggaatatcttccgtccggatgcttgagagatttcctgcagcggcatcgagctagactagatgctagcaggctgctgctttactcttcacagatatgtaagggcatggaatacctggggagccgacgttgcgtacaccgcgacctggccgcacggaatatccttgtggaatcagaagcccatgtgaagattgctgattttggactggccaaactgcttccactggacaaggactactatgtggtgcgagaaccaggtcaaagccccatcttctggtacgccccagagagtctctcagacaatatattttccagacagagcgatgtgtggagcttcggcgtggtgttgtatgaactttttacctactgtgataagtcctgttcgccctctgctgaatttctgagaatgatggggtgcgagagagatgtcccagctttatgtagactgcttgaactactcgaggaggggcagaggttaccagcgcctcctgcctgccctgccgaagtacacgagctaatgaagctgtgttgggcacccagtcctcaggatagacctagttttagcgccctgggccctcagctggacatgttatggagcgggtcaagaggctgcgaaactcacgccttcacagcccatcctgagggcaagcatcactcactgtccttctcatag

SEQ ID NO: 294886 - DNA, 3375 bp, Artificial Sequence
  derived and/or modified sequence
atggctccaccctcggaggagacacctctgattccacagcgatcttgtagtctcttaagcactgaagctggggcactccacgtgctgctccccgctagaggccctggccctccacagaggttgagtttttcattcggcgatcatctcgctgaggacctctgcgtgcaggccgctaaggctagcggtattctcccagtgtatcactcattgtttgcactcgctactgaggatctctcctgctggtttcctccaagccatattttttctgttgaagacgcatctacgcaggtgctcttgtatagaattcggttttattttcccaactggtttggtctcgaaaagtgccacaggtttggccttagaaaagatttagccagcgccatcctggatttgccagttctagagcatttgtttgcgcaacatagaagcgacttagtgagtggcagactccctgttggcctcagccttaaagagcagggggaatgcctgtctttggctgtgctggatctcgccagaatggctagggaacaagcgcagcgaccgggagagctgttgaaaacagtttcatataaagcctgcttaccaccctcgttgagggatttgattcagggcttgtctttcgttaccagacgcagaatcaggagaactgtgcggagggccctgagaagagtagccgcatgccaggccgatagacactccctgatggcaaaatacatcatggacctggagcggttagatcctgcaggggctgccgagacgtttcacgtggggcttccaggcgctctgggcggtcacgatggtctggggcttcttcgggttgccggagacggagggatcgcgtggacccagggcgagcaggaagtactgcaaccattttgtgatttccctgaaatcgtggacattagtataaaacaggcgccacgggttggccctgctggagagcaccgcctggtgacagtcacacgtacagacaaccagattcttgaagctgagttccccggactgccagaagctttaagcttcgtggccctggtggacggctactttaggttgaccacggacagccagcattttttctgcaaggaagtggctcctccaaggctgctcgaggaggtcgcggagcagtgtcacggtcccattaccttagatttcgcgatcaataaattaaagacagggggatctagacccggaagttatgtcttgagaaggagcccccaagactttgattcctttctgctgacagtatgcgtgcagaacccgttgggcccagactataagggctgccttattcgacggagccccacaggcacgtttttgttagtgggactctccagaccacactcctccctccgagagcttctcgctacatgctgggatgggggactgcacgttgatggcgtggccgtcaccctgacatcatgctgcataccaagaccaaaagagaaaagtaatcttatagtggtccaacggggtcactcaccaccaacatcctcccttgtccagccccaatctcagtatcaactgagccagatgactttccataaaattcctgccgattcccttgagtggcatgagaaccttggccacggatcgtttacaaagatttacagggggtgccgccacgaggttgtggacggtgaggccagaaaaactgaggtgttgctcaaggtgatggatgctaaacacaagaattgtatggagagttttttggaagccgctagtctgatgtcccaagtaagttatcgtcatctggtactgctacacggcgtgtgtatggccggtgactctaccatggtgcaagaattcgtacacttgggcgctattgatatgtacttaagaaagaggggccatctggtgcccgcatcatggaagttacaggtggttaagcagctggcctacgcacttaattatctggaggacaagggccttccacatgggaatgtctcagctcggaaggtcctgctggcacgggaaggggcagatggtagcccgccttttatcaagttatctgacccgggagtctctcctgctgtgcttagcctggagatgctcaccgaccgcatcccctgggtagcacccgagtgcctgcgggaagcccagacgctgagcctcgaagcagacaaatggggcttcggggcaacagtatgggaagtattttctggggtgacaatgcctatctcggctctggatcctgcgaagaaactgcagttctacgaagacaggcaacaacttccggcacctaagtggaccgagctggcacttttgatacagcagtgcatggcgtacgagcctgtgcagaggcccagctttcgcgcagttatacgagacctgaactctctcatctcctccgactatgagcttctctccgaccccacaccgggagctctggcccctcgggacgggctgtggaatggtgcccagttatacgcatgtcaggaccccaccatcttcgaggagagacacttgaagtatatttcacaactcgggaaagggaatttcggttctgtagagctctgtcgttacgatccccttggggacaatacaggcgctcttgtggccgtgaagcagctgcagcacagcgggccagatcaacagcgcgatttccagcgcgagattcagatcttaaaagcgctccacagcgactttattgtgaagtatcgaggggtgtcatatggcccaggcaggcagagcctgcggctggtcatggagtatttaccttcgggttgcctgagggacttccttcagagacacagggcgcgactggatgcaagccgcctcttgctgtatagctctcaaatatgtaaaggaatggagtatttggggtctcggaggtgtgtgcaccgggacttagcagcacggaatatactggtggaatcagaagcccatgtcaagatcgccgactttggactggctaagttattgccattggacaaggactattatgtcgtacgggagccaggccaatctccaatcttctggtatgccccagagtccctcagtgataatatttttagtcgccagagcgatgtttggagctttggtgtggtgttatatgagctctttacatattgcgataaatcctgctcccccagcgccgagtttctgcgcatgatgggatgcgagagagatgtgcctgctctgtgccgcctcctggaacttttagaggaaggacaaagattacccgctccacctgcatgtcccgctgaggtgcacgaactaatgaagttgtgctgggctccttccccccaagaccgacccagtttcagtgcacttggaccccagctggatatgctctggtctggctcaagggggtgcgagacacacgccttcaccgctcaccccgaggggaaacaccacagtctctccttctcatag

SEQ ID NO: 294887 - DNA, 3285 bp, Artificial Sequence
  derived and/or modified sequence
atggcacccccatctgaagaaacccctctcattccacagcggagctgttccctgttatctaccgaagccggtgcattgcatgtacttttgcctgcgcgaggcccaggaccacctcaacggctctccttctcatttggagaccatctggcagaggatctttgcgtccaggccgcaaaagccagtggcatcctgcctgtgtaccattctctcttcgccttggccacagaagaccttagctgctggtttccgccatcgcacatcttctctgtggaagatgctagcacccaggtgctattatacagaatccgtttctacttcccgaactggtttggcctggaaaaatgccatcgttttggacttcggaaggatctggcgagcgctatcctcgatttgcctgtattagaacacctcttcgcacagcacaggtcagacctagtcagcgggcgactcccagtcgggttgagcttaaaggaacagggagagtgcctgagccttgcggttctggatctggccaggatggcgagggagcaggcccagcgtccgggtgaactattaaagaccgtctcatacaaggcctgcttgcccccaagcttgcgggacctgatccaggggttgagcttcgtgacacgcaggagaattcgtagaacagtgagacgcgcactgaggcgcgtggctgcctgccaagctgacagacatagcttaatggcgaagtacatcatggaccttgagcgcctggaccccgcaggggctgctgagacgtttcacgtggggctgcccggagctcttggcggacacgatggccttggtctgctgagggtcgctggcgatggaggcatcgcctggacccagggggaacaagaggtgctgcaacctttctgtgacttcccagaaattgtggacatctcaattaagcaggcccctagagtgggcccagccggagagcataggctagtgacagtaacaagaacggacaaccaaatcctggaggcggagttcccaggactgccggaggctctgagttttgttgctctcgtggatggatactttaggcttaccaccgactcacagcattttttctgcaaggaagttgcaccacctcggctcctggaggaagtagctgagcagtgtcacggccctattacgctcgatttcgctatcaacaagttgaagaccggcggatcccgcccagggtcctacgtactgcgacggagccctcaagacttcgactcattcctgctgaccgtatgtgtccaaaaccccttagggccagattataaggggtgcctgattagaaggtctccgaccgggacattcctgctggtgggactgagtaggccccacagctccctcagagagctgttggctacctgttgggacggcggactgcatgtggacggagttgccgttacattaacctcgtgttgtattccacggcctaaagaaaaatcaaatttgattgtggtgcagcgcggacatagccctcccacctcaagcctggtccagccacaatcacaataccagttgtcacagatgacattccataagattccagctgacagtctggagtggcacgaaaatctcggccatgggtcctttacaaaaatctacaggggatgtagacacgaggtggttgatggcgaggcccgaaagaccgaggtactcttgaaggtgatggacgccaaacataaaaattgcatggagtccttcctggaagccgctagtcttatgagtcaggttagttataggcacctagtgcttctgcatggagtgtgtatggccggagatagcacaatggtgcaagagtttgtgcatttgggcgctattgacatgtacctcaggaagagaggacaccttgttccagccagctggaaactgcaagtagttaaacagcttgcctatgccttgaactatcttgaagacaagggactgccccacgggaacgtgtccgccaggaaagtactactggccagagaaggtgccgatggatcaccaccatttatcaaactgtctgacccaggagtgagtccagctgttctcagtctcgaaatgttgacagatcggataccttgggtggcacccgaatgcttgcgggaagcccagactctcagtctcgaagcagacaagtggggttttggcgctaccgtttgggaggttttttcaggagttaccatgccaatctccgctttggacccagctaaaaagctgcagttctacgaggaccgccaacagcttcctgcccctaagtggacagagctagccttactgatacagcagtgtatggcatacgagcccgtccagaggccttcatttcgggcagtgattagagaccttaattcactgatttcatccgattacgagctgctgagcgacccaacccccggagccctggccccacgggacgggctttggaatggtgcccagttatacgcctgccaggaccccacgatttttgaggaaagacacttaaaatacattagccaattaggaaaaggaaactttgggagcgttgagctctgtcgctatgaccccttaggagataacactggggcactggttgctgtgaagcagttgcagcacagtggacccgatcaacagcgggactttcagcgtgagatccagatccttaaggccctacatagtgactttatagttaagtacaggggagtgtcttacggacctgggaggcagtctctcaggctcgttatggagtatctgccatcggggtgcctgcgagatttcctgcagcgtcatcgggctcgcctggacgcctcccgcctgttgctgtattcatctcagatctgtaaaggcatggagtatcttggatcccggcgttgcgtgcatagggacctggctgcccgaaatatactggtggagtctgaggctcacgttaagatagctgacttcggcctggcaaaactgctccccttggacaaagactactatgttgtgagggagcctgggcagagcccgatcttctggtacgctcccgaatcactgtctgataacatcttttctaggcagagcgatgtctggtcctttggggtggtgctttacgaactctttacatactgtgataagtcttgctctccttccgccgagtttttacgcatgatgggctgcgagagggatgttccagctctttgtagattgctggagcttttagaagagggccagagacttcccgcaccgcctgcatgtcccgcagaagtatctgctgcaggcctggcaagcgtgagccaatctgtggattgggctggagtgtcgggcaagcccgcaggcgcttag

SEQ ID NO: 294888 - DNA, 3375 bp, Artificial Sequence
  derived and/or modified sequence
atggccccccccagcgaggagacccccctgatcccccagagaagctgcagcctgctgagcaccgaggccggcgccctgcacgtgctgctgcccgccagaggccccggccccccccagagactgagcttcagcttcggcgaccacctggccgaggacctgtgcgtgcaggccgccaaggccagcggcatcctgcccgtgtaccacagcctgttcgccctggccaccgaggacctgagctgctggttcccccccagccacatcttcagcgtggaggacgccagcacccaggtgctgctgtacagaatcagattctacttccccaactggttcggcctggagaagtgccacagattcggcctgagaaaggacctggccagcgccatcctggacctgcccgtgctggagcacctgttcgcccagcacagaagcgacctggtgagcggcagactgcccgtgggcctgagcctgaaggagcagggcgagtgcctgagcctggccgtgctggacctggccagaatggccagagagcaggcccagagacccggcgagctgctgaagaccgtgagctacaaggcctgcctgccccccagcctgagagacctgatccagggcctgagcttcgtgaccagaagaagaatcagaagaaccgtgagaagagccctgagaagagtggccgcctgccaggccgacagacacagcctgatggccaagtacatcatggacctggagagactggaccccgccggcgccgccgagaccttccacgtgggcctgcccggcgccctgggcggccacgacggcctgggcctgctgagagtggccggcgacggcggcatcgcctggacccagggcgagcaggaggtgctgcagcccttctgcgacttccccgagatcgtggacatcagcatcaagcaggcccccagagtgggccccgccggcgagcacagactggtgaccgtgaccagaaccgacaaccagatcctggaggccgagttccccggcctgcccgaggccctgagcttcgtggccctggtggacggctacttcagactgaccaccgacagccagcacttcttctgcaaggaggtggccccccccagactgctggaggaggtggccgagcagtgccacggccccatcaccctggacttcgccatcaacaagctgaagaccggcggcagcagacccggcagctacgtgctgagaagaagcccccaggacttcgacagcttcctgctgaccgtgtgcgtgcagaaccccctgggccccgactacaagggctgcctgatcagaagaagccccaccggcaccttcctgctggtgggcctgagcagaccccacagcagcctgagagagctgctggccacctgctgggacggcggcctgcacgtggacggcgtggccgtgaccctgaccagctgctgcatccccagacccaaggagaagagcaacctgatcgtggtgcagagaggccacagcccccccaccagcagcctggtgcagccccagagccagtaccagctgagccagatgaccttccacaagatccccgccgacagcctggagtggcacgagaacctgggccacggcagcttcaccaagatctacagaggctgcagacacgaggtggtggacggcgaggccagaaagaccgaggtgctgctgaaggtgatggacgccaagcacaagaactgcatggagagcttcctggaggccgccagcctgatgagccaggtgagctacagacacctggtgctgctgcacggcgtgtgcatggccggcgacagcaccatggtgcaggagttcgtgcacctgggcgccatcgacatgtacctgagaaagagaggccacctggtgcccgccagctggaagctgcaggtggtgaagcagctggcctacgccctgaactacctggaggacaagggcctgccccacggcaacgtgagcgccagaaaggtgctgctggccagagagggcgccgacggcagcccccccttcatcaagctgagcgaccccggcgtgagccccgccgtgctgagcctggagatgctgaccgacagaatcccctgggtggcccccgagtgcctgagagaggcccagaccctgagcctggaggccgacaagtggggcttcggcgccaccgtgtgggaggtgttcagcggcgtgaccatgcccatcagcgccctggaccccgccaagaagctgcagttctacgaggacagacagcagctgcccgcccccaagtggaccgagctggccctgctgatccagcagtgcatggcctacgagcccgtgcagagacccagcttcagagccgtgatcagagacctgaacagcctgatcagcagcgactacgagctgctgagcgaccccacccccggcgccctggcccccagagacggcctgtggaacggcgcccagctgtacgcctgccaggaccccaccatcttcgaggagagacacctgaagtacatcagccagctgggcaagggcaacttcggcagcgtggagctgtgcagatacgaccccctgggcgacaacaccggcgccctggtggccgtgaagcagctgcagcacagcggccccgaccagcagagagacttccagagagagatccagatcctgaaggccctgcacagcgacttcatcgtgaagtacagaggcgtgagctacggccccggcagacagagcctgagactggtgatggagtacctgcccagcggctgcctgagagacttcctgcagagacacagagccagactggacgccagcagactgctgctgtacagcagccagatctgcaagggcatggagtacctgggcagcagaagatgcgtgcacagagacctggccgccagaaacatcctggtggagagcgaggcccacgtgaagatcgccgacttcggcctggccaagctgctgcccctggacaaggactactacgtggtgagagagcccggccagagccccatcttctggtacgcccccgagagcctgagcgacaacatcttcagcagacagagcgacgtgtggagcttcggcgtggtgctgtacgagctgttcacctactgcgacaagagctgcagccccagcgccgagttcctgagaatgatgggctgcgagagagacgtgcccgccctgtgcagactgctggagctgctggaggagggccagagactgcccgccccccccgcctgccccgccgaggtgcacgagctgatgaagctgtgctgggcccccagcccccaggacagacccagcttcagcgccctgggcccccagctggacatgctgtggagcggcagcagaggctgcgagacccacgccttcaccgcccaccccgagggcaagcaccacagcctgagcttcagctag

SEQ ID NO: 294889 - DNA, 3285 bp, Artificial Sequence
  derived and/or modified sequence
atggccccccccagcgaggagacccccctgatcccccagagaagctgcagcctgctgagcaccgaggccggcgccctgcacgtgctgctgcccgccagaggccccggccccccccagagactgagcttcagcttcggcgaccacctggccgaggacctgtgcgtgcaggccgccaaggccagcggcatcctgcccgtgtaccacagcctgttcgccctggccaccgaggacctgagctgctggttcccccccagccacatcttcagcgtggaggacgccagcacccaggtgctgctgtacagaatcagattctacttccccaactggttcggcctggagaagtgccacagattcggcctgagaaaggacctggccagcgccatcctggacctgcccgtgctggagcacctgttcgcccagcacagaagcgacctggtgagcggcagactgcccgtgggcctgagcctgaaggagcagggcgagtgcctgagcctggccgtgctggacctggccagaatggccagagagcaggcccagagacccggcgagctgctgaagaccgtgagctacaaggcctgcctgccccccagcctgagagacctgatccagggcctgagcttcgtgaccagaagaagaatcagaagaaccgtgagaagagccctgagaagagtggccgcctgccaggccgacagacacagcctgatggccaagtacatcatggacctggagagactggaccccgccggcgccgccgagaccttccacgtgggcctgcccggcgccctgggcggccacgacggcctgggcctgctgagagtggccggcgacggcggcatcgcctggacccagggcgagcaggaggtgctgcagcccttctgcgacttccccgagatcgtggacatcagcatcaagcaggcccccagagtgggccccgccggcgagcacagactggtgaccgtgaccagaaccgacaaccagatcctggaggccgagttccccggcctgcccgaggccctgagcttcgtggccctggtggacggctacttcagactgaccaccgacagccagcacttcttctgcaaggaggtggccccccccagactgctggaggaggtggccgagcagtgccacggccccatcaccctggacttcgccatcaacaagctgaagaccggcggcagcagacccggcagctacgtgctgagaagaagcccccaggacttcgacagcttcctgctgaccgtgtgcgtgcagaaccccctgggccccgactacaagggctgcctgatcagaagaagccccaccggcaccttcctgctggtgggcctgagcagaccccacagcagcctgagagagctgctggccacctgctgggacggcggcctgcacgtggacggcgtggccgtgaccctgaccagctgctgcatccccagacccaaggagaagagcaacctgatcgtggtgcagagaggccacagcccccccaccagcagcctggtgcagccccagagccagtaccagctgagccagatgaccttccacaagatccccgccgacagcctggagtggcacgagaacctgggccacggcagcttcaccaagatctacagaggctgcagacacgaggtggtggacggcgaggccagaaagaccgaggtgctgctgaaggtgatggacgccaagcacaagaactgcatggagagcttcctggaggccgccagcctgatgagccaggtgagctacagacacctggtgctgctgcacggcgtgtgcatggccggcgacagcaccatggtgcaggagttcgtgcacctgggcgccatcgacatgtacctgagaaagagaggccacctggtgcccgccagctggaagctgcaggtggtgaagcagctggcctacgccctgaactacctggaggacaagggcctgccccacggcaacgtgagcgccagaaaggtgctgctggccagagagggcgccgacggcagcccccccttcatcaagctgagcgaccccggcgtgagccccgccgtgctgagcctggagatgctgaccgacagaatcccctgggtggcccccgagtgcctgagagaggcccagaccctgagcctggaggccgacaagtggggcttcggcgccaccgtgtgggaggtgttcagcggcgtgaccatgcccatcagcgccctggaccccgccaagaagctgcagttctacgaggacagacagcagctgcccgcccccaagtggaccgagctggccctgctgatccagcagtgcatggcctacgagcccgtgcagagacccagcttcagagccgtgatcagagacctgaacagcctgatcagcagcgactacgagctgctgagcgaccccacccccggcgccctggcccccagagacggcctgtggaacggcgcccagctgtacgcctgccaggaccccaccatcttcgaggagagacacctgaagtacatcagccagctgggcaagggcaacttcggcagcgtggagctgtgcagatacgaccccctgggcgacaacaccggcgccctggtggccgtgaagcagctgcagcacagcggccccgaccagcagagagacttccagagagagatccagatcctgaaggccctgcacagcgacttcatcgtgaagtacagaggcgtgagctacggccccggcagacagagcctgagactggtgatggagtacctgcccagcggctgcctgagagacttcctgcagagacacagagccagactggacgccagcagactgctgctgtacagcagccagatctgcaagggcatggagtacctgggcagcagaagatgcgtgcacagagacctggccgccagaaacatcctggtggagagcgaggcccacgtgaagatcgccgacttcggcctggccaagctgctgcccctggacaaggactactacgtggtgagagagcccggccagagccccatcttctggtacgcccccgagagcctgagcgacaacatcttcagcagacagagcgacgtgtggagcttcggcgtggtgctgtacgagctgttcacctactgcgacaagagctgcagccccagcgccgagttcctgagaatgatgggctgcgagagagacgtgcccgccctgtgcagactgctggagctgctggaggagggccagagactgcccgccccccccgcctgccccgccgaggtgagcgccgccggcctggccagcgtgagccagagcgtggactgggccggcgtgagcggcaagcccgccggcgcctag

SEQ ID NO: 294890 - protein, 280 aa, Artificial Sequence
  derived and/or modified sequence
MCPPQAQAEVGPTMTEKAEMVCAPSPAPAPPPKPASPGPPQVEEVGHRGGSSPPRLPPGVPVISLGHSRPPGVAMPTTELGTLRPPLLQLSTLGTAPPTLALHYHPHPFLNSVYIGPAGPFSIFPSSRLKRRPSHCELDLAEGHQPQKVARRVFTNSRERWRQQNVNGAFAELRKLLPTHPPDRKLSKNEVLRLAMKYIGFLVRLLRDQAAALAAGPTPPGPRKRPVHRVPDDGARRGSGRRAEAAARSQPAPPADPDGSPGGAARPIKMEQTALSPEVR

SEQ ID NO: 294891 - DNA, 1489 bp, Artificial Sequence
  derived and/or modified sequence
cagcctggcccttatctgcactgggccagcatcctccggccgctgcgccgccaggggtgagagggaggaaaccgggccgccgggggcggggagaaggcgggccggcccgggagccgctcactttccctgggggggacctacgcggagacctcggctatcctggccttccgaggcccacgaggaggcgcggcccaacgccggggcctggagcattgaggccggaccctcgcgagacagcagagcctggcctgacgctggaaaccacaccctggcccagactgccagccctgacgggacagagccagggcactcaccaggctgcaagaacagtgctggggtgagtacccccacgtcggggtccatgtgcccgcctcaggcacaggcagaggtgggccccaccatgactgagaaggcagagatggtgtgtgcccccagcccagcgcctgccccaccccctaagcctgcctcgcctgggcccccgcaggtggaggaggtgggccaccgaggaggctcctcgccccccaggctgccacctggtgtaccagtgatcagcctgggccacagcaggcccccaggggtagccatgcccaccacagagctgggcactctgcggcccccgctgctgcaactctccaccctgggaactgccccgcccactttggccctgcactaccaccctcaccccttcctcaacagtgtctacattgggccagcaggaccttttagcatcttccctagcagccggttgaagcggagaccaagccactgtgagctggacctggctgaggggcaccagccccagaaggtggcccggcgcgtgttcaccaacagccgggagcgctggcggcagcagaacgttaacggcgccttcgccgagctgaggaagctgctgccgacgcacccgcccgaccggaagctgagcaagaacgaggtgctccgcctagccatgaagtacatcggcttcctggtgcggctgctgcgcgaccaagccgcagctctggccgcaggccccacccctcccgggcctcgcaaacggccggtgcaccgggtcccagacgacggcgcccgccggggatccggacgcagggccgaggcggcagcgcgctcgcagcccgcgcccccggccgaccccgacggcagccccggtggagcggcccggcccatcaagatggagcaaaccgctttgagcccagaggtgcggtgaccgcacgcggcagcacctctgagccggagggcaccagggactcggcccagggccgtcaaggaaagggcagtggacgtgctgcgcatgttcgggagcgaactcccccgaagaaggaccagtgaagacgtcaggggcaaggtctcgggggtccggaagggtgatcatcgacccccaagggacccgcagacccttaaaaaaatcacccacaaccctctggaagtggccttgcccggtccccttcccaggggcgaggtcggcaaagcaacatggcagagcagtcatagg

SEQ ID NO: 294892 - protein, 403 aa, Artificial Sequence
  derived and/or modified sequence
MGATEPGGDTSSDEFHPFIEALLPHVRAFSYTWFNLQARKRKYFKKHEKRMSKDEERAVKDELLGEKPEIKQKWASRLLAKLRKDIRPEFREDFVLTITGKKPPCCVLSNPDQKGKIRRIDCLRQADKVWRLDLVMVILFKGIPLESTDGERLYKSPQCSNPGLCVQPHHIGVTIKELDLYLAYFVHTPESGQSDSSNQQGDADIKPLPNGHLSFQDCFVTSGVWNVTELVRVSQTPVATASGPNFSLADLESPSYYNINQVTLGRRSITSPPSTSTTKRPKSIDDSEMESPVDDVFYPGTGRSPAAGSSQSSGWPNDVDAGSPRATASALHFPSTSIIQQSSPYFTHPTIRYHHHHGQDSLKEFVQFVCSDGSGQATGQHSQRQAPPLPTGLSASDPGTATF

SEQ ID NO: 294893 - DNA, 1212 bp, Artificial Sequence
  derived and/or modified sequence
atgggggcaaccgagccgggtggggacacgtcctcagatgagttccatccctttatcgaggcactccttccccacgtgcgcgcctttagctatacctggttcaatcttcaagctcgaaaacgtaagtactttaaaaagcatgagaagcggatgagcaaggacgaggagagggccgtgaaagacgagcttctcggcgagaagcccgaaatcaaacagaagtgggcatccaggcttcttgcgaaacttcggaaagacatacgcccagagttccgtgaagatttcgttctgactataaccggcaaaaaacctccttgttgcgtgctgtccaacccagatcagaaaggaaagataagacggatcgactgtctaaggcaggcagataaagtatggcgcttagatctggtaatggtgattctgttcaagggtatacccctggagagcacagatggggaaagactgtacaagtccccccagtgtagcaaccccggcctttgtgtgcagcctcaccacatcggcgtaacaattaaggaactggacctctatctcgcgtacttcgtgcatacacctgagtcgggacagtcagacagctccaaccagcagggggacgcggacatcaaaccgctgccaaacggccatctatcctttcaggactgttttgtaacaagtggggtgtggaatgtaaccgaactcgttagggttagccaaacccctgttgctacagcaagtgggcctaatttttccttggcggacctggagagcccatcatactataacatcaatcaggtgacactggggaggcgcagcatcacaagtcccccttccacaagcactactaaaagacccaaaagcattgacgattctgagatggaatcgccagttgatgatgttttttacccaggtactggaagaagtcctgcggcagggagttctcagtcaagcggctggcccaacgacgttgatgcaggcagccctagagctaccgccagcgcgctgcacttccctagtacctccataatccagcaaagtagcccatacttcacccatccgacgattaggtaccaccatcatcacggacaggactcccttaaggaattcgtgcagttcgtgtgctctgacgggagcggccaggctaccggacagcactctcagcgccaggctccgcccttacccactggcctgtcagcttctgatcctggaacagccacattctag

SEQ ID NO: 294894 - DNA, 1212 bp, Artificial Sequence
  derived and/or modified sequence
atgggcgccacagagcccggcggggacaccagcagtgatgagttccaccccttcatcgaggccctgctgccccacgtgcgggccttctcctacacctggttcaacctgcaggccaggaagaggaagtacttcaagaagcatgagaagaggatgagcaaggatgaggagagagctgtgaaggatgagctgctgggggagaagccagagatcaagcagaagtgggccagccggctgctggccaagctgaggaaggacatccggcctgagttccgggaggactttgtgctgaccatcaccgggaagaagccaccctgctgcgtgctgagcaacccagaccagaagggcaagatcagaagaattgactgcctgcggcaggccgacaaggtgtggaggctggacctggtgatggtgatcctcttcaagggcatccccctggagagcacagatggagagcggctgtacaagagcccccagtgcagcaaccctggcctgtgtgtgcagccccaccacatcggcgtgaccatcaaggagctggacctgtacctggcctactttgtgcacaccccagagagcggccagagcgacagcagcaaccagcagggagatgctgacatcaagcccctgcccaacggccacctgtccttccaggactgctttgtgaccagcggcgtgtggaatgtgacagagctggtgcgggtgtcccagacccctgtggccacagccagcggccccaacttcagcctggccgacctggagagccccagctactacaacatcaaccaggtgaccctgggccgccgcagcatcaccagcccccccagcaccagcaccaccaagaggcccaagagcattgatgattctgagatggagagccctgtggatgatgtgttctacccaggcaccggccgcagccctgctgctggcagcagccagagcagcggctggcccaatgatgtggatgctggcagcccccgggccacagccagcgccctgcacttccccagcaccagcatcatccagcagagcagcccctacttcacccaccccaccatccgctaccaccaccaccacggccaggacagcctgaaggagtttgtgcagtttgtgtgcagtgatggcagcggccaggccaccggccagcacagccagaggcaggccccacccctgcccaccggcctgagcgccagtgaccccggcacagccaccttctag

SEQ ID NO: 294895 - DNA, 1212 bp, Artificial Sequence
  derived and/or modified sequence
atgggcgccaccgagcccggcggcgacaccagcagcgacgagttccatccatttatagaggcgctcttaccccatgtgagagcgttctcctatacttggtttaatcttcaagctagaaaaaggaagtatttcaagaaacacgagaaaaggatgtctaaagacgaggagcgcgccgtcaaggatgagctgttaggcgagaaaccagagatcaaacagaaatgggctagccgtctactcgccaaattgcgtaaggacattcggcctgaattcagggaggacttcgtcttgacaatcacgggcaaaaaaccaccttgttgcgtattgtcaaacccagatcagaaaggcaagattcgaagaattgactgcctgcggcaggctgacaaagtctggcggctggacctcgtgatggtgatcttatttaagggaattccccttgaaagcaccgacggtgagcgcctttataaaagtccacagtgtagtaaccccggcctgtgcgttcagccccatcatattggcgtaaccattaaagagttggatctttacctcgcttacttcgttcataccccagaatcaggtcagagtgacagctcaaatcaacaaggagacgccgacattaaaccactgcctaatggccacctgtcgtttcaagactgttttgttactagcggcgtatggaatgtcacggagctagtccgcgtaagccagacaccagtcgcgacagcttcaggtccaaatttttctttggctgaccttgagagtccctcctactataatatcaatcaggtgacgcttggtagacgcagcataacatcccctccttccacatctacaaccaaacgccctaagagcatcgatgatagtgagatggaatcccctgtggatgatgttttttatcccggaaccgggaggtctcctgcagccggatcttctcagtctagcggctggcccaacgacgtggatgctggatccccgcgtgccacagccagcgccctgcactttccgtctacatcaatcatccagcagagcagtccatactttacacatccaaccatcaggtatcaccatcatcacggtcaggactcgcttaaggaatttgtgcagtttgtgtgtagcgacggttctggccaggctacgggtcagcattcacagaggcaggctcctccgttacctaccggtctgagcgcatctgacccaggcaccgcaactttctag

SEQ ID NO: 294896 - DNA, 1727 bp, Artificial Sequence
  derived and/or modified sequence
cagacggacactgtgccggggcgagctgacaggagttcacggctgcgatagaacatggagatgtcatgggcgcgacagagcctggcggggataccagcagcgatgagttccacccgttcatcgaggcactgctgcctcacgtccgcgctttctcctacacctggttcaacctgcaggcgcggaagcgcaagtacttcaagaagcatgaaaagcggatgtcgaaggacgaggagcgggcggtgaaggacgagctgctgggcgagaagcccgagatcaagcagaagtgggcatcccggctgctggccaagctgcgcaaggacatccggcccgagttccgcgaggacttcgtgctgaccatcacgggcaagaagcccccctgctgcgtgctctccaaccccgaccagaagggcaagatccggcggattgactgcctgcgccaggctgacaaggtgtggcggctggacctggtcatggtgattttgtttaaggggatccccctggaaagtactgatggggagcggctctacaagtcgcctcagtgctcgaaccccggcctgtgcgtccagccacatcacattggagtcacaatcaaagaactggatctttatctggcttactttgtccacactccggaatccggacaatcagatagttcaaaccagcaaggagatgcggacatcaaaccactgcccaacgggcacttaagtttccaggactgttttgtgacttccggggtctggaatgtgacggagctggtgagagtatcacagactcctgttgcaacagcatcagggcccaacttctccctggcggacctggagagtcccagctactacaacatcaaccaggtgaccctggggcggcggtccatcacctcccctccttccaccagcaccaccaagcgccccaagtccatcgatgacagtgagatggagagccctgttgatgacgtgttctatcccgggacaggccgttccccagcagctggcagcagccagtccagcgggtggcccaacgatgtggatgcagggagcccccgggccacagcatcagccctgcacttcccctccacgtccatcatccagcagtcgagcccgtatttcacgcacccgaccatccgctaccaccaccaccacgggcaggactcactgaaggagtttgtgcagtttgtgtgctcggatggctcgggccaggccaccggacagcattcgcaacgacaggcgcctcctctgccaaccggtttgtcagcatcggaccccgggacggcaactttctgaacatcccacagcagtctcagtcctggttcctctgataagatcgacaaaagaaacaacaaaatgagaagaagaggttcctcgaaaggggggagaagaaattttgagaatggaaaaatcccccagcccagcccagccccaccgaaaagcaaaaattacacgtcgtcagccactcagcccttctctcctccagcccggggacccccgcgggccccagaagcagcccagttctcagagagcccttggaaggggtctcggtggagctgtgcaccagcagccaagcagaaagaaacacgcgacatggactctgtcaagtagaggacagaaagcaagaaaggatgcagaactgccttcctccccctgaccccgccccgcccccgtcactgcgcttctgttataccatctttgcctgactctctccggcttctccattgaatggctaatgtgtatgtg

SEQ ID NO: 294897 - DNA, 1212 bp, Artificial Sequence
  derived and/or modified sequence
atgggagctactgagcctggaggggatactagtagcgatgagttccatcccttcatcgaggccctgcttccacatgtaagagcgttttcttatacatggttcaacctgcaggctagaaagcggaagtattttaaaaagcatgaaaaaaggatgagtaaagatgaggagcgggctgtgaaagacgagcttcttggcgagaagccagaaatcaaacaaaagtgggcttctcggctcctcgccaaattacgaaaggatattcgtccagaattccgagaagacttcgtcctaactattactggcaaaaaaccaccttgctgcgtgctctcgaacccagaccagaagggaaaaattagacggattgattgcctccgacaggcagataaggtctggcggttagatctcgtcatggtgattctgtttaaggggattcccctcgagagcactgatggtgaacgcctgtataagtcacctcaatgttctaaccccggtctatgcgtacagccccaccacattggcgttactatcaaagaattggatctttacctagcctatttcgtgcacactcctgaaagcggccagtccgactcctccaaccaacagggagatgccgacattaagcctctgcccaacggccatctatctttccaagactgttttgtgacttctggagtctggaatgtaacagaactggttagggtctcacaaacccctgttgcgactgcgtccggcccaaattttagcctagctgatcttgaatccccttcttactataacattaaccaggtaaccctcggaagacgtagtatcacaagccccccttccaccagtaccaccaaaaggcctaagtccatcgacgattctgaaatggaatcccctgtcgatgacgtcttctacccaggaaccggccgtagtccggcagctggtagtagccaatcttccgggtggcctaacgacgttgatgctgggtccccccgagccactgcatctgctttgcactttccttctacttctattattcagcaatcaagcccctacttcactcaccccacaataaggtatcatcaccaccatgggcaggactcgctcaaggagtttgtgcaatttgtgtgctctgatgggtccgggcaggctaccggccagcattcacaaaggcaggctccccctctacccaccggtctgagcgctagtgaccctggaaccgctaccttttag

SEQ ID NO: 294898 - DNA, 1212 bp, Artificial Sequence
  derived and/or modified sequence
atgggcgccaccgagcccggcggcgacaccagcagcgacgagttccaccccttcatcgaggccctgctgccccacgtgagagccttcagctacacctggttcaacctgcaggccagaaagagaaagtacttcaagaagcacgagaagagaatgagcaaggacgaggagagagccgtgaaggacgagctgctgggcgagaagcccgagatcaagcagaagtgggccagcagactgctggccaagctgagaaaggacatcagacccgagttcagagaggacttcgtgctgaccatcaccggcaagaagcccccctgctgcgtgctgagcaaccccgaccagaagggcaagatcagaagaatcgactgcctgagacaggccgacaaggtgtggagactggacctggtgatggtgatcctgttcaagggcatccccctggagagcaccgacggcgagagactgtacaagagcccccagtgcagcaaccccggcctgtgcgtgcagccccaccacatcggcgtgaccatcaaggagctggacctgtacctggcctacttcgtgcacacccccgagagcggccagagcgacagcagcaaccagcagggcgacgccgacatcaagcccctgcccaacggccacctgagcttccaggactgcttcgtgaccagcggcgtgtggaacgtgaccgagctggtgagagtgagccagacccccgtggccaccgccagcggccccaacttcagcctggccgacctggagagccccagctactacaacatcaaccaggtgaccctgggcagaagaagcatcaccagcccccccagcaccagcaccaccaagagacccaagagcatcgacgacagcgagatggagagccccgtggacgacgtgttctaccccggcaccggcagaagccccgccgccggcagcagccagagcagcggctggcccaacgacgtggacgccggcagccccagagccaccgccagcgccctgcacttccccagcaccagcatcatccagcagagcagcccctacttcacccaccccaccatcagataccaccaccaccacggccaggacagcctgaaggagttcgtgcagttcgtgtgcagcgacggcagcggccaggccaccggccagcacagccagagacaggccccccccctgcccaccggcctgagcgccagcgaccccggcaccgccaccttctag

SEQ ID NO: 294899 - protein, 1939 aa, Artificial Sequence
  derived and/or modified sequence
MAPTWGPGMVSVVGPMGLLVVLLVGGCAAEEPPRFIKEPKDQIGVSGGVASFVCQATGDPKPRVTWNKKGKKVNSQRFETIEFDESAGAVLRIQPLRTPRDENVYECVAQNSVGEITVHAKLTVLREDQLPSGFPNIDMGPQLKVVERTRTATMLCAASGNPDPEITWFKDFLPVDPSASNGRIKQLRSDQAFSHLPTGALQIESSEETDQGKYECVATNSAGVRYSSPANLYVRVWRTVRRVAPRFSILPMSHEIMPGGNVNITCVAVGSPMPYVKWMQGAEDLTPEDDMPVGRNVLELTDVKDSANYTCVAMSSLGVIEAVAQITVKSLPKAPGTPMVTENTATSITITWDSGNPDPVSYYVIEYKSKSQDGPYQIKEDITTTRYSIGGLSPNSEYEIWVSAVNSIGQGPPSESVVTRTGEQAPASAPRNVQARMLSATTMIVQWEEPVEPNGLIRGYRVYYTMEPEHPVGNWQKHNVDDSLLTTVGSLLEDETYTVRVLAFTSVGDGPLSDPIQVKTQQGVPGQPMNLRAEARSETSITLSWSPPRQESIIKYELLFREGDHGREVGRTFDPTTSYVVEDLKPNTEYAFRLAARSPQGLGAFTPVVRQRTLQSKPSAPPQDVKCVSVRSTAILVSWRPPPPETHNGALVGYSVRYRPLGSEDPEPKEVNGIPPTTTQILLEALEKWTQYRITTVAHTEVGPGPESSPVVVRTDEDVPSAPPRKVEAEALNATAIRVLWRSPAPGRQHGQIRGYQVHYVRMEGAEARGPPRIKDVMLADAQEMVITNLQPETAYSITVAAYTMKGDGARSKPKVVVTKGAVLGRPTLSVQQTPEGSLLARWEPPAGTAEDQVLGYRLQFGREDSTPLATLEFPPSEDRYTASGVHKGATYVFRLAARSRGGLGEEAAEVLSIPEDTPRGHPQILEAAGNASAGTVLLRWLPPVPAERNGAIVKYTVAVREAGALGPARETELPAAAEPGAENALTLQGLKPDTAYDLQVRAHTRRGPGPFSPPVRYRTFLRDQVSPKNFKVKMIMKTSVLLSWEFPDNYNSPTPYKIQYNGLTLDVDGRTTKKLITHLKPHTFYNFVLTNRGSSLGGLQQTVTAWTAFNLLNGKPSVAPKPDADGFIMVYLPDGQSPVPVQSYFIVMVPLRKSRGGQFLTPLGSPEDMDLEELIQDISRLQRRSLRHSRQLEVPRPYIAARFSVLPPTFHPGDQKQYGGFDNRGLEPGHRYVLFVLAVLQKSEPTFAASPFSDPFQLDNPDPQPIVDGEEGLIWVIGPVLAVVFIICIVIAILLYKNKPDSKRKDSEPRTKCLLNNADLAPHHPKDPVEMRRINFQTPDSGLRSPLREPGFHFESMLSHPPIPIADMAEHTERLKANDSLKLSQEYESIDPGQQFTWEHSNLEVNKPKNRYANVIAYDHSRVILQPIEGIMGSDYINANYVDGYRCQNAYIATQGPLPETFGDFWRMVWEQRSATIVMMTRLEEKSRIKCDQYWPNRGTETYGFIQVTLLDTIELATFCVRTFSLHKNGSSEKREVRQFQFTAWPDHGVPEYPTPFLAFLRRVKTCNPPDAGPIVVHCSAGVGRTGCFIVIDAMLERIKPEKTVDVYGHVTLMRSQRNYMVQTEDQYSFIHEALLEAVGCGNTEVPARSLYAYIQKLAQVEPGEHVTGMELEFKRLANSKAHTSRFISANLPCNKFKNRLVNIMPYESTRVCLQPIRGVEGSDYINASFIDGYRQQKAYIATQGPLAETTEDFWRMLWENNSTIVVMLTKLREMGREKCHQYWPAERSARYQYFVVDPMAEYNMPQYILREFKVTDARDGQSRTVRQFQFTDWPEQGVPKSGEGFIDFIGQVHKTKEQFGQDGPISVHCSAGVGRTGVFITLSIVLERMRYEGVVDIFQTVKMLRTQRPAMVQTEDEYQFCYQAALEYLGSFDHYAT

SEQ ID NO: 294900 - DNA, 5820 bp, Artificial Sequence
  derived and/or modified sequence
atggcgccaacctgggggcctggcatggtcagtgttgtggggccaatgggactcctggtcgtcttgctcgtcggaggctgtgctgccgaagagccccccaggtttattaaagagccaaaagaccagatcggagtaagtggaggagttgcctcatttgtatgtcaggccacaggggatcctaagccacgcgtgacttggaataagaagggcaagaaggtgaatagtcaacgatttgaaaccattgagttcgatgaatctgctggggcggtcttgcgaattcaacccttgagaactccacgggacgaaaatgtttacgagtgcgtggcacagaattccgtcggagagatcacagttcatgcaaagctgacagtcttacgggaggatcagcttcctagcggctttcctaacatagatatgggcccacagcttaaagtggtggaaagaactcggacagcgaccatgctgtgcgccgcaagcggtaaccccgaccccgaaataacttggtttaaagatttcctcccagtcgacccctctgcgagcaacggtaggattaagcagcttcggagtgaccaagcctttagtcacctgccaacaggggcactccaaatcgagtcctccgaggagacagaccagggtaagtacgagtgcgtggcaacgaacagtgctggagtgagatatagtagccccgccaatctgtacgtacgagtgtggaggactgtgcgccgggtggctcctcgattttcaattttgccaatgtcacacgaaatcatgcccgggggcaatgttaatattacatgcgtcgctgttggaagtcccatgccttatgtgaaatggatgcagggggcagaagatctgacccccgaggacgatatgcccgtcgggagaaacgtgctggagttgaccgatgtgaaagacagtgccaactacacctgcgtggcgatgtcaagcctgggcgtaatagaggccgtagcacagattaccgtgaagtcgcttcctaaggcgcccggcacaccaatggtgacagagaatacggccaccagtatcacaatcacttgggatagcggcaacccggatccagtgtcctattatgtgattgagtacaaaagcaagagccaggacggaccctatcagatcaaggaggatataacaaccacacgctactccataggggggttgtcccccaacagcgaatacgagatatgggtgtcagctgtgaactccataggtcagggacctccttccgagtcagtcgttacgcgaaccggcgagcaagcacccgcgtccgcgccgcggaacgttcaagcccggatgctctccgccacaaccatgatcgtccagtgggaggagccagtagagccgaacggcctgattcgaggatacagggtctactacactatggagccagagcacccagtaggaaattggcagaagcacaacgtggatgactccctcctcacaacggtcggtagccttctggaggacgagacttatactgtgagagtcctggccttcactagcgtgggagacggccccctgtcagaccccattcaggtgaagactcagcagggtgttccaggacaaccgatgaatctgagggccgaagctcgctctgaaacaagcatcactcttagctggagcccacctcggcaagaatctatcatcaagtacgaactgctttttcgcgaaggggatcatggtagggaggtcggtcgaaccttcgaccccaccacctcctatgtagtggaggatctaaaacctaataccgaatatgcattccggttggcggccagaagtccacagggactgggcgcttttacccctgtagtccggcagaggacactccagtcaaagccctctgcccctccccaggatgtcaaatgtgtgagcgtgaggtctaccgccatcctggtgtcttggcggcctcctccacccgagacacacaatggagcactggttggttatagtgtaagatatcggcctctgggctctgaggatcctgagcccaaagaagtcaacggcatccctcccaccacaacccagatcctactcgaagcactggaaaagtggactcaataccgaattacgaccgtggcacataccgaagtggggcctggtcctgaaagcagccccgttgtcgtgaggaccgatgaagacgtcccttcagctcctcctcggaaggtcgaggccgaggctctgaatgcaacagcaatccgggtgctctggcggtctcccgctcctgggagacagcacgggcaaattaggggttaccaggtacactacgttcggatggagggggctgaagcacgcgggccaccccgaataaaagatgtcatgctggctgacgcccaagaaatggtcattacaaacctacagccggaaaccgcctactccatcaccgtcgcagcatatactatgaaaggcgacggagctcgctccaaacctaaagtggtagtgactaagggagccgttcttgggcggccgaccctgtcagtccaacagacccccgagggcagcctgttggctaggtgggaaccccccgccgggaccgctgaggatcaggtgctggggtacaggcttcagttcgggagagaagattctacacccctggcaaccctggagttcccaccctcggaagaccgctatacagcttccggcgttcacaagggagctacatatgtgtttaggttagctgcgagatctcgaggtgggctaggagaagaggctgctgaggttttgtctatacctgaggatacccccagggggcaccctcagatcttggaggctgccggtaatgcgtcggccggaacagtgcttctgaggtggctaccacctgtgcccgccgaacggaacggagctattgtgaaatatacggtcgctgtaagggaagccggagcccttgggccagctcgagagacggagctgcccgctgctgcggagcctggggccgaaaacgccctgaccctgcagggcctgaaaccagacaccgcttacgacctgcaggtccgggcccacacaagaagggggcccggtccctttagtccacctgtaaggtataggacctttctgagagatcaggtctctcctaagaactttaaggtgaagatgatcatgaagacatctgttttgttgagttgggaatttcctgataactataattccccaaccccatacaaaatccagtataatgggctaacgctggacgttgacggaaggaccactaagaaactgataacccacctgaagccgcacacattttataactttgtgttgacgaacaggggcagttcactgggtgggctccagcagacagttaccgcttggacagcctttaatttgctcaacgggaaaccgtccgtggctccaaagcccgacgccgacgggttcattatggtgtatttaccagacggacagtcacccgtgcctgtgcagagctacttcatcgtcatggttccacttcggaagtcccggggtgggcagttcctgacacccctgggttccccagaggacatggatttggaggagttgatacaggacatcagtcggctccagaggcgatccctccgccatagccggcagctcgaagtgccaaggccctatatcgctgcaagatttagtgtgctcccccccacctttcaccccggtgatcaaaaacaatatggaggctttgataaccggggcctggagccaggacaccgctacgtgctgttcgtcctggctgtgctccagaagtccgagccgacatttgctgcctcaccattctcagatccctttcagttggacaacccggatccgcagccaatcgtggacggcgaggaaggtctgatatgggttattggtccagttctcgccgtcgtcttcattatctgtatcgtaatagctatcctcctgtataaaaataagcccgattccaaacgaaaagacagtgagccacggacgaagtgcctgcttaacaacgcagatcttgccccacatcaccccaaggaccccgtggagatgcgacggatcaactttcaaaccccagattcagggctcagatcacccctgcgggaaccaggtttccacttcgagtccatgctgagccacccgccaataccaattgcggatatggctgaacatacagagcgcctcaaggcgaatgattccctgaagctgagtcaggaatacgagtctattgatcccgggcagcaattcacctgggaacacagcaacctggaagtcaacaagccgaaaaaccgatacgccaatgttatcgcatatgatcattccagagtgatcctccagccaattgagggcattatgggcagtgactacatcaacgccaattatgttgacgggtaccgctgccagaacgcctatatcgcaacccagggacctctcccggaaacctttggagacttctggcgcatggtttgggagcaacgcagcgcgaccattgtgatgatgacgcggttagaagagaaaagccgaatcaagtgcgatcagtattggcccaacagaggcaccgaaacctatggtttcattcaagtgacccttcttgacacgatcgagctcgccacattctgtgtgagaacgttctccttgcacaaaaatgggtcctccgaaaagcgggaggtgaggcagttccagtttacagcctggcccgatcatggagttcccgaatatcccacaccttttttggccttccttcgtcgagtcaaaacctgcaaccctccagatgcaggccctattgtggtgcactgctctgcgggagtggggaggaccgggtgcttcatagtcattgacgcaatgctggagcggatcaagcccgaaaaaaccgtggacgtgtatggacacgtgactcttatgcggagccagcggaactacatggtgcagaccgaagaccagtatagctttattcatgaggcactcctcgaggccgtagggtgtggcaataccgaggtccccgccaggtcactttatgcttacatccaaaagcttgcccaagtggaacccggggagcacgtcacaggaatggaactagaattcaaaaggctggcaaactccaaggcacacaccagtaggttcatcagcgccaacctcccttgtaataagtttaagaaccgcctggtgaacatcatgccgtatgagtccacccgcgtatgcctgcagcctatacggggtgtagaagggtcagactacatcaatgccagtttcatcgacggatatagacagcagaaggcctacatagctacacagggcccgctggcagaaaccacggaggacttctggaggatgctgtgggagaataactccaccatagtcgtgatgttaacaaagcttcgagaaatgggtcgcgaaaagtgccaccagtactggcccgcagagcgcagtgcgagataccaatactttgtggtcgaccccatggcggagtataacatgcctcagtacattctgcgtgaattcaaggttaccgacgccagagacggacaaagccgcacggttcggcagttccagtttaccgactggcctgagcagggagttccaaaaagcggggaagggttcatcgactttattggccaggtgcacaagacgaaagagcaattcggccaagacggtcccatcagtgtacattgttccgccggtgtcggacgtacgggggtcttcattactctcagcatagtgcttgagcgaatgcggtacgagggcgtggtagatattttccaaaccgtgaaaatgcttagaacacagagacctgctatggtgcaaaccgaagacgagtaccagttctgttaccaagctgcgttagagtacctgggctctttcgaccactatgcaacgtag

SEQ ID NO: 294901 - DNA, 5820 bp, Artificial Sequence
  derived and/or modified sequence
atggcccccacctggggccctggcatggtgtctgtggtgggccccatgggcctgctggtggtgctgctggtgggcggctgtgccgctgaggagcccccacgcttcatcaaggagcccaaggaccagattggagtgtctgggggcgtggccagctttgtgtgccaggccactggagaccccaagccccgggtgacctggaacaagaagggcaagaaggtgaacagccagagatttgagaccattgaatttgatgagagcgctggagctgtgctgcgcatccagcccctgcggaccccaagagatgaaaatgtgtatgaatgtgtggcccagaacagcgtgggggagatcaccgtgcacgccaagctgactgtgctgcgggaggaccagctgcccagcggcttccccaacatcgacatgggcccccagctgaaggtggtggagaggaccaggacagccaccatgctgtgtgccgccagcggcaacccagaccctgagatcacctggttcaaggacttcctgcctgtggaccccagcgccagcaatggccgcatcaagcagctgcggagtgaccaggccttcagccacctgcccaccggggccctgcagatcgagagcagcgaggagacagaccagggcaagtatgaatgtgtggccaccaacagcgctggggtgcgctacagcagccctgccaacctgtatgtgcgggtgtggaggacagtgagaagagtggccccccgcttcagcatcctgcccatgagccatgagatcatgcctggaggaaatgtgaacatcacctgtgtggccgtgggcagccccatgccctacgtgaagtggatgcagggcgctgaggacctgaccccagaagatgacatgcctgtgggcagaaatgtgctggagctgacagatgtgaaggacagcgccaactacacctgtgtggccatgagcagcctgggcgtcatcgaggccgtggcccagatcaccgtgaagagcctgcccaaggcccctggcacccccatggtgacagagaacacagccaccagcatcaccatcacctgggacagcggcaacccagaccctgtgtcctactacgtgattgagtacaagagcaagagccaggacggcccctaccagatcaaggaggacatcaccaccacccgctacagcattggaggcctgagccccaacagtgaatatgagatctgggtgtctgctgtgaacagcatcggccagggcccccccagcgagagcgtggtgaccaggactggagagcaggccccagccagcgcccccagaaatgtgcaggccaggatgctgagcgccaccaccatgattgtgcagtgggaggagcctgtggagcccaacggcctcatccggggctacagagtgtactacaccatggagcctgagcaccctgtgggcaactggcagaagcacaacgtggatgacagcctgctgaccaccgtgggcagcctgctggaggatgagacctacacagtgcgggtgctggccttcacctctgtgggagatggccccctgagtgaccccatccaggtgaagacccagcagggcgtgcccggccagcccatgaacctgcgggcagaggcccggtctgagaccagcatcaccctgtcctggagccccccccggcaggagagcatcatcaagtatgagctgctcttccgggagggggaccacggccgggaggtgggccgcacctttgaccccaccaccagctatgtggtggaggacctgaagcccaacacagaatatgccttccggctggccgcccggagcccccagggcctgggcgccttcacccctgtggtgcggcagaggaccctgcagagcaagcccagcgccccaccccaggatgtgaagtgtgtgtctgtgcgcagcacagccatcctggtgtcctggaggcctcctcctcctgagacccacaacggggccctggtgggctacagcgtgcgctaccggcccctgggcagcgaggaccctgagcccaaggaggtgaatggcatcccccccaccaccacccagatcctgctggaggccctggagaagtggacccagtaccgcatcaccaccgtggcccacacagaggtgggccctggccctgagagcagccctgtggtggtgaggacagatgaagatgtgcccagcgccccacccaggaaggtggaggccgaggccctgaatgccacagccatccgggtgctgtggaggagccctgcccctggccggcagcacggccagatccggggctaccaggtgcactacgtgaggatggagggcgctgaggcccggggccccccacgcatcaaggatgtgatgctggctgatgcccaggagatggtgatcaccaacctgcagcctgagacagcctacagcatcaccgtggccgcctacaccatgaagggagatggagcccggagcaagcccaaggtggtggtgaccaagggagctgtgctgggccggcccaccctgtctgtgcagcagaccccagagggcagcctgctggcccgctgggagcccccagctggaacagctgaggaccaggtgctgggctaccgcctgcagtttggccgggaggacagcacccccctggccaccctggagttccccccatctgaggaccgctacacagccagcggcgtgcacaagggggccacctacgtgttccggctggccgcccggagccggggcggcctgggggaggaggccgctgaggtgctgagcatccctgaggacaccccccggggccacccccagatcctggaggccgctggaaatgccagcgctggcaccgtgctgctgcgctggctgccccctgtgcctgctgagagaaatggagccatcgtgaagtacacagtggccgtgcgggaggccggggccctgggccctgcccgggagacagagctgcctgctgctgctgagcccggggctgaaaatgccctgaccctgcagggcctgaagccagacacagcctatgacctgcaggtgcgggcccacacccggcggggccctggccccttcagcccccctgtgcgctaccgcaccttcctgcgggaccaggtgagccccaagaacttcaaggtgaagatgatcatgaagacctctgtgctgctgtcctgggagttcccagacaactacaacagccccaccccctacaagatccagtacaacggcctgaccctggatgtggatggccgcaccaccaagaagctgatcacccacctgaagccccacaccttctacaactttgtgctgaccaacagaggcagcagcctgggcggcctgcagcagacagtgacagcctggacagccttcaacctgctgaatggcaagcccagcgtggcccccaagccagatgctgatggcttcatcatggtgtacctgcctgatggccagagccctgtgcctgtgcagagctacttcatcgtgatggtgcccctgaggaagagcagaggaggccagttcctgacccccctgggcagccctgaggacatggacctggaggagctgatccaggacatcagccggctgcagaggaggagcctgcggcacagccggcagctggaggtgccccggccctacatcgccgcccgcttctctgtgctgccccccaccttccaccctggggaccagaagcagtatggaggctttgacaacagaggcctggagcccggccacagatatgtgctgtttgtgctggccgtgctgcagaagtctgagcccacctttgctgccagccccttcagtgaccccttccagctggacaacccagacccccagcccatcgtggatggagaggagggcctcatctgggtgattggccctgtgctggccgtggtgttcatcatctgcatcgtcatcgccatcctgctgtacaagaacaagccagacagcaagaggaaggacagcgagcccaggaccaagtgcctgctgaacaatgctgacctggccccccaccaccccaaggaccctgtggagatgaggcgcatcaacttccagaccccagacagcggcctgcggagccccctgcgggagcccggcttccactttgagagcatgctgagccacccccccatccccatcgctgacatggccgagcacacagagcggctgaaggccaatgacagcctgaagctgagccaggagtatgagagcattgatcctggccagcagttcacctgggagcacagcaacctggaggtgaacaagcccaagaacagatatgccaacgtgattgcctatgaccacagcagggtcatcctgcagcccatcgagggcatcatgggcagtgactacatcaatgccaactacgtggatggctaccgctgccagaatgcctacatcgccacccagggccccctgcctgagacctttggagacttctggaggatggtgtgggagcagaggtctgccaccatcgtgatgatgacccggctggaggagaagagccgcatcaagtgtgaccagtactggcccaacagaggaacagagacctacggcttcatccaggtgaccctgctggacaccatcgagctggccaccttctgtgtgaggaccttcagcctgcacaagaatggcagcagcgagaagcgggaggtgcggcagttccagttcaccgcctggccagaccatggagtgcctgagtaccccacccccttcctggccttcctgcggcgggtgaagacctgcaaccccccagatgctggccccatcgtggtgcactgcagcgctggggtgggccgcacaggctgcttcatcgtgattgatgccatgctggagcgcatcaagccagagaagacagtggatgtgtatggccacgtgaccctgatgaggagccagaggaactacatggtgcagacagaggaccagtacagcttcatccacgaggccctgctggaggccgtgggctgcggcaacacagaggtgcctgcccggagcctgtatgcctacatccagaagctggcccaggtggagcccggggagcacgtgacaggcatggagctggagttcaagaggctggccaacagcaaggcccacaccagccgcttcatcagcgccaacctgccctgcaacaagttcaagaaccggctggtgaacatcatgccctatgagagcaccagggtgtgcctgcagcccatccggggcgtggagggcagtgactacatcaatgccagcttcattgatggctaccggcagcagaaggcctacatcgccacccagggccccctggccgagaccacagaggacttctggaggatgctgtgggagaacaacagcaccatcgtggtgatgctgaccaagctgcgggagatgggccgggagaagtgccaccagtactggccagctgagaggtctgcccgctaccagtactttgtggtggaccccatggccgagtacaacatgccccagtacatcctgcgggagttcaaggtgacagatgccagagatggccagagcaggacagtgcggcagttccagttcacagactggccagagcagggcgtgcccaagtctggagagggcttcatcgacttcatcggccaggtgcacaagaccaaggagcagtttggccaggacggccccatctctgtgcactgcagcgctggggtgggccgcactggagtcttcatcaccctgagcatcgtgctggagaggatgagatatgaaggagtggtggacatcttccagacagtgaagatgctgcggacccagaggcctgccatggtgcagacagaagatgagtaccagttctgctaccaggccgccctggagtacctgggcagctttgaccactacgccacctag

SEQ ID NO: 294902 - DNA, 5820 bp, Artificial Sequence
  derived and/or modified sequence
atggcccccacctggggccccggcatggtgagcgtggtgggccccatgggtctccttgttgtgttgttggttggcggctgtgccgccgaagagccacctcgtttcattaaggaaccaaaagatcaaatcggtgtatcaggcggtgtggcatcgttcgtctgccaagccactggtgacccgaagccacgggtcacatggaacaagaagggcaaaaaggtcaatagtcaaagatttgagacgatagaattcgatgagtctgccggcgcagtgcttcgaatacagcctttgcggacgccgagagacgaaaatgtgtatgaatgcgttgctcaaaactccgtgggcgagataacagtccatgccaagctgacagtgctccgcgaggatcagctgccatctggctttccaaacatcgacatgggacctcaactgaaagtggttgaacgcactcgaacagctaccatgctgtgtgccgcctctggcaaccctgatcccgagattacttggttcaaggatttcctcccagtggacccatcggcttccaacgggcgcatcaaacaactccggtcggatcaggcctttagtcacttacccacaggggcattgcagatcgaatctagcgaagagaccgatcaaggaaagtacgaatgcgtcgcaactaactcagccggtgtgaggtacagttcaccagccaacctgtacgtgcgggtttggcgcaccgtgagacgtgtggccccacggttttccatcctccctatgtctcatgagataatgccaggaggtaacgtaaacataacgtgtgttgccgtaggttctcccatgccctatgttaagtggatgcaaggcgctgaagaccttacgccggaggatgatatgccggttggtcgcaatgtgctagaactgaccgatgtgaaggattccgcgaactacacttgtgtcgccatgagcagtttgggcgtgatcgaggccgtggcccagatcactgtaaaatctctgcctaaagcccccggcactcctatggtgactgaaaacaccgcaacatctattaccatcacctgggactccggcaaccccgatcctgtgagctattacgtgattgaatacaaatctaaatcacaggacggcccataccaaattaaagaggacatcaccacaacgcggtactcaatcggcggcctttcacctaacagtgagtatgagatttgggtcagcgctgtgaattcaataggccagggtcctcctagtgaatctgttgtgactagaactggagagcaggctccagcttccgcacccaggaatgtccaggccaggatgctctccgccactaccatgattgtacagtgggaagaaccggtggaaccaaatggcctgatccgcggatacagagtttattatactatggagccagaacatcccgtcggtaattggcagaaacataacgtagacgactccttgctcacaacagtgggcagcttgctggaagatgagacatacactgtgcgagtgctcgcatttaccagcgtcggagatggacctctaagcgatccaatacaggtgaagacacagcagggcgtacctggccaaccgatgaacctgcgggcagaagcacgctcagaaacctcaatcaccctgtcatggtcccctccgcggcaggaatctatcattaagtatgaactgctcttcagggaaggcgaccatggcagagaagtagggaggacgtttgatccaaccacctcctacgtcgttgaggacctcaagcccaatacagaatatgccttcaggctggcggccagatcaccacaaggtctgggcgccttcactccagtggtccggcaacgcacgcttcagtctaaaccatctgctcctcctcaggacgttaaatgtgtgtccgtccggagcacagctatcttagtatcatggagaccacccccacctgagacccacaacggcgctcttgtgggctactccgtaaggtacagaccactgggtagtgaggatcccgaacccaaagaagtgaatggcattccccccacaactactcagattttactcgaggcccttgaaaagtggacacagtaccggattactaccgtggctcatacagaggtgggcccaggaccagagagttctccagtagttgtgcgtaccgacgaggatgtgccttcggcaccacctcggaaggttgaagctgaggctctgaatgcaacagccattagggtgctgtggcggagccctgctcctgggcggcaacatggacagataagggggtatcaagtgcattacgttcgcatggagggggccgaagcacggggaccaccccggattaaagacgtcatgctcgcagatgcacaagaaatggtgatcaccaatctgcagcccgaaaccgcttactccattaccgtcgcagcctacacaatgaagggtgatggcgctagatctaagccaaaggtcgtcgtgactaaaggcgcagtgctgggacgcccgacgctctccgtccagcagacacctgaaggtagcctgcttgcccgctgggagcccccagctggcaccgctgaggaccaagtcctgggctaccgactgcagtttgggcgggaagactccactcccttagccaccctcgagtttcctcccagcgaggaccgctacacagcctctggtgtgcataagggggctacgtacgtgttccgactggccgcccggtcacggggcggtctcggcgaggaggcagccgaagtcttatccattccagaggacacgccccgggggcatcctcaaattctggaggctgccggcaacgcttccgcaggaaccgtcctgctcaggtggctaccccccgtaccagctgagcggaatggcgctatagtcaaatacaccgttgctgttcgtgaagccggcgctctcggccctgcgcgtgaaactgagctgcccgccgccgccgagcccggcgcagagaacgccttgaccctccagggactaaaacccgacacagcgtacgatctgcaggtcagagctcacactcggcgggggccaggccctttcagcccccctgtacggtaccgtacatttttgagagaccaggtgtctcccaagaatttcaaagtgaagatgatcatgaagacttcagtgctgctttcctgggagtttccagataattataactcgcccaccccatacaaaattcagtacaatggactcaccctcgatgtggacggccgcacaaccaagaagctcattacccatctgaagccccacactttctacaatttcgtcctgacgaatcggggttcctcattaggcggcttacagcaaactgtcacagcctggactgcatttaatttgctgaatggaaaaccgagcgttgctcccaagcctgacgccgacgggtttataatggtctacctgccagacggacagtcaccagtccctgtgcagagctacttcatcgtcatggttcctttacggaaaagcaggggagggcagttcctcacacctttggggagccccgaggatatggacctggaggaactcatccaggacatttccagactacagcgcagatctctccgccactcaaggcagcttgaagtgcctaggccttatatagccgcgaggtttagtgtgctgccacctactttccacccgggggaccaaaaacagtacggtgggttcgacaacagggggctggaaccaggccataggtacgtgctctttgtcctggctgttctgcaaaaatcagaacctacatttgcagcttccccattttcagatccatttcagctggacaacccagatccacaaccaatcgtcgacggagaggaagggctgatctgggtgattggtcccgtgctggccgtggtgtttatcatatgcatcgtaatcgctatactactttataagaacaaaccggattcaaaacgtaaggatagcgagccccgaaccaaatgcctgcttaacaatgccgatctggcaccccatcatcccaaggatcctgttgaaatgcggaggatcaacttccagacaccagactctgggctgcgatcacctctgagagaacctggtttccatttcgagtctatgctgtctcatccgcctattcccatcgccgatatggccgaacacaccgaacgactaaaggcgaacgattcactgaaattgtcccaggaatatgaaagtatcgatccgggccagcagttcacgtgggagcattctaatctggaggtcaacaaaccaaaaaacagatacgcaaatgtgatagcctacgatcattcccgagtcattctgcagccaatcgagggtatcatggggagcgactatattaatgcaaactatgtagacggctatagatgtcaaaacgcatatatcgctactcaggggccattgcccgaaacctttggcgacttttggaggatggtttgggaacagagaagcgctacaattgtaatgatgacccgacttgaggagaaaagtcggatcaagtgtgaccaatactggccaaatcgcggtaccgaaacatacggcttcattcaggtcaccttacttgacaccatcgagttagctacattttgtgtgcggactttctccctgcataagaacggcagttcagagaaacgcgaggtgcgccagttccagttcacagcatggcccgaccacggcgtaccagaatatcctaccccgttcttagcattcttaagacgggttaaaacttgtaatccacccgacgccggacctatcgttgtacactgctccgcaggcgtgggcaggaccgggtgctttattgtgatagacgccatgctagaaaggatcaaacctgagaaaactgttgatgtgtatggccatgttacactcatgagaagccaaagaaactatatggtccagactgaggaccagtattcctttattcacgaggccctgctcgaggccgtaggatgtggaaataccgaggtccctgcccgcagcttgtacgcctacatacagaagctcgcacaggttgaaccgggtgaacacgtcactggaatggagctggagttcaaaaggttagcaaattcaaaagcccacacaagccggttcatatctgctaacctgccttgcaataaattcaagaaccgattagtcaatattatgccatacgaaagcaccagagtgtgcctgcagccaataaggggggtggaaggctcagactatatcaatgcttcttttattgatggttaccggcaacagaaagcctacatagccacccaggggcctctcgctgaaactactgaagacttttggcggatgctgtgggagaataatagcacaatcgttgtgatgctgaccaaactgcgtgagatggggcgtgagaaatgccaccaatactggccagctgagaggtctgcacggtaccagtacttcgttgttgatcccatggcggaatataacatgccccaatacattctaagggaatttaaagtgaccgacgcaagggatggccaatccagaacagtccgccagtttcaattcacagattggcccgaacagggggttcctaaaagcggagagggatttatcgattttattggccaagtgcacaagaccaaggagcagttcggtcaggacggacctatcagcgtccactgcagcgctggggtgggcagaactggtgtattcataactctgtctatcgtacttgagagaatgcgatacgaaggcgtcgtggacatattccagacagtgaagatgctgcgcacacagaggcctgctatggtccagacagaagacgagtaccaattttgctatcaggctgcactggagtatctcggctcgtttgaccattatgctacctag

SEQ ID NO: 294903 - DNA, 5819 bp, Artificial Sequence
  derived and/or modified sequence
atggctcccacctgggggcctggtatggtttcagtggttggaccgatgggcctcctggtagttctcctggtgggcggttgtgccgctgaagaaccacccaggttcattaaagaaccgaaagatcagataggggtgtcgggaggagtagcgtcattcgtatgtcaggccactggagaccctaaacccagggtgacgtggaacaagaagggaaaaaaggtgaacagccaaaggttcgagacgatagagttcgacgaatctgctggggcagtgctcaggattcagccgttgagaaccccacgagacgagaacgtctacgagtgtgtagcacaaaacagcgtaggtgagatcaccgtgcacgcaaaacttactgtcctcagggaggaccaactgccatcaggcttccccaatatcgacatgggtcctcaattaaaggtggttgagcgaaccagaacagctacaatgttgtgcgccgcttccggcaaccctgacccagaaattacgtggtttaaagatttcctgccagtggatccctcagcctctaatggccgaatcaagcagctcagatccgatcaggccttttcacaccttcctaccggcgcattgcagattgaatcgtcggaagagacagatcagggtaagtatgagtgtgttgctacaaactctgccggagtgcggtactcctctcccgcaaacctgtatgttagagtctggcggacagtaagacgggtggccccaaggttttccattctgcctatgtctcatgaaataatgcctgggggaaacgtgaatattacatgcgtggcagttggatctccaatgccctacgtgaagtggatgcagggcgcagaggatctcacgcccgaagacgatatgccagtgggacgaaacgtgcttgaactgaccgacgtgaaggattctgcaaattacacgtgtgtagccatgagctcgctgggggttattgaagccgtggcccagattaccgtgaaaagtctcccaaaggcgcctggtacgcccatggtcaccgaaaataccgccacatccataaccataacttgggacagtggtaaccccgaccccgtgagttactatgtcatcgagtacaaatcaaagtctcaggatgggccttatcagattaaggaggacattacaaccacccgctactctatcggtggtctcagtcctaatagcgagtacgaaatctgggtatcagccgtgaacagtattgggcagggtcccccaagtgaaagcgtcgtcaccagaaccggagagcaggcccctgctagtgcccctagaaatgtgcaggctcgcatgctaagtgcgactaccatgatcgttcagtgggaagaacctgtagagcccaacggacttatccgcggttatcgcgtgtactataccatggaaccagagcaccctgtgggcaactggcagaagcataatgtggacgatagcctgctgacaaccgtgggctccctgcttgaggacgagacatacactgtgagagtgcttgcctttacctctgtgggtgacggtcccctgtccgatcccattcaagtgaaaacccagcagggcgtgccgggtcagccaatgaatctccgggctgaggcacggtccgagacctcaatcaccctgtcctggtccccacccagacaagagagcatcatcaagtatgagttgctgttccgagaaggtgaccatgggcgtgaggtcgggagaacgttcgaccccacgacctcctatgtggtcgaggacttaaagcccaataccgagtacgcctttagactggcggctaggtcaccacaaggtcttggcgcttttacacccgtggtacgccaaaggacactgcagagtaagccctcagcacctccccaggatgtcaagtgtgttagcgtgcggtctacagcaatcttagtgtcatggcgcccacctcccccagagacacacaacggcgctctggtgggatactctgttcggtaccgacctttaggctctgaggatcccgagccaaaagaagtgaacggcattcctccaaccacaactcagattctgcttgaggcactagaaaagtggacacagtacaggataactaccgttgcccacaccgaggttgggccaggtcctgaaagtagccctgtggtggtacgcaccgatgaggatgtgcccagtgcccctcccaggaaggtcgaagccgaagccctcaacgctactgctatacgggtcctgtggaggtcgcccgctcctggtagacaacacggccaaataaggggttaccaggtgcactatgtgcgaatggagggagccgaagcccgaggcccaccgcgaatcaaggatgtcatgctcgcggatgcccaggaaatggtgatcacgaatctccagccagaaactgcttatagcattacggtggctgcatataccatgaaaggcgatggagccagatccaagcctaaggtggtcgtcacaaaaggcgcagtgctaggtagacctactctgagcgtgcagcagacaccggagggctccttactcgctcgatgggagcctcctgcagggacagctgaagaccaggttctggggtataggctgcagtttggcagggaagattccactcccctagcaactctggaatttcctccgagcgaggatcggtatactgcttcaggcgtgcacaaaggagcgacttatgtatttcgcttggccgctcgttccagaggcggactgggggaggaagcagctgaggttctctctatacccgaggataccccgcgaggccatccccagatcctggaggccgcaggaaacgcaagtgcaggcactgtgctgctgcgctggctgcctccagttcctgctgaaagaaacggggctatagtgaaatacactgtggcagtccgcgaggctggcgcactagggccagctcgcgagactgaactgccagccgcagctgagcccggtgctgaaaacgctctcacactgcagggtcttaagcctgatactgcctacgatctgcaggtgcgagcacacaccagacgcggtcccggaccattcagtccacctgtgcgttaccgaaccttcctgagagaccaagtctctccaaagaacttcaaggttaagatgatcatgaagacgagcgtgctgctaagttgggagttcccggataattacaattctccaaccccttacaaaatccaatacaatggtttgacgctggatgtggatggcagaacaaccaagaaattgataacccatctcaagccccacaccttttacaatttcgtgctgaccaaccgaggctcatccctgggcggattgcagcagactgtgactgcatggacagcttttaacttactaaacggcaagccttcggtggctcccaagcccgatgcggacggttttattatggtatatctacctgacgggcagtccccagtgcctgtacagagctatttcatcgtaatggtccctcttaggaagtcacgagggggacagttcctcactccactcggttctcctgaggatatggacttggaagagctcatccaagacatcagtagactgcagaggcggtccctacggcactccagacagctcgaagtgccacggccatacatagccgcaaggttcagcgttctgccaccgaccttccaccctggagatcagaaacagtatgggggattcgacaaccgaggactcgagccagggcatagatatgtactttttgtcctggccgtgctgcagaagagcgaacctacgttcgcagccagtcccttcagtgacccctttcagctcgataaccctgatccccagccgatcgtcgatggtgaggaggggctaatatgggtgatcggtcctgtgctcgccgtggttttcataatatgtatcgttatagccatcctcctatataagaacaagccagatagtaaacggaaggattctgagcctcggactaaatgtctgctgaacaatgctgatctcgcacctcaccaccctaaggacccagtagagatgagaagaattaactttcagacacccgatagcggcctcagatccccgctgcgcgaaccgggatttcacttcgagtccatgcttagccatcctcctattcctatcgccgacatggccgaacacacagaacgacttaaagccaacgacagtctgaaactgagtcaggagtacgaatctattgaccctgggcagcagtttacctgggagcactccaatctggaggtaaataagccaaagaatagatatgctaacgtgatcgcatacgaccactccagagtaatcctgcaaccgatcgagggcatcatggggtcagactatataaacgcaaattatgtagacggttacagatgccagaacgcttacatcgccacccaggggcctctaccagagacattcggcgatttttggaggatggtatgggaacagagatctgcgactatcgttatgatgacccggctggaggaaaaaagccgaataaagtgcgaccagtattggccaaaccgaggcactgaaacttacgggtttatacaggttacgctacttgacactattgaactcgcgactttctgcgtccgtactttctccttacacaaaaatggcagcagcgagaagagggaagtcaggcaattccagttcacagcttggcccgatcacggagttcctgagtaccccacaccttttctggccttcctgcgacgtgtgaaaacatgtaacccccctgatgcagggcctatcgtcgttcactgcagtgccggagtggggagaacaggctgcttcatagtgatcgacgcaatgctggagcggattaaacctgagaagaccgtagacgtatacggtcatgtcacgcttatgagatcccagagaaattacatggtgcagaccgaagaccagtactcgtttatccatgaggcgctactggaagccgtgggatgtggtaatactgaggtaccagcccgatctctctacgcctacatccagaaactggcgcaggtggaaccaggggagcacgtcacgggtatggaactagaatttaaacggctggcaaactctaaagctcatacatccaggttcatctcagccaatcttccctgtaataagtttaagaatcggctggtcaatattatgccctacgaaagcacacgcgtatgtctccagccaattcgcggagtagaaggctctgattatatcaatgccagcttcatcgacggatatcgccaacagaaggcttacatcgccacccaagggccattggctgaaactaccgaagatttttggcggatgctttgggagaacaacagtaccatcgttgttatgctcacgaagttgagggagatgggcagggaaaagtgtcaccagtattggcccgctgagaggagtgccagataccagtatttcgtagtggaccctatggccgaatacaatatgcctcaatacatcttgcgcgagttcaaagttactgatgcaagagacggtcaatcccgcacagtccgacagtttcaattcaccgactggcctgagcagggtgtaccaaaaagcggtgaaggttttatcgattttatcggccaggttcacaagacgaaggaacagttcggtcaggacggtccaatctctgtgcactgttccgcgggtgtgggcagaaccggagtgttcatcaccctatcgattgtgcttgaaagaatgaggtacgagggagtcgttgacatattccagaccgtcaagatgctgagaacccagcgcccagctatggtgcagacggaagatgagtatcagttctgctaccaggccgctttagaatatctgggttcattcgaccactatgcaaccta

SEQ ID NO: 294904 - DNA, 7320 bp, Artificial Sequence
  derived and/or modified sequence
cctcgcgccgcccgcccggcagcccggccggcgcgcgcacgccgcgagccgctggcgctcgggctccgctcggatcccatgcaacagccacgatgtgaagcggggcagagccgggggagcccagcccagccagcctccagacgttgccccatctgacgctcggctcgaggcctctctgtgagggaccggggggccatccccctccagggcggagatcggaggtcgctgccaagcatggcgcccacctggggccctggcatggtgtctgtggttggtcccatgggcctccttgtggtcctgctcgttggaggctgtgcagcagaagagccccccaggtttatcaaagaacccaaggaccagatcggcgtgtcggggggtgtggcctctttcgtgtgtcaggccacgggtgaccccaagccacgagtgacctggaacaagaagggcaagaaggtcaactctcagcgctttgagacgattgagtttgatgagagtgcaggggcagtgctgaggatccagccgctgaggacaccgcgggatgaaaacgtgtacgagtgtgtggcccagaactcggttggggagatcacagtccatgccaagcttactgtcctccgagaggaccagctgccctctggcttccccaacatcgacatgggcccacagttgaaggtggtggagcggacacggacagccaccatgctctgtgcagccagcggcaaccctgaccctgagatcacctggttcaaggacttcctgcctgtggatcctagtgccagcaatggacgcatcaaacagctgcgatcagaccaagctttttcccatcttcccacaggagccctgcagattgaaagcagtgaggaaaccgaccagggcaaatatgagtgtgtggccaccaacagcgccggcgtgcgctactcctcacctgccaacctctacgtgcgagtttggagaacagtccgccgcgtggccccgcgcttctccatcctgcccatgagccacgagatcatgccagggggcaacgtgaacatcacctgcgtggccgtgggctcgcccatgccatacgtgaagtggatgcagggggccgaggacctgacccccgaggatgacatgcccgtgggtcggaacgtgctggaactcacagatgtcaaggactcggccaactacacctgcgtggccatgtccagcctgggcgtcattgaggcggttgctcagatcacggtgaaatctctccccaaagctcccgggactcccatggtgactgagaacacagccaccagcatcaccatcacgtgggactcgggcaacccagatcctgtgtcctattacgtcatcgaatataaatccaagagccaagacgggccgtatcagattaaagaggacatcaccaccacacgttacagcatcggcggcctgagccccaactcggagtacgagatctgggtgtcggccgtcaactccatcggccaggggccccccagcgagtccgtggtcacccgcacaggcgagcaggccccggccagcgcgccgcggaacgtgcaagcccggatgctcagcgcgaccaccatgattgtgcagtgggaggagccggtggagcccaacggcctgatccgcggctaccgcgtctactacaccatggaaccggagcaccccgtgggcaactggcagaagcacaacgtggacgacagcctgctgaccaccgtgggcagcctgctggaggacgagacctacaccgtgcgggtgctcgccttcacctccgtcggcgacgggcccctctcggaccccatccaggtcaagacgcagcagggagtgccgggccagcccatgaacctgcgggccgaggccaggtcggagaccagcatcacgctgtcctggagccccccgcggcaggagagtatcatcaagtacgagctcctcttccgggaaggcgaccatggccgggaggtgggaaggaccttcgacccgacgacttcctacgtggtggaggacctgaagcccaacacggagtacgccttccgcctggcggcccgctcgccgcagggcctgggcgccttcacccccgtggtgcggcagcgcacgctgcagtccaaaccgtcagccccccctcaagacgttaaatgtgtcagcgtgcgctccacggccattttggtaagttggcgcccgccgccgccggaaacgcacaacggggccctggtgggctacagcgtccgctaccgaccgctgggctcagaggacccggaacccaaggaggtgaacggcatccccccgaccaccactcagatcctgctggaggccttggagaagtggacccagtaccgcatcacgactgtcgctcacacagaggtgggaccagggcccgagagctcgcccgtggtcgtccgcaccgacgaggatgtgcccagcgcgccgccgcggaaggtggaggcggaggcgctcaacgccacggccatccgcgtgctgtggcgctcgcccgcgcccggccggcagcacggccagatccgcggctaccaggtccactacgtgcgcatggagggcgccgaggcccgcgggccgccgcgcatcaaggacgtcatgctggccgatgcccaggagatggtcatcacaaacttgcagcctgagaccgcgtactccatcacggtagccgcctacaccatgaagggcgatggcgctcgcagcaaacccaaggtggttgtgaccaagggagcagtgctgggccgcccaaccctgtcggtgcagcagacccccgagggcagcctgctggcacgctgggagcccccggctggcaccgcggaggaccaggtgctgggctaccgcctgcagtttggccgtgaggactcgacgcccctggccaccctggagttcccgccctccgaggaccgctacacggcatcaggcgtgcacaagggggccacgtatgtgttccggcttgcggcccggagccgcggcggcctgggcgaggaggcagccgaggtcctgagcatcccggaggacacgccccgtggccacccgcagattctggaggcggccggcaacgcctcggccgggaccgtccttctccgctggctgccacccgtgcccgccgagcgcaacggggccatcgtcaaatacacggtggccgtgcgggaggccggtgccctgggccctgcccgagagactgagctgccggcagcggctgagccgggcgcggagaacgcgctcacgctgcagggcctgaagcccgacacggcctatgacctccaagtgcgagcccacacgcgccggggccctggccccttcagcccccccgtccgctaccggacgttcctgcgggaccaagtctcgcccaagaacttcaaggtgaaaatgatcatgaagacatcagttctgctcagctgggagttccctgacaactacaactcacccacaccctacaagatccagtacaatgggctcacactggatgtggatggccgtaccaccaagaagctcatcacgcacctcaagccccacaccttctacaactttgtgctgaccaatcgcggcagcagcctgggcggcctccagcagacggtcaccgcctggactgccttcaacctgctcaacggcaagcccagcgtcgcccccaagcctgatgctgacggcttcatcatggtgtatcttcctgacggccagagccccgtgcctgtccagagctatttcattgtgatggtgccactgcgcaagtctcgtggaggccaattcctgaccccgctgggtagcccagaggacatggatctggaagagctcatccaggacatctcacggctacagaggcgcagcctgcggcactcgcgtcagctggaggtgccccggccctatattgcagctcgcttctctgtgctgccacccacgttccatcccggcgaccagaagcagtatggcggcttcgataaccggggcctggagcccggccaccgctatgtcctcttcgtgcttgccgtgcttcagaagagcgagcctacctttgcagccagtcccttctcagaccccttccagctggataacccggacccccagcccatcgtggatggcgaggaggggcttatctgggtgatcgggcctgtgctggccgtggtcttcataatctgcattgtcattgctatcctgctctacaagaacaaacccgacagtaaacgcaaggactcagaaccccgcaccaaatgcctcctgaacaatgccgacctcgcccctcaccaccccaaggaccctgtggaaatgagacgcattaacttccagactccagattcaggcctcaggagccccctcagggagccggggtttcactttgaaagcatgcttagccacccgccaattcccatcgcagacatggcggagcacacggagcggctcaaggccaacgacagcctcaagctctcccaggagtatgagtccatcgaccctggacagcagttcacatgggaacattccaacctggaagtgaacaagccgaagaaccgctatgccaacgtcatcgcctatgaccactcccgtgtcatcctccagcccattgaaggcatcatgggcagtgattacatcaatgccaactacgtggacggctaccggtgtcagaacgcgtacattgccacgcaggggccgctgcctgagacctttggggacttctggcgtatggtgtgggagcagcggtcggcgaccatcgtcatgatgacgcggctggaggagaagtcacggatcaagtgtgatcagtattggcccaacagaggcacggagacctacggcttcatccaggtcacgttgctagataccatcgagctggccacattctgcgtcaggacattctctctgcacaagaatggctccagtgagaaacgcgaggtccgccagttccagtttacggcgtggccggaccatggcgtgcccgaatacccaacgcccttcctggctttcctgcggagagtcaagacctgcaacccgccagatgccggccccatcgtggttcactgcagtgccggtgtgggccgcacaggctgctttatcgtcatcgacgccatgcttgagcggatcaagccagagaagacagtcgatgtctatggccacgtgacgctcatgaggtcccagcgcaactacatggtgcagacggaggaccagtacagcttcatccacgaggccctgctggaggccgtgggctgtggcaacacagaagtgcccgcacgcagcctctatgcctacatccagaagctggcccaggtggagcctggcgaacacgtcactggcatggaactcgagttcaagcggctggctaactccaaggcccacacgtcacgcttcatcagtgccaatctgccttgtaacaagttcaagaaccgcctggtgaacatcatgccctatgagagcacacgggtctgtctgcaacccatccggggtgtggagggctctgactacatcaacgccagcttcattgatggctacaggcagcagaaggcctacatcgcgacacaggggccgctggcggagaccacggaagacttctggcgcatgctgtgggagaacaattcgacgatcgtggtgatgctgaccaagctgcgggagatgggccgggagaagtgtcaccagtactggccggccgagcgctctgcccgctaccagtactttgtggtagatccgatggcagaatacaacatgcctcagtatatcctgcgagagttcaaggtcacagatgcccgggatggccagtcccggactgtccggcagttccagttcacagactggccggaacagggtgtgccaaagtcgggggagggcttcatcgacttcattggccaagtgcataagactaaggagcagtttggccaggacggccccatctctgtccactgcagtgccggcgtgggcaggacgggcgtcttcatcacgcttagcatcgtgctggagcggatgcggtatgaaggcgtggtggacatctttcagacggtgaagatgctacgaacccagcggccggccatggtgcagacagaggatgagtaccagttctgttaccaggcggcactggagtacctcggaagctttgaccactatgcaacctaaagccatggttccccccaggcccgacaccactggccccggatgcctctgcccctcccgggcggacctcctgaggcctggacccccagtgggcagggcaggaggtggcagcggcagcagctgtgtttctgcaccatttccgaggacgacgcagcccctcgagcccccccaccggccccggccgccccagcgacctccctggcaccggccgccgccttcaaatacttggcacattcctcctttccttccaattccaaaaccagattccggggtggggggtggggggatggtgagcaaataggagtgctccccagaaccagaggagggtggggcacagaccatagacggacccctcgtcctcccccagcggtggtagggggacccggggggctcctccccgctctgcagcctggggacactgggctgggaccagaatccagctttcttttaaaactctcagtgtaactgtatcccgtgacatttcattttttttaaatagtgtatttttttttccatttttttttttaagagaaacaaacaaaagactcgccagtcaatgactttcaaagagaactaactttggcttattcatattctgttcaaagacagtctattttttcactgtagaaagcgtccttgtgtgatagttacgttcgcaaacgcgcacgccaggcccatggctgtaccttggcttttttttttttttttttttttttaatttttcctaccatcagaaagtgtgctttgctcacagaagaatgggatgtccttttttctttcttggctttttttttccccctttttgtttcatttttataaattaaattttcagacatatcaaatacagttctgagggtaaggtcatgggggagctcggacccagtggcgttgggtgcggttgagggggacgctgctgtaagaggagagagatgacagtggtcctcctctgagagcctgagctgtctccccgtctcccgcccccaaggagacagagaggatcctacttcttcggggacagtggctgtatggctgtgctgccccacatcagggaccctttccccctgggactgtggggcagtttgggagcaaaaccagaaggacaggcccccctctacccgcctaccctgagcaagcgagttgttcctctttgtacaagggcaggtctgcggttactttcaacactgtttattccagcggaagcagccgggtggttttcccacccccgtgtatgtagatatatcgactttgtattaaaggaagatcgtctga

SEQ ID NO: 294905 - DNA, 5820 bp, Artificial Sequence
  derived and/or modified sequence
atggcccccacctggggccccggcatggtgagcgtggtgggccccatgggcctgctggtggtgctgctggtgggcggctgcgccgccgaggagccccccagattcatcaaggagcccaaggaccagatcggcgtgagcggcggcgtggccagcttcgtgtgccaggccaccggcgaccccaagcccagagtgacctggaacaagaagggcaagaaggtgaacagccagagattcgagaccatcgagttcgacgagagcgccggcgccgtgctgagaatccagcccctgagaacccccagagacgagaacgtgtacgagtgcgtggcccagaacagcgtgggcgagatcaccgtgcacgccaagctgaccgtgctgagagaggaccagctgcccagcggcttccccaacatcgacatgggcccccagctgaaggtggtggagagaaccagaaccgccaccatgctgtgcgccgccagcggcaaccccgaccccgagatcacctggttcaaggacttcctgcccgtggaccccagcgccagcaacggcagaatcaagcagctgagaagcgaccaggccttcagccacctgcccaccggcgccctgcagatcgagagcagcgaggagaccgaccagggcaagtacgagtgcgtggccaccaacagcgccggcgtgagatacagcagccccgccaacctgtacgtgagagtgtggagaaccgtgagaagagtggcccccagattcagcatcctgcccatgagccacgagatcatgcccggcggcaacgtgaacatcacctgcgtggccgtgggcagccccatgccctacgtgaagtggatgcagggcgccgaggacctgacccccgaggacgacatgcccgtgggcagaaacgtgctggagctgaccgacgtgaaggacagcgccaactacacctgcgtggccatgagcagcctgggcgtgatcgaggccgtggcccagatcaccgtgaagagcctgcccaaggcccccggcacccccatggtgaccgagaacaccgccaccagcatcaccatcacctgggacagcggcaaccccgaccccgtgagctactacgtgatcgagtacaagagcaagagccaggacggcccctaccagatcaaggaggacatcaccaccaccagatacagcatcggcggcctgagccccaacagcgagtacgagatctgggtgagcgccgtgaacagcatcggccagggcccccccagcgagagcgtggtgaccagaaccggcgagcaggcccccgccagcgcccccagaaacgtgcaggccagaatgctgagcgccaccaccatgatcgtgcagtgggaggagcccgtggagcccaacggcctgatcagaggctacagagtgtactacaccatggagcccgagcaccccgtgggcaactggcagaagcacaacgtggacgacagcctgctgaccaccgtgggcagcctgctggaggacgagacctacaccgtgagagtgctggccttcaccagcgtgggcgacggccccctgagcgaccccatccaggtgaagacccagcagggcgtgcccggccagcccatgaacctgagagccgaggccagaagcgagaccagcatcaccctgagctggagcccccccagacaggagagcatcatcaagtacgagctgctgttcagagagggcgaccacggcagagaggtgggcagaaccttcgaccccaccaccagctacgtggtggaggacctgaagcccaacaccgagtacgccttcagactggccgccagaagcccccagggcctgggcgccttcacccccgtggtgagacagagaaccctgcagagcaagcccagcgcccccccccaggacgtgaagtgcgtgagcgtgagaagcaccgccatcctggtgagctggagaccccccccccccgagacccacaacggcgccctggtgggctacagcgtgagatacagacccctgggcagcgaggaccccgagcccaaggaggtgaacggcatcccccccaccaccacccagatcctgctggaggccctggagaagtggacccagtacagaatcaccaccgtggcccacaccgaggtgggccccggccccgagagcagccccgtggtggtgagaaccgacgaggacgtgcccagcgccccccccagaaaggtggaggccgaggccctgaacgccaccgccatcagagtgctgtggagaagccccgcccccggcagacagcacggccagatcagaggctaccaggtgcactacgtgagaatggagggcgccgaggccagaggcccccccagaatcaaggacgtgatgctggccgacgcccaggagatggtgatcaccaacctgcagcccgagaccgcctacagcatcaccgtggccgcctacaccatgaagggcgacggcgccagaagcaagcccaaggtggtggtgaccaagggcgccgtgctgggcagacccaccctgagcgtgcagcagacccccgagggcagcctgctggccagatgggagccccccgccggcaccgccgaggaccaggtgctgggctacagactgcagttcggcagagaggacagcacccccctggccaccctggagttcccccccagcgaggacagatacaccgccagcggcgtgcacaagggcgccacctacgtgttcagactggccgccagaagcagaggcggcctgggcgaggaggccgccgaggtgctgagcatccccgaggacacccccagaggccacccccagatcctggaggccgccggcaacgccagcgccggcaccgtgctgctgagatggctgccccccgtgcccgccgagagaaacggcgccatcgtgaagtacaccgtggccgtgagagaggccggcgccctgggccccgccagagagaccgagctgcccgccgccgccgagcccggcgccgagaacgccctgaccctgcagggcctgaagcccgacaccgcctacgacctgcaggtgagagcccacaccagaagaggccccggccccttcagcccccccgtgagatacagaaccttcctgagagaccaggtgagccccaagaacttcaaggtgaagatgatcatgaagaccagcgtgctgctgagctgggagttccccgacaactacaacagccccaccccctacaagatccagtacaacggcctgaccctggacgtggacggcagaaccaccaagaagctgatcacccacctgaagccccacaccttctacaacttcgtgctgaccaacagaggcagcagcctgggcggcctgcagcagaccgtgaccgcctggaccgccttcaacctgctgaacggcaagcccagcgtggcccccaagcccgacgccgacggcttcatcatggtgtacctgcccgacggccagagccccgtgcccgtgcagagctacttcatcgtgatggtgcccctgagaaagagcagaggcggccagttcctgacccccctgggcagccccgaggacatggacctggaggagctgatccaggacatcagcagactgcagagaagaagcctgagacacagcagacagctggaggtgcccagaccctacatcgccgccagattcagcgtgctgccccccaccttccaccccggcgaccagaagcagtacggcggcttcgacaacagaggcctggagcccggccacagatacgtgctgttcgtgctggccgtgctgcagaagagcgagcccaccttcgccgccagccccttcagcgaccccttccagctggacaaccccgacccccagcccatcgtggacggcgaggagggcctgatctgggtgatcggccccgtgctggccgtggtgttcatcatctgcatcgtgatcgccatcctgctgtacaagaacaagcccgacagcaagagaaaggacagcgagcccagaaccaagtgcctgctgaacaacgccgacctggccccccaccaccccaaggaccccgtggagatgagaagaatcaacttccagacccccgacagcggcctgagaagccccctgagagagcccggcttccacttcgagagcatgctgagccacccccccatccccatcgccgacatggccgagcacaccgagagactgaaggccaacgacagcctgaagctgagccaggagtacgagagcatcgaccccggccagcagttcacctgggagcacagcaacctggaggtgaacaagcccaagaacagatacgccaacgtgatcgcctacgaccacagcagagtgatcctgcagcccatcgagggcatcatgggcagcgactacatcaacgccaactacgtggacggctacagatgccagaacgcctacatcgccacccagggccccctgcccgagaccttcggcgacttctggagaatggtgtgggagcagagaagcgccaccatcgtgatgatgaccagactggaggagaagagcagaatcaagtgcgaccagtactggcccaacagaggcaccgagacctacggcttcatccaggtgaccctgctggacaccatcgagctggccaccttctgcgtgagaaccttcagcctgcacaagaacggcagcagcgagaagagagaggtgagacagttccagttcaccgcctggcccgaccacggcgtgcccgagtaccccacccccttcctggccttcctgagaagagtgaagacctgcaacccccccgacgccggccccatcgtggtgcactgcagcgccggcgtgggcagaaccggctgcttcatcgtgatcgacgccatgctggagagaatcaagcccgagaagaccgtggacgtgtacggccacgtgaccctgatgagaagccagagaaactacatggtgcagaccgaggaccagtacagcttcatccacgaggccctgctggaggccgtgggctgcggcaacaccgaggtgcccgccagaagcctgtacgcctacatccagaagctggcccaggtggagcccggcgagcacgtgaccggcatggagctggagttcaagagactggccaacagcaaggcccacaccagcagattcatcagcgccaacctgccctgcaacaagttcaagaacagactggtgaacatcatgccctacgagagcaccagagtgtgcctgcagcccatcagaggcgtggagggcagcgactacatcaacgccagcttcatcgacggctacagacagcagaaggcctacatcgccacccagggccccctggccgagaccaccgaggacttctggagaatgctgtgggagaacaacagcaccatcgtggtgatgctgaccaagctgagagagatgggcagagagaagtgccaccagtactggcccgccgagagaagcgccagataccagtacttcgtggtggaccccatggccgagtacaacatgccccagtacatcctgagagagttcaaggtgaccgacgccagagacggccagagcagaaccgtgagacagttccagttcaccgactggcccgagcagggcgtgcccaagagcggcgagggcttcatcgacttcatcggccaggtgcacaagaccaaggagcagttcggccaggacggccccatcagcgtgcactgcagcgccggcgtgggcagaaccggcgtgttcatcaccctgagcatcgtgctggagagaatgagatacgagggcgtggtggacatcttccagaccgtgaagatgctgagaacccagagacccgccatggtgcagaccgaggacgagtaccagttctgctaccaggccgccctggagtacctgggcagcttcgaccactacgccacctag

SEQ ID NO: 294906 - protein, 1928 aa, Artificial Sequence
  derived and/or modified sequence
MAPTWGPGMVSVVGPMGLLVVLLVGGCAAEEPPRFIKEPKDQIGVSGGVASFVCQATGDPKPRVTWNKKGKKVNSQRFETIEFDESAGAVLRIQPLRTPRDENVYECVAQNSVGEITVHAKLTVLREDQLPSGFPNIDMGPQLKVVERTRTATMLCAASGNPDPEITWFKDFLPVDPSASNGRIKQLRSDQAFSHLPTGALQIESSEETDQGKYECVATNSAGVRYSSPANLYVRVRRVAPRFSILPMSHEIMPGGNVNITCVAVGSPMPYVKWMQGAEDLTPEDDMPVGRNVLELTDVKDSANYTCVAMSSLGVIEAVAQITVKSLPKAPGTPMVTENTATSITITWDSGNPDPVSYYVIEYKSKSQDGPYQIKEDITTTRYSIGGLSPNSEYEIWVSAVNSIGQGPPSESVVTRTGEQAPASAPRNVQARMLSATTMIVQWEEPVEPNGLIRGYRVYYTMEPEHPVGNWQKHNVDDSLLTTVGSLLEDETYTVRVLAFTSVGDGPLSDPIQVKTQQGVPGQPMNLRAEARSETSITLSWSPPRQESIIKYELLFREGDHGREVGRTFDPTTSYVVEDLKPNTEYAFRLAARSPQGLGAFTPVVRQRTLQSKPSAPPQDVKCVSVRSTAILVSWRPPPPETHNGALVGYSVRYRPLGSEDPEPKEVNGIPPTTTQILLEALEKWTQYRITTVAHTEVGPGPESSPVVVRTDEDVPSAPPRKVEAEALNATAIRVLWRSPAPGRQHGQIRGYQVHYVRMEGAEARGPPRIKDVMLADAQWETDDTAEYEMVITNLQPETAYSITVAAYTMKGDGARSKPKVVVTKGAVLGRPTLSVQQTPEGSLLARWEPPAGTAEDQVLGYRLQFGREDSTPLATLEFPPSEDRYTASGVHKGATYVFRLAARSRGGLGEEAAEVLSIPEDTPRGHPQILEAAGNASAGTVLLRWLPPVPAERNGAIVKYTVAVREAGALGPARETELPAAAEPGAENALTLQGLKPDTAYDLQVRAHTRRGPGPFSPPVRYRTFLRDQVSPKNFKVKMIMKTSVLLSWEFPDNYNSPTPYKIQYNGLTLDVDGRTTKKLITHLKPHTFYNFVLTNRGSSLGGLQQTVTAWTAFNLLNGKPSVAPKPDADGFIMVYLPDGQSPVPVQSYFIVMVPLRKSRGGQFLTPLGSPEDMDLEELIQDISRLQRRSLRHSRQLEVPRPYIAARFSVLPPTFHPGDQKQYGGFDNRGLEPGHRYVLFVLAVLQKSEPTFAASPFSDPFQLDNPDPQPIVDGEEGLIWVIGPVLAVVFIICIVIAILLYKNKPDSKRKDSEPRTKCLLNNADLAPHHPKDPVEMRRINFQTPGMLSHPPIPIADMAEHTERLKANDSLKLSQEYESIDPGQQFTWEHSNLEVNKPKNRYANVIAYDHSRVILQPIEGIMGSDYINANYVDGYRCQNAYIATQGPLPETFGDFWRMVWEQRSATIVMMTRLEEKSRIKCDQYWPNRGTETYGFIQVTLLDTIELATFCVRTFSLHKNGSSEKREVRQFQFTAWPDHGVPEYPTPFLAFLRRVKTCNPPDAGPIVVHCSAGVGRTGCFIVIDAMLERIKPEKTVDVYGHVTLMRSQRNYMVQTEDQYSFIHEALLEAVGCGNTEVPARSLYAYIQKLAQVEPGEHVTGMELEFKRLANSKAHTSRFISANLPCNKFKNRLVNIMPYESTRVCLQPIRGVEGSDYINASFIDGYRQQKAYIATQGPLAETTEDFWRMLWENNSTIVVMLTKLREMGREKCHQYWPAERSARYQYFVVDPMAEYNMPQYILREFKVTDARDGQSRTVRQFQFTDWPEQGVPKSGEGFIDFIGQVHKTKEQFGQDGPISVHCSAGVGRTGVFITLSIVLERMRYEGVVDIFQTVKMLRTQRPAMVQTEDEYQFCYQAALEYLGSFDHYAT

SEQ ID NO: 294907 - DNA, 5787 bp, Artificial Sequence
  derived and/or modified sequence
atggcacctacatggggaccaggaatggtgtccgtggtcggtccaatgggactactagttgtgctgttggtggggggatgcgcggctgaggagccacctcgctttatcaaggagccaaaagatcagataggagtcagtgggggtgttgcgtcattcgtctgccaagctacaggggatccaaaaccccgggttacttggaataagaaaggtaaaaaagtcaactcacaaagatttgagaccatcgagtttgacgagtctgccggggcggtcctgcgaatccagcctctgaggacaccacgtgatgaaaatgtgtatgagtgcgtagcccagaattctgtcggtgagatcaccgttcatgcaaaattgactgtcctccgagaggaccagctgccttccggctttcctaacattgatatgggcccccagctcaaggtcgttgagcggacaaggacagccacaatgttgtgcgctgccagcggtaaccctgaccctgagatcacctggttcaaagattttctgcctgtggatccctcagccagcaatgggaggatcaagcagctacgatctgaccaggctttttcccacctcccgactggagctctccagatcgagtcttcagaagagactgatcaaggtaaatatgagtgcgtcgccactaactctgccggcgtgagatatagcagccctgcaaatttgtatgtgagggtccgccgcgtagcaccacgcttctcaatcttacccatgtcacatgaaattatgcccggggggaacgtgaatataacctgcgtggccgtagggtcgccgatgccctacgtgaaatggatgcagggggctgaagacttgactccggaggatgatatgcccgtcgggagaaatgtgctggagctcacagacgtcaaggactccgccaactacacatgtgtggctatgtccagcttgggcgtcatagaggcagtcgcccagataactgtgaagtctttacctaaagcccccggtactccaatggtaaccgagaataccgctacctctatcactatcacatgggactcaggtaatccagatccagtgtcttattatgtcatcgaatacaagtccaagagccaagatggaccctaccagataaaagaagatattaccaccacacggtattccataggtggattgtcacccaacagcgagtacgagatttgggtcagtgcagtgaactctattggccagggccctccatcggaaagcgtggtgacgcgtacgggcgaacaggccccagcgagtgccccccggaacgtgcaggcccggatgctatccgcaaccaccatgattgtgcaatgggaggaaccggtagagcccaatggtctaatccgggggtacagggtttactacaccatggaacccgaacatccagtgggaaattggcagaagcacaatgtcgatgatagcctcctcactaccgtaggatctttgctcgaagacgaaacctacacggttcgggtactggctttcaccagcgtcggagacggaccgctgagcgatcctatacaggttaagacacagcaaggggttcctgggcagcctatgaatttacgggcagaagccagatcggagaccagcatcaccctgagctggtcgccacccaggcaggagagtattatcaagtatgaactgctgttccgtgagggggatcacggccgtgaagtcggcaggacattcgatcccacaacatcatacgtcgtggaggatctgaagcccaacacggaatacgccttcaggctcgctgcaagaagtccacagggcctgggagcctttacccccgtcgtacgacaacgcacactccagtccaagcctagtgcgcctccacaggatgtcaagtgtgtgagcgtgagatccactgctatcctggtgagctggcggccacctccgccagaaacccacaatggagcccttgtgggatacagcgttcgctaccggcccctaggtagtgaggaccctgagccgaaagaggtgaatgggatcccacctaccacaacccaaatacttctcgaggcccttgaaaaatggacccaataccgcatcaccacagtggcccataccgaggtcgggccaggccctgaaagttcccccgtcgtggttcgcacagatgaggacgtaccatctgcccccccacggaaagtggaggccgaagcgttaaatgctacggccataagggtgttatggcggtcccctgcacccggaagacagcatggccagatccgcggatatcaggtccactacgtgaggatggaaggggccgaggctagagggcctccgcggatcaaggatgttatgctcgcagacgctcaatgggaaacagacgacactgcagagtacgaaatggtcatcactaacttgcagcccgagacggcctactcaattacagtcgccgcctacaccatgaagggagatggtgcccgtagtaagccaaaagtggttgtcactaaaggggccgtgctcggccgaccgaccttaagtgttcaacagactccagaaggatcactgttggccagatgggaacctcccgcgggaacagccgaagatcaggtgttgggctataggctgcagtttgggcgcgaagactcaactcctttggcgactctggagttcccaccatcagaagatagatatactgcttcgggggttcacaaaggtgctacctatgtctttcgcctggccgcccggagtcggggcggcctgggagaggaggccgccgaggtgctgtcaattccagaggatacccccagggggcaccctcagatcctcgaagccgcaggaaacgccagcgctggcaccgtgttactcaggtggctgccaccagtgcctgctgagagaaatggcgcaatagtgaagtatacagtagcagtgagggaggcgggcgcactcggcccagccagagaaactgaactccctgccgctgccgaacccggcgctgagaatgccctcactctgcaagggctaaagcctgataccgcctacgaccttcaggtgcgggctcatactagacgggggccgggtccatttagcccacctgtgagatacagaacattccttagggatcaggtttcccctaagaactttaaagtgaaaatgataatgaaaacctcggtgctacttagctgggagttccccgataattacaactcgccaactccctataaaattcagtataacggcttaacactggacgtggacggtagaacaacaaaaaaactgattacccatctgaagcctcacaccttctataacttcgtcttgacaaatcgagggagtagcctgggggggcttcagcagactgtcactgcatggaccgcttttaacctcctgaatgggaagccatccgtggcgcccaagccggatgctgacggattcatcatggtttacctccctgatggacagtcgcccgtgcccgtgcagtcctactttatcgtcatggtcccactgaggaaatctcggggcgggcagttcttaaccccactgggctctcctgaggacatggacctggaagaactgattcaggatatcagtaggcttcagaggcgatctctccgacactcgcggcagcttgaggtcccaaggccctacatagccgccagatttagcgttctaccccccaccttccacccaggcgaccaaaagcaatacggtggctttgataataggggtttggaacctggccacagatacgtgctctttgtgctggctgtacttcagaagtcagagcctacctttgctgcatcccccttttctgatcctttccagctcgataatccggatccacaacctatcgtggatggggaggagggtctcatctgggtgatcggacccgtgctggccgtggtctttattatttgcatcgttatcgctatactgctgtacaagaacaagccagactcaaagcggaaggatagtgagccgcgcacaaaatgcctgctgaacaacgcagacctcgcaccacatcatccgaaggatccagttgagatgaggaggatcaatttccagacaccaggaatgctgtcacaccctccaatcccgattgccgacatggctgagcatactgaaagacttaaggcgaatgactctcttaaactatcccaggaatacgagtccattgatcctggccaacagttcacctgggagcattctaatcttgaagttaacaaacctaagaaccgctatgcaaacgtgatcgcttacgaccactcccgcgtgatactccaaccaatcgaggggattatgggctccgactacatcaatgccaactacgttgacggttaccgctgccaaaatgcctacatcgccactcaggggccgctgccggagacattcggggatttctggagaatggtgtgggagcagcgctcagccactatcgtaatgatgacccgccttgaggaaaaatccagaatcaagtgtgaccaatattggccaaaccgggggactgaaacatacggattcatccaggtaactttacttgatacaattgaactcgcgactttttgcgtgagaaccttcagcctgcataaaaatggcagctctgaaaaaagagaagtacgtcagtttcagttcactgcttggcccgaccacggtgtgcccgagtacccaacaccattcctggcgtttctgcgcagggtgaagacctgcaacccgcccgacgccggacccatcgtggtccactgttcagcaggtgtgggaaggacgggatgttttatagtcatagacgccatgttagagcgtatcaagcctgagaagacagttgacgtctatggccatgtgacacttatgagatcgcagcgcaattatatggttcaaaccgaggaccagtactcattcatacacgaagccttgctggaggctgtgggttgtggtaatactgaggttccagccagaagcctgtatgcatatattcagaaattagctcaagtcgaacccggagagcatgttactggcatggagctggagttcaaacgtctagccaatagcaaagcccatactagccggttcatcagcgccaatctcccctgcaacaagttcaaaaaccgactggtgaatattatgccatacgagagcacgcgtgtgtgcctgcagcccattagaggagtcgaaggctcggactacataaacgcttcttttatcgatggctaccgtcagcagaaggcttatatcgcgactcagggacccttagccgaaacgaccgaggatttctggaggatgctttgggaaaacaatagcacaatcgttgtcatgctgacaaagctacgggagatgggccgtgaaaagtgccatcagtattggcctgcagaaaggagcgcacgctatcagtacttcgtcgttgaccccatggccgaatacaacatgccacagtacattttaagggagtttaaggttaccgacgccagagacggacaatcaagaacggtcaggcagttccaattcaccgattggcccgagcagggagttcctaaatctggcgagggattcatcgacttcattggacaagtgcataaaaccaaggaacagttcgggcaggatggcccaatctcagtccactgctctgcaggtgtggggagaaccggagtgttcataaccctctcaatagtgttggagcgtatgcggtacgagggggtggtggacatattccagactgtcaagatgctacggacacagaggccagctatggtacagactgaggatgaataccagttctgttatcaagcggccttagaatacctcgggagctttgaccactatgccacgtag

SEQ ID NO: 294908 - DNA, 5787 bp, Artificial Sequence
  derived and/or modified sequence
atggcccccacctggggccctggcatggtgtctgtggtgggccccatgggcctgctggtggtgctgctggtgggcggctgtgccgctgaggagcccccacgcttcatcaaggagcccaaggaccagattggagtgtctgggggcgtggccagctttgtgtgccaggccactggagaccccaagccccgggtgacctggaacaagaagggcaagaaggtgaacagccagagatttgagaccattgaatttgatgagagcgctggagctgtgctgcgcatccagcccctgcggaccccaagagatgaaaatgtgtatgaatgtgtggcccagaacagcgtgggggagatcaccgtgcacgccaagctgactgtgctgcgggaggaccagctgcccagcggcttccccaacatcgacatgggcccccagctgaaggtggtggagaggaccaggacagccaccatgctgtgtgccgccagcggcaacccagaccctgagatcacctggttcaaggacttcctgcctgtggaccccagcgccagcaatggccgcatcaagcagctgcggagtgaccaggccttcagccacctgcccaccggggccctgcagatcgagagcagcgaggagacagaccagggcaagtatgaatgtgtggccaccaacagcgctggggtgcgctacagcagccctgccaacctgtatgtgcgggtgagaagagtggccccccgcttcagcatcctgcccatgagccatgagatcatgcctggaggaaatgtgaacatcacctgtgtggccgtgggcagccccatgccctacgtgaagtggatgcagggcgctgaggacctgaccccagaagatgacatgcctgtgggcagaaatgtgctggagctgacagatgtgaaggacagcgccaactacacctgtgtggccatgagcagcctgggcgtcatcgaggccgtggcccagatcaccgtgaagagcctgcccaaggcccctggcacccccatggtgacagagaacacagccaccagcatcaccatcacctgggacagcggcaacccagaccctgtgtcctactacgtgattgagtacaagagcaagagccaggacggcccctaccagatcaaggaggacatcaccaccacccgctacagcattggaggcctgagccccaacagtgaatatgagatctgggtgtctgctgtgaacagcatcggccagggcccccccagcgagagcgtggtgaccaggactggagagcaggccccagccagcgcccccagaaatgtgcaggccaggatgctgagcgccaccaccatgattgtgcagtgggaggagcctgtggagcccaacggcctcatccggggctacagagtgtactacaccatggagcctgagcaccctgtgggcaactggcagaagcacaacgtggatgacagcctgctgaccaccgtgggcagcctgctggaggatgagacctacacagtgcgggtgctggccttcacctctgtgggagatggccccctgagtgaccccatccaggtgaagacccagcagggcgtgcccggccagcccatgaacctgcgggcagaggcccggtctgagaccagcatcaccctgtcctggagccccccccggcaggagagcatcatcaagtatgagctgctcttccgggagggggaccacggccgggaggtgggccgcacctttgaccccaccaccagctatgtggtggaggacctgaagcccaacacagaatatgccttccggctggccgcccggagcccccagggcctgggcgccttcacccctgtggtgcggcagaggaccctgcagagcaagcccagcgccccaccccaggatgtgaagtgtgtgtctgtgcgcagcacagccatcctggtgtcctggaggcctcctcctcctgagacccacaacggggccctggtgggctacagcgtgcgctaccggcccctgggcagcgaggaccctgagcccaaggaggtgaatggcatcccccccaccaccacccagatcctgctggaggccctggagaagtggacccagtaccgcatcaccaccgtggcccacacagaggtgggccctggccctgagagcagccctgtggtggtgaggacagatgaagatgtgcccagcgccccacccaggaaggtggaggccgaggccctgaatgccacagccatccgggtgctgtggaggagccctgcccctggccggcagcacggccagatccggggctaccaggtgcactacgtgaggatggagggcgctgaggcccggggccccccacgcatcaaggatgtgatgctggctgatgcccagtgggagacagatgacacagcagaatatgagatggtgatcaccaacctgcagcctgagacagcctacagcatcaccgtggccgcctacaccatgaagggagatggagcccggagcaagcccaaggtggtggtgaccaagggagctgtgctgggccggcccaccctgtctgtgcagcagaccccagagggcagcctgctggcccgctgggagcccccagctggaacagctgaggaccaggtgctgggctaccgcctgcagtttggaagagaggacagcacccccctggccaccctggagttccccccatctgaagatcgctacacagccagcggcgtgcacaagggggccacctacgtgttccggctggccgcccggagcagaggaggcctgggggaggaggccgctgaggtgctgagcatccctgaggacaccccccggggccacccccagatcctggaggccgctggaaatgccagcgctggcaccgtgctgctgcgctggctgccccctgtgcctgctgagagaaatggagccatcgtgaagtacacagtggccgtgcgggaggccggggccctgggccctgcccgggagacagagctgcctgctgctgctgagcctggagcagaaaatgccctgaccctgcagggcctgaagccagacacagcctatgacctgcaggtgcgggcccacacccggcggggccctggccccttcagcccccctgtgcgctaccgcaccttcctgcgggaccaggtgagccccaagaacttcaaggtgaagatgatcatgaagacctctgtgctgctgtcctgggagttcccagacaactacaacagccccaccccctacaagatccagtacaacggcctgaccctggatgtggatggccgcaccaccaagaagctgatcacccacctgaagccccacaccttctacaactttgtgctgaccaacagaggcagcagcctgggcggcctgcagcagacagtgacagcctggacagccttcaacctgctgaatggcaagcccagcgtggcccccaagccagatgctgatggcttcatcatggtgtacctgcctgatggccagagccctgtgcctgtgcagagctacttcatcgtgatggtgcccctgaggaagagccggggcggccagttcctgacccccctgggcagccctgaggacatggacctggaggagctgatccaggacatcagccggctgcagaggaggagcctgcggcacagccggcagctggaggtgccccggccctacatcgccgcccgcttctctgtgctgccccccaccttccaccctggggaccagaagcagtatggaggctttgacaacagaggcctggagcccggccaccgctacgtgctgtttgtgctggccgtgctgcagaagtctgagcccacctttgctgccagccccttcagtgaccccttccagctggacaacccagacccccagcccatcgtggatggagaggagggcctcatctgggtgattggccctgtgctggccgtggtgttcatcatctgcatcgtgattgccatcctgctgtacaagaacaagccagacagcaagaggaaggacagcgagcccaggaccaagtgcctgctgaacaatgctgacctggccccccaccaccccaaggaccctgtggagatgaggcgcatcaacttccagaccccaggcatgctgagccacccccccatccccatcgctgacatggccgagcacacagagcggctgaaggccaatgacagcctgaagctgagccaggagtatgagagcattgaccccggccagcagttcacctgggagcacagcaacctggaggtgaacaagcccaagaacagatatgccaacgtcatcgcctatgaccacagcagggtcatcctgcagcccatcgagggcatcatgggcagtgactacatcaatgccaactacgtggatggctaccgctgccagaatgcctacatcgccacccagggccccctgcctgagaccttcggggacttctggaggatggtgtgggagcagaggtctgccaccatcgtgatgatgacccggctggaggagaagagccgcatcaagtgtgaccagtactggcccaacagaggaacagagacctacggcttcatccaggtgaccctgctggacaccatcgagctggccaccttctgtgtgaggaccttcagcctgcacaagaatggcagcagcgagaagcgggaggtgcggcagttccagttcaccgcctggccagaccacggcgtgcctgagtaccccacccccttcctggccttcctgcggcgggtgaagacctgcaaccccccagatgctggccccatcgtggtgcactgcagcgctggggtgggccgcacaggctgcttcatcgtgattgatgccatgctggagcgcatcaagccagagaagacagtggatgtgtatggccacgtgaccctgatgaggagccagaggaactacatggtgcagacagaggaccagtacagcttcatccacgaggccctgctggaggccgtgggctgcggcaacacagaggtgcctgcccggagcctgtatgcctacatccagaagctggcccaggtggagcctggagagcacgtgacaggcatggagctggagttcaagaggctggccaacagcaaggcccacaccagccgcttcatcagcgccaacctgccctgcaacaagttcaagaaccggctggtgaacatcatgccctatgagagcaccagggtgtgcctgcagcccatccggggcgtggagggcagtgactacatcaatgccagcttcattgatggctaccggcagcagaaggcctacatcgccacccagggccccctggccgagaccacagaggacttctggaggatgctgtgggagaacaacagcaccatcgtggtgatgctgaccaagctgcgggagatgggccgggagaagtgccaccagtactggccagctgagaggtctgcccgctaccagtactttgtggtggaccccatggccgagtacaacatgccccagtacatcctgcgggagttcaaggtgacagatgccagagatggccagagcaggacagtgcggcagttccagttcacagactggccagagcagggcgtgcccaagagcggggagggcttcatcgacttcatcggccaggtgcacaagaccaaggagcagtttggccaggacggccccatctctgtgcactgcagcgctggggtgggccgcactggagtcttcatcaccctgagcatcgtgctggagaggatgagatatgagggcgtggtggacatcttccagacagtgaagatgctgcggacccagaggcctgccatggtgcagacagaagatgagtaccagttctgctaccaggccgccctggagtacctgggcagctttgaccactacgccacctag

SEQ ID NO: 294909 - DNA, 5787 bp, Artificial Sequence
  derived and/or modified sequence
atggcccccacctggggccccggcatggtgagcgtggtgggccccatgggcctcctggtcgttcttctggtaggaggctgcgctgccgaggagcccccgcgattcattaaggagccaaaggatcagatcggcgtgagcggaggagttgcatccttcgtgtgccaagccaccggggacccaaagccgcgggtgacgtggaataagaaaggcaagaaagtgaactctcagcgttttgagaccattgagtttgatgaatccgccggggccgtgttacgtatccagcctttgagaacacctcgtgatgaaaatgtctatgagtgcgtggcccaaaacagtgtaggcgaaataacagtacatgcgaagctgaccgtacttagggaggatcagctgccgagcggctttccaaacatagatatgggaccgcagcttaaggtggtcgagaggactcggactgctactatgctctgtgccgcaagtggcaacccggaccccgagattacatggtttaaagacttcctgcctgtggacccctccgccagtaatgggcgaataaaacaactgcgatctgaccaggccttcagtcacctgccaacaggcgctctccaaatcgaaagctccgaggagaccgatcagggtaagtatgaatgcgtggctactaacagtgctggagtccgctattcgtctccagctaacctctatgtgagagtgcgacgcgtggccccacggttttccatccttcctatgtcacacgagatcatgcctggcggcaatgtgaatatcacctgtgtggcagtgggctcgcctatgccttatgtgaagtggatgcagggagcagaggacctgactccagaagatgacatgccggtgggacggaacgtgctggaactcaccgacgttaaagactccgccaattatacctgcgtggctatgtcctccctgggcgtgattgaggctgttgcacagataactgtaaaatcccttcccaaggctcctggcactcccatggtgaccgaaaatacagccacatcgattaccatcacctgggactccggaaatccagatcctgtgagctactacgtcatcgaatataaaagcaaaagtcaagacggtccctaccagataaaggaggacattaccacaacccgctattcaattgggggtttgagtcccaacagtgaatatgagatctgggtttccgctgttaatagcatcggccagggacccccaagcgagtctgttgtgacgcgaacaggtgaacaggctcctgctagcgcccctagaaacgttcaggctagaatgcttagcgcaaccaccatgattgtccagtgggaagagcccgtggagcctaacggtcttatcagaggttatagggtgtactacacaatggagcccgagcatcctgtaggtaattggcaaaaacacaatgtggatgattctctactgactactgtaggaagcctgttggaggacgaaacgtataccgtccgggtgcttgctttcacttccgtgggtgatggtccactgagcgatcctatccaagtcaagacacaacaaggcgttccaggtcaacccatgaatctgcgagcagaggcgcgttcggagacaagtattactctatcctggtcccccccccgacaggaatcaattatcaagtatgagctgctgttcagggagggcgaccacggccgtgaggtgggacggacattcgacccaactaccagctacgtcgtagaagatctgaagcccaataccgagtacgcctttagactcgccgcccgatctccccagggccttggagcatttacaccagttgtcaggcagcggaccctgcagtcaaagccatctgcacctccccaagacgttaaatgcgtctctgtgagatctacagctatcctcgtgtcctggcgacctcctcctcctgaaactcataatggggcactggtcgggtactctgtaaggtaccggccacttgggtctgaggatccagaacccaaagaagtaaacggaatcccaccgacaactacccagatacttctggaagctctggaaaagtggacacagtatagaatcaccacagtggcacatactgaggtgggaccaggccccgagtcttcaccggtcgtggtcagaaccgatgaggacgtgccctctgccccgcccagaaaagtcgaggccgaggctttgaacgcgaccgcgatccgagtgctgtggagaagtcctgcgccgggccggcaacacggccagattaggggttaccaggtacattacgtacggatggagggggcggaggccagggggccaccaaggattaaggatgtcatgttggcagatgctcagtgggaaacagatgataccgctgaatacgaaatggtgattacgaacctgcagccagagacagcttattcgattaccgtagctgcatacaccatgaaaggagacggggcgcgttcaaaacctaaagtggttgtcaccaaaggcgcagtgctaggccgccccacgctgagtgttcaacagactcctgagggatcgctgcttgcaaggtgggagccccccgccggaaccgcagaggaccaagtgttggggtaccgtctccaattcggtagagaggacagcacccccctggcaacgcttgagtttcccccatccgaagataggtacaccgcttcaggggtccacaagggtgcaacttacgtattcaggctggctgccagaagccgtggcggcctgggtgaagaagcagccgaagtgctttcaatcccagaggacactcctcgaggacacccccagattttggaggctgccgggaacgcatcagccgggaccgtgctgctccgctggttgcccccggtccccgcagagagaaacggcgccatcgtgaaatatactgtagccgtgagggaggcaggggctctgggacctgcgcgggaaactgaactcccagccgcggccgaacctggagccgaaaatgcactcacactgcagggtctgaagcccgataccgcttacgacttgcaggtcagagcccacacaaggagaggtcccggtcctttctcaccgcccgtgaggtacagaacctttctaagagatcaggtttctccaaagaacttcaaagttaaaatgattatgaagaccagtgtgctcctttcttgggagttcccggacaattataactctccaacaccatacaagatccagtataacggattgaccctggatgtggacggcaggacgaccaagaagctgattacacatctcaaaccgcataccttctataattttgtgttgacaaacagaggctccagtctcggaggcctacagcagactgtgacagcctggactgcctttaatcttctgaacgggaagccatctgttgcaccaaagccggatgccgatggcttcatcatggtatacttgcccgatggccaaagtcccgtcccagtccagagctattttatcgtgatggtcccgctgcggaaatcccggggcggccagttcctcacccctctgggatcccccgaggatatggatctagaagaactaattcaagacatctctaggttgcagcgtcgtagcctgagacactctcggcagcttgaggtaccccgtccatacatcgctgctaggttctcagtcctgccacctactttccaccccggtgaccagaagcagtatggcggcttcgataaccgcggactcgagcccgggcaccggtatgtcctgttcgtactcgcagtgctccagaaatctgagcctactttcgccgcttccccgttttccgatccgtttcaactcgataatcctgatccccagcccatcgtcgacggggaggaagggctcatctgggttataggtccagtgctcgccgtggtttttattatctgtattgtcattgctatcttgctctacaaaaacaagccagacagtaagaggaaggacagcgaaccacggacaaaatgcttgttgaacaatgccgaccttgctccacaccatccaaaggacccagtcgagatgaggcgcattaactttcagacacccggaatgttgagccaccctcctataccaatagccgacatggctgagcatactgagcgtttgaaggccaacgatagcttgaagctcagccaagaatatgaatccatcgaccccggacagcaattcacctgggaacactccaatctggaagtgaataaacccaagaatcgctatgctaacgttatcgcatatgaccattcaagggtgatcctccagcctatagaagggatcatgggttctgattatatcaacgctaattacgtggatggctatcggtgtcagaatgcgtacatcgcaacgcagggccccctccctgaaacatttggagacttctggcgcatggtctgggagcagaggtcagcgactattgtgatgatgacacgattagaggaaaagagtcgcatcaagtgcgatcagtattggccaaatcgaggcacggagacatacggattcatccaggtcacactgttagacacaatcgaacttgccaccttctgtgttaggacttttagtttgcacaagaatggctcaagcgagaaaagggaggttcgacagtttcagttcaccgcttggcccgaccacggtgtgcctgagtatccgacacctttcctcgctttcctgaggcgggttaagacctgcaatccgccagacgcaggtccaatagtggtgcattgctcagcgggggttggccggacagggtgcttcattgtcatcgacgccatgctggaacggatcaaacctgaaaagaccgtggatgtgtatggccatgtgacattaatgagatcccagcggaattacatggtccaaactgaagaccaatatagcttcatacacgaagcacttctcgaagctgtgggctgtggtaacacggaagttccagcgaggagcctgtatgcttacatccagaagctggcccaggtcgaaccgggagagcacgtgactgggatggagctggaattcaaacgcctggcaaacagcaaggcccacaccagtaggttcatttccgctaacctcccatgcaataaatttaagaaccggttggtaaacatcatgccctatgagagcacccgcgtctgtttgcagccaatccgaggcgtcgaggggagcgactacatcaacgcaagcttcatagatgggtataggcagcagaaggcatacatagccacgcaggggccactcgccgaaactacagaagacttttggaggatgctttgggagaataattcaacaatcgtggtgatgctcaccaaactgcgggaaatgggtagggaaaagtgtcaccagtattggccggctgaacggagtgctagataccagtacttcgtcgttgaccccatggcagagtacaatatgccacagtatatccttagagaatttaaggtcacagatgcacgcgatggtcaaagtaggactgtcagacagtttcagttcacagactggccagaacagggcgtgcccaaatctggcgaggggtttatcgatttcattggtcaggtgcacaaaaccaaggagcagttcgggcaggatggtcccatcagcgttcactgctccgccggagttgggagaacaggagttttcatcacccttagcatagtgctggaaagaatgcgctacgagggagtagtggacatttttcagacagtgaagatgctgagaacccagaggcctgcaatggtccagaccgaggatgagtatcagttctgctaccaagccgcactggaatatctgggatcctttgatcactacgccacttag

SEQ ID NO: 294910 - DNA, 5786 bp, Artificial Sequence
  derived and/or modified sequence
atggcacccacctgggggccaggaatggttagtgtagtgggaccaatggggctgctcgtggttctcctggtagggggatgtgccgctgaggagccacccaggtttattaaagaacccaaagatcagattggcgtgagcgggggagtcgcatccttcgtttgccaggctactggggacccaaagcctcgagtcacctggaacaaaaagggaaagaaggtgaatagtcaacggttcgagaccatagaatttgacgaatcagctggggcagtcctgcgtatacaaccactccgaacccctagggatgaaaacgtgtatgaatgcgtagctcaaaatagtgttggtgaaataacagtgcatgccaaacttacagtcctccgagaagaccagttaccctctgggttccctaacattgacatgggcccacagctgaaggtggtagagagaacccgcactgccaccatgctgtgtgctgcttccggtaatccggatcccgagattacctggttcaaggactttcttcccgtcgatcctagtgcatcaaatggcaggattaaacagctcaggtccgaccaggctttctctcacctgcccacaggcgctcttcagattgaatcttcagaggaaactgatcaaggcaaatatgaatgtgtcgccaccaactccgctggggtgcggtattcctcgcctgcaaatttgtacgtgagagtgcggagagtggcaccgcgattttctatcctccccatgagccacgagattatgccaggcggtaacgtcaatattacatgtgtcgctgtgggcagcccaatgccttatgtcaaatggatgcagggagccgaagacctgacacctgaggatgatatgcccgtggggaggaacgttctcgaattgactgacgttaaggattctgctaactacacatgtgtcgcaatgtcttcacttggcgtgatcgaagcggtggcacagattaccgtcaagagcctcccaaaggcgccaggaacacccatggttaccgaaaatactgccacatccatcacgatcacttgggacagcggaaatcccgatccagtgtcttactatgtcattgagtacaaatcgaagtctcaggacggtccatatcagatcaaagaggatattacgacgacccggtacagcatcggtggcttgagccccaattctgaatatgagatctgggtgtcagctgtgaatagtatagggcagggccctccaagcgaaagcgtagtaacgcgtaccggcgagcaggctcccgctagcgccccacgcaacgtgcaggccagaatgctaagcgcaactactatgatcgtccaatgggaagagcccgtggagccgaacggcctgatcaggggctatcgagtgtactacacgatggagccagagcatccggtgggcaactggcagaagcacaatgttgacgatagcttgctgacgaccgttggaagtctgcttgaggatgagacatacaccgtgcgcgtgctcgccttcacatccgtgggcgacggccctctgtccgacccaattcaggtgaagacacagcaaggagttccgggtcagccaatgaatcttcgcgctgaggcaaggtccgagacttcaattacactgtcctggtccccccctcggcaggagagcattatcaaatatgagctgctgttccgggagggcgaccacggcagggaagtgggcagaaccttcgaccctactaccagttacgtagtagaagatttaaagccgaacaccgaatatgcctttcgactggcagcaaggtccccccaggggctgggggctttcactcctgtggtgaggcagcgaactctgcaatctaagccgagtgctcctcctcaagatgtcaagtgtgtgtcggtgagaagtactgcgatcctcgtaagctggcgccctcctccacctgagacacacaacggcgctctggtcggatacagtgtgcgataccggcctctggggtctgaagatcccgagcccaaggaagtcaatggcatacctcctacgactacgcagatcctgctcgaggctctcgaaaagtggacgcagtacagaatcacaacagtggcccacaccgaagtcggccctgggcctgaaagctcacctgttgtcgtgaggactgatgaggatgtgccctcagctccaccccgtaaagtcgaggctgaggccctgaacgccacagccattcgggtactttggagaagccctgcaccaggcaggcagcatgggcaaatcagaggctatcaagtccactacgtaagaatggaaggcgcagaagccagggggccaccgagaatcaaggatgtgatgctggccgatgcccagtgggagacagacgatactgcggaatacgaaatggttattacgaacctgcagcccgagaccgcgtactctatcactgtggcggcttatactatgaagggcgacggagccaggtcaaagcctaaggtggtcgtgaccaagggcgcagtgttagggagacctaccctcagcgtacagcagactcccgaaggcagtctcctggcccgatgggaaccgcctgctggaaccgccgaggatcaggtcctgggataccggctgcagtttggacgtgaggactccactccgttggcaactctggaattccctccaagcgaggatcgctataccgcctctggcgtgcacaaaggcgcaacttacgtctttaggttagccgcaaggtctcggggaggccttggcgaagaggctgccgaggtcctgtctatcccagaggacacccctcgcggacacccacaaatcctggaggccgcagggaatgcgtcggctggtacagttttgttgcgatggttgccaccggtgccagccgaacgcaatggcgcaatcgtgaagtacacagtggccgtacgggaggcaggcgctctcggtcctgcacgtgaaacagagttacccgcagccgcagagcctggggctgagaacgcgctgacactgcagggactgaagccagacactgcctacgacctccaggtgagagcacacacacggcgtggaccgggtcccttttctcccccagttaggtaccggactttcctgagggatcaggtgtctcccaaaaacttcaaagtgaagatgataatgaaaacatcggtactgttatcttgggaattccctgacaattacaattctcctacaccatacaagatccaatataacggtctcaccctggacgtcgacggcaggacaaccaagaaactgatcacccatctcaaaccacacacattttacaacttcgttctgacaaacagggggagctccctaggaggcttacagcaaacggtgacggcgtggacggcctttaatttgctaaacgggaaaccaagcgtggcaccaaaaccagacgctgacggcttcataatggtctatctgcccgacggccagtcaccggtgcctgtgcaatcatatttcatcgtgatggtgccgcttagaaagtcaaggggtgggcagttcctcaccccccttggatcccctgaagatatggatctggaagagctgattcaggacataagcaggctgcaaaggcggagtctgcgacacagcaggcagctcgaggtacctcggccatatatcgcggcaaggttctcggttctgcctcctacatttcatcctggggatcagaaacagtacggaggcttcgataaccgcggactggaacctggccatcgctatgtcctcttcgttctagctgtgctgcaaaagtctgaacctacatttgccgcttccccatttagtgatccttttcagctcgacaatccagatcctcagcccatagtggatggcgaagaggggctcatttgggtgatcggccctgtactggcggtggtgttcattatttgtattgtgatagccattctcctgtataagaataaacccgattcgaaaagaaaagactccgagccaagaacgaaatgtctccttaataatgccgaccttgctccccaccacccaaaagacccagtggagatgcggcgaattaatttccaaactccaggcatgctttcacaccccccaatccctattgcagatatggccgaacatacagagcgtttgaaagctaacgactctctcaaactttctcaagagtatgagagcatcgaccccggacagcaatttacatgggagcacagtaaccttgaagttaacaaaccgaagaatagatacgctaatgtgatagcttatgatcactctcgagtgatcctgcagcccatcgaaggaattatgggaagcgactatatcaacgccaattacgtcgatggctaccgttgtcaaaacgcctacatcgccactcaagggccacttcccgagacgttcggggacttttggcgtatggtgtgggaacagcggtccgccacgattgtgatgatgactagactcgaagagaaatcacgaattaagtgcgatcagtactggcccaatagagggacagagacttatggttttattcaagtgaccctacttgacaccattgagctcgccactttttgtgttcggacattctctcttcataaaaacggctcgtccgagaaaagagaggttaggcagttccaattcactgcttggccggaccacggggtgcccgagtacccaaccccattcctggccttcctgcggcgagtgaaaacttgtaaccccccagacgccggacctatcgttgtccactgctcagcaggcgtgggacgaaccggatgttttatagtcatagatgcaatgctcgagagaatcaaaccagagaagacagtcgacgtttatgggcacgtcaccctgatgagatcgcagcggaactacatggtgcagactgaagatcaatattccttcattcatgaggccctgttggaggctgtaggctgcgggaatacagaagtgccggcacgttccctgtacgcgtatatccagaagttggcccaagttgagcccggagaacatgttacagggatggaacttgagtttaagaggttagccaactcaaaagctcacacctctagatttatcagcgcgaacctgccatgtaataaatttaaaaatagattggtcaacatcatgccctatgagtctacacgggtttgcttgcaacccattcggggagtggagggcagcgactacatcaacgctagttttatagacggctatagacagcagaaggcctatatcgcaactcagggacctttggccgagactacggaagacttttggcgaatgctctgggaaaataatagcactatcgtggtcatgctcacaaagctgagggaaatggggcgtgaaaaatgccaccaatactggcccgcagaacgctcagccaggtaccagtacttcgtcgtggacccaatggctgaatacaatatgccccagtacatcctgagagaattcaaagtaaccgacgccagggacgggcagtcaagaacagtcaggcagttccaattcacagattggcctgaacagggtgttccgaagtctggagagggcttcatcgatttcatcggtcaggttcataaaaccaaggagcagttcggacaggacggtcccatctccgtgcattgtagcgcaggcgtcgggagaacaggcgtcttcatcaccctgagcatagtgcttgaaagaatgcgctacgaaggcgtagtggacatttttcaaaccgtaaaaatgctgcgtacccagcgcccagccatggtccagacagaagatgaatatcaattctgctaccaggccgcactggaatatttgggatcttttgatcactacgcgacata

SEQ ID NO: 294911 - DNA, 7287 bp, Artificial Sequence
  derived and/or modified sequence
cctcgcgccgcccgcccggcagcccggccggcgcgcgcacgccgcgagccgctggcgctcgggctccgctcggatcccatgcaacagccacgatgtgaagcggggcagagccgggggagcccagcccagccagcctccagacgttgccccatctgacgctcggctcgaggcctctctgtgagggaccggggggccatccccctccagggcggagatcggaggtcgctgccaagcatggcgcccacctggggccctggcatggtgtctgtggttggtcccatgggcctccttgtggtcctgctcgttggaggctgtgcagcagaagagccccccaggtttatcaaagaacccaaggaccagatcggcgtgtcggggggtgtggcctctttcgtgtgtcaggccacgggtgaccccaagccacgagtgacctggaacaagaagggcaagaaggtcaactctcagcgctttgagacgattgagtttgatgagagtgcaggggcagtgctgaggatccagccgctgaggacaccgcgggatgaaaacgtgtacgagtgtgtggcccagaactcggttggggagatcacagtccatgccaagcttactgtcctccgagaggaccagctgccctctggcttccccaacatcgacatgggcccacagttgaaggtggtggagcggacacggacagccaccatgctctgtgcagccagcggcaaccctgaccctgagatcacctggttcaaggacttcctgcctgtggatcctagtgccagcaatggacgcatcaaacagctgcgatcagaccaagctttttcccatcttcccacaggagccctgcagattgaaagcagtgaggaaaccgaccagggcaaatatgagtgtgtggccaccaacagcgccggcgtgcgctactcctcacctgccaacctctacgtgcgagtccgccgcgtggccccgcgcttctccatcctgcccatgagccacgagatcatgccagggggcaacgtgaacatcacctgcgtggccgtgggctcgcccatgccatacgtgaagtggatgcagggggccgaggacctgacccccgaggatgacatgcccgtgggtcggaacgtgctggaactcacagatgtcaaggactcggccaactacacctgcgtggccatgtccagcctgggcgtcattgaggcggttgctcagatcacggtgaaatctctccccaaagctcccgggactcccatggtgactgagaacacagccaccagcatcaccatcacgtgggactcgggcaacccagatcctgtgtcctattacgtcatcgaatataaatccaagagccaagacgggccgtatcagattaaagaggacatcaccaccacacgttacagcatcggcggcctgagccccaactcggagtacgagatctgggtgtcggccgtcaactccatcggccaggggccccccagcgagtccgtggtcacccgcacaggcgagcaggccccggccagcgcgccgcggaacgtgcaagcccggatgctcagcgcgaccaccatgattgtgcagtgggaggagccggtggagcccaacggcctgatccgcggctaccgcgtctactacaccatggaaccggagcaccccgtgggcaactggcagaagcacaacgtggacgacagcctgctgaccaccgtgggcagcctgctggaggacgagacctacaccgtgcgggtgctcgccttcacctccgtcggcgacgggcccctctcggaccccatccaggtcaagacgcagcagggagtgccgggccagcccatgaacctgcgggccgaggccaggtcggagaccagcatcacgctgtcctggagccccccgcggcaggagagtatcatcaagtacgagctcctcttccgggaaggcgaccatggccgggaggtgggaaggaccttcgacccgacgacttcctacgtggtggaggacctgaagcccaacacggagtacgccttccgcctggcggcccgctcgccgcagggcctgggcgccttcacccccgtggtgcggcagcgcacgctgcagtccaaaccgtcagccccccctcaagacgttaaatgtgtcagcgtgcgctccacggccattttggtaagttggcgcccgccgccgccggaaacgcacaacggggccctggtgggctacagcgtccgctaccgaccgctgggctcagaggacccggaacccaaggaggtgaacggcatccccccgaccaccactcagatcctgctggaggccttggagaagtggacccagtaccgcatcacgactgtcgctcacacagaggtgggaccagggcccgagagctcgcccgtggtcgtccgcaccgacgaggatgtgcccagcgcgccgccgcggaaggtggaggcggaggcgctcaacgccacggccatccgcgtgctgtggcgctcgcccgcgcccggccggcagcacggccagatccgcggctaccaggtccactacgtgcgcatggagggcgccgaggcccgcgggccgccgcgcatcaaggacgtcatgctggccgatgcccagtgggagacggatgacacggccgaatatgagatggtcatcacaaacttgcagcctgagaccgcgtactccatcacggtagccgcctacaccatgaagggcgatggcgctcgcagcaaacccaaggtggttgtgaccaagggagcagtgctgggccgcccaaccctgtcggtgcagcagacccccgagggcagcctgctggcacgctgggagcccccggctggcaccgcggaggaccaggtgctgggctaccgcctgcagtttggccgtgaggactcgacgcccctggccaccctggagttcccgccctccgaggaccgctacacggcatcaggcgtgcacaagggggccacgtatgtgttccggcttgcggcccggagccgcggcggcctgggcgaggaggcagccgaggtcctgagcatcccggaggacacgccccgtggccacccgcagattctggaggcggccggcaacgcctcggccgggaccgtccttctccgctggctgccacccgtgcccgccgagcgcaacggggccatcgtcaaatacacggtggccgtgcgggaggccggtgccctgggccctgcccgagagactgagctgccggcagcggctgagccgggcgcggagaacgcgctcacgctgcagggcctgaagcccgacacggcctatgacctccaagtgcgagcccacacgcgccggggccctggccccttcagcccccccgtccgctaccggacgttcctgcgggaccaagtctcgcccaagaacttcaaggtgaaaatgatcatgaagacatcagttctgctcagctgggagttccctgacaactacaactcacccacaccctacaagatccagtacaatgggctcacactggatgtggatggccgtaccaccaagaagctcatcacgcacctcaagccccacaccttctacaactttgtgctgaccaatcgcggcagcagcctgggcggcctccagcagacggtcaccgcctggactgccttcaacctgctcaacggcaagcccagcgtcgcccccaagcctgatgctgacggcttcatcatggtgtatcttcctgacggccagagccccgtgcctgtccagagctatttcattgtgatggtgccactgcgcaagtctcgtggaggccaattcctgaccccgctgggtagcccagaggacatggatctggaagagctcatccaggacatctcacggctacagaggcgcagcctgcggcactcgcgtcagctggaggtgccccggccctatattgcagctcgcttctctgtgctgccacccacgttccatcccggcgaccagaagcagtatggcggcttcgataaccggggcctggagcccggccaccgctatgtcctcttcgtgcttgccgtgcttcagaagagcgagcctacctttgcagccagtcccttctcagaccccttccagctggataacccggacccccagcccatcgtggatggcgaggaggggcttatctgggtgatcgggcctgtgctggccgtggtcttcataatctgcattgtcattgctatcctgctctacaagaacaaacccgacagtaaacgcaaggactcagaaccccgcaccaaatgcctcctgaacaatgccgacctcgcccctcaccaccccaaggaccctgtggaaatgagacgcattaacttccagactccaggcatgcttagccacccgccaattcccatcgcagacatggcggagcacacggagcggctcaaggccaacgacagcctcaagctctcccaggagtatgagtccatcgaccctggacagcagttcacatgggaacattccaacctggaagtgaacaagccgaagaaccgctatgccaacgtcatcgcctatgaccactcccgtgtcatcctccagcccattgaaggcatcatgggcagtgattacatcaatgccaactacgtggacggctaccggtgtcagaacgcgtacattgccacgcaggggccgctgcctgagacctttggggacttctggcgtatggtgtgggagcagcggtcggcgaccatcgtcatgatgacgcggctggaggagaagtcacggatcaagtgtgatcagtattggcccaacagaggcacggagacctacggcttcatccaggtcacgttgctagataccatcgagctggccacattctgcgtcaggacattctctctgcacaagaatggctccagtgagaaacgcgaggtccgccagttccagtttacggcgtggccggaccatggcgtgcccgaatacccaacgcccttcctggctttcctgcggagagtcaagacctgcaacccgccagatgccggccccatcgtggttcactgcagtgccggtgtgggccgcacaggctgctttatcgtcatcgacgccatgcttgagcggatcaagccagagaagacagtcgatgtctatggccacgtgacgctcatgaggtcccagcgcaactacatggtgcagacggaggaccagtacagcttcatccacgaggccctgctggaggccgtgggctgtggcaacacagaagtgcccgcacgcagcctctatgcctacatccagaagctggcccaggtggagcctggcgaacacgtcactggcatggaactcgagttcaagcggctggctaactccaaggcccacacgtcacgcttcatcagtgccaatctgccttgtaacaagttcaagaaccgcctggtgaacatcatgccctatgagagcacacgggtctgtctgcaacccatccggggtgtggagggctctgactacatcaacgccagcttcattgatggctacaggcagcagaaggcctacatcgcgacacaggggccgctggcggagaccacggaagacttctggcgcatgctgtgggagaacaattcgacgatcgtggtgatgctgaccaagctgcgggagatgggccgggagaagtgtcaccagtactggccggccgagcgctctgcccgctaccagtactttgtggtagatccgatggcagaatacaacatgcctcagtatatcctgcgagagttcaaggtcacagatgcccgggatggccagtcccggactgtccggcagttccagttcacagactggccggaacagggtgtgccaaagtcgggggagggcttcatcgacttcattggccaagtgcataagactaaggagcagtttggccaggacggccccatctctgtccactgcagtgccggcgtgggcaggacgggcgtcttcatcacgcttagcatcgtgctggagcggatgcggtatgaaggcgtggtggacatctttcagacggtgaagatgctacgaacccagcggccggccatggtgcagacagaggatgagtaccagttctgttaccaggcggcactggagtacctcggaagctttgaccactatgcaacctaaagccatggttccccccaggcccgacaccactggccccggatgcctctgcccctcccgggcggacctcctgaggcctggacccccagtgggcagggcaggaggtggcagcggcagcagctgtgtttctgcaccatttccgaggacgacgcagcccctcgagcccccccaccggccccggccgccccagcgacctccctggcaccggccgccgccttcaaatacttggcacattcctcctttccttccaattccaaaaccagattccggggtggggggtggggggatggtgagcaaataggagtgctccccagaaccagaggagggtggggcacagaccatagacggacccctcgtcctcccccagcggtggtagggggacccggggggctcctccccgctctgcagcctggggacactgggctgggaccagaatccagctttcttttaaaactctcagtgtaactgtatcccgtgacatttcattttttttaaatagtgtatttttttttccatttttttttttaagagaaacaaacaaaagactcgccagtcaatgactttcaaagagaactaactttggcttattcatattctgttcaaagacagtctattttttcactgtagaaagcgtccttgtgtgatagttacgttcgcaaacgcgcacgccaggcccatggctgtaccttggcttttttttttttttttttttttttaatttttcctaccatcagaaagtgtgctttgctcacagaagaatgggatgtccttttttctttcttggctttttttttccccctttttgtttcatttttataaattaaattttcagacatatcaaatacagttctgagggtaaggtcatgggggagctcggacccagtggcgttgggtgcggttgagggggacgctgctgtaagaggagagagatgacagtggtcctcctctgagagcctgagctgtctccccgtctcccgcccccaaggagacagagaggatcctacttcttcggggacagtggctgtatggctgtgctgccccacatcagggaccctttccccctgggactgtggggcagtttgggagcaaaaccagaaggacaggcccccctctacccgcctaccctgagcaagcgagttgttcctctttgtacaagggcaggtctgcggttactttcaacactgtttattccagcggaagcagccgggtggttttcccacccccgtgtatgtagatatatcgactttgtattaaaggaagatcgtctga

SEQ ID NO: 294912 - DNA, 5787 bp, Artificial Sequence
  derived and/or modified sequence
atggcccccacctggggccccggcatggtgagcgtggtgggccccatgggcctgctggtggtgctgctggtgggcggctgcgccgccgaggagccccccagattcatcaaggagcccaaggaccagatcggcgtgagcggcggcgtggccagcttcgtgtgccaggccaccggcgaccccaagcccagagtgacctggaacaagaagggcaagaaggtgaacagccagagattcgagaccatcgagttcgacgagagcgccggcgccgtgctgagaatccagcccctgagaacccccagagacgagaacgtgtacgagtgcgtggcccagaacagcgtgggcgagatcaccgtgcacgccaagctgaccgtgctgagagaggaccagctgcccagcggcttccccaacatcgacatgggcccccagctgaaggtggtggagagaaccagaaccgccaccatgctgtgcgccgccagcggcaaccccgaccccgagatcacctggttcaaggacttcctgcccgtggaccccagcgccagcaacggcagaatcaagcagctgagaagcgaccaggccttcagccacctgcccaccggcgccctgcagatcgagagcagcgaggagaccgaccagggcaagtacgagtgcgtggccaccaacagcgccggcgtgagatacagcagccccgccaacctgtacgtgagagtgagaagagtggcccccagattcagcatcctgcccatgagccacgagatcatgcccggcggcaacgtgaacatcacctgcgtggccgtgggcagccccatgccctacgtgaagtggatgcagggcgccgaggacctgacccccgaggacgacatgcccgtgggcagaaacgtgctggagctgaccgacgtgaaggacagcgccaactacacctgcgtggccatgagcagcctgggcgtgatcgaggccgtggcccagatcaccgtgaagagcctgcccaaggcccccggcacccccatggtgaccgagaacaccgccaccagcatcaccatcacctgggacagcggcaaccccgaccccgtgagctactacgtgatcgagtacaagagcaagagccaggacggcccctaccagatcaaggaggacatcaccaccaccagatacagcatcggcggcctgagccccaacagcgagtacgagatctgggtgagcgccgtgaacagcatcggccagggcccccccagcgagagcgtggtgaccagaaccggcgagcaggcccccgccagcgcccccagaaacgtgcaggccagaatgctgagcgccaccaccatgatcgtgcagtgggaggagcccgtggagcccaacggcctgatcagaggctacagagtgtactacaccatggagcccgagcaccccgtgggcaactggcagaagcacaacgtggacgacagcctgctgaccaccgtgggcagcctgctggaggacgagacctacaccgtgagagtgctggccttcaccagcgtgggcgacggccccctgagcgaccccatccaggtgaagacccagcagggcgtgcccggccagcccatgaacctgagagccgaggccagaagcgagaccagcatcaccctgagctggagcccccccagacaggagagcatcatcaagtacgagctgctgttcagagagggcgaccacggcagagaggtgggcagaaccttcgaccccaccaccagctacgtggtggaggacctgaagcccaacaccgagtacgccttcagactggccgccagaagcccccagggcctgggcgccttcacccccgtggtgagacagagaaccctgcagagcaagcccagcgcccccccccaggacgtgaagtgcgtgagcgtgagaagcaccgccatcctggtgagctggagaccccccccccccgagacccacaacggcgccctggtgggctacagcgtgagatacagacccctgggcagcgaggaccccgagcccaaggaggtgaacggcatcccccccaccaccacccagatcctgctggaggccctggagaagtggacccagtacagaatcaccaccgtggcccacaccgaggtgggccccggccccgagagcagccccgtggtggtgagaaccgacgaggacgtgcccagcgccccccccagaaaggtggaggccgaggccctgaacgccaccgccatcagagtgctgtggagaagccccgcccccggcagacagcacggccagatcagaggctaccaggtgcactacgtgagaatggagggcgccgaggccagaggcccccccagaatcaaggacgtgatgctggccgacgcccagtgggagaccgacgacaccgccgagtacgagatggtgatcaccaacctgcagcccgagaccgcctacagcatcaccgtggccgcctacaccatgaagggcgacggcgccagaagcaagcccaaggtggtggtgaccaagggcgccgtgctgggcagacccaccctgagcgtgcagcagacccccgagggcagcctgctggccagatgggagccccccgccggcaccgccgaggaccaggtgctgggctacagactgcagttcggcagagaggacagcacccccctggccaccctggagttcccccccagcgaggacagatacaccgccagcggcgtgcacaagggcgccacctacgtgttcagactggccgccagaagcagaggcggcctgggcgaggaggccgccgaggtgctgagcatccccgaggacacccccagaggccacccccagatcctggaggccgccggcaacgccagcgccggcaccgtgctgctgagatggctgccccccgtgcccgccgagagaaacggcgccatcgtgaagtacaccgtggccgtgagagaggccggcgccctgggccccgccagagagaccgagctgcccgccgccgccgagcccggcgccgagaacgccctgaccctgcagggcctgaagcccgacaccgcctacgacctgcaggtgagagcccacaccagaagaggccccggccccttcagcccccccgtgagatacagaaccttcctgagagaccaggtgagccccaagaacttcaaggtgaagatgatcatgaagaccagcgtgctgctgagctgggagttccccgacaactacaacagccccaccccctacaagatccagtacaacggcctgaccctggacgtggacggcagaaccaccaagaagctgatcacccacctgaagccccacaccttctacaacttcgtgctgaccaacagaggcagcagcctgggcggcctgcagcagaccgtgaccgcctggaccgccttcaacctgctgaacggcaagcccagcgtggcccccaagcccgacgccgacggcttcatcatggtgtacctgcccgacggccagagccccgtgcccgtgcagagctacttcatcgtgatggtgcccctgagaaagagcagaggcggccagttcctgacccccctgggcagccccgaggacatggacctggaggagctgatccaggacatcagcagactgcagagaagaagcctgagacacagcagacagctggaggtgcccagaccctacatcgccgccagattcagcgtgctgccccccaccttccaccccggcgaccagaagcagtacggcggcttcgacaacagaggcctggagcccggccacagatacgtgctgttcgtgctggccgtgctgcagaagagcgagcccaccttcgccgccagccccttcagcgaccccttccagctggacaaccccgacccccagcccatcgtggacggcgaggagggcctgatctgggtgatcggccccgtgctggccgtggtgttcatcatctgcatcgtgatcgccatcctgctgtacaagaacaagcccgacagcaagagaaaggacagcgagcccagaaccaagtgcctgctgaacaacgccgacctggccccccaccaccccaaggaccccgtggagatgagaagaatcaacttccagacccccggcatgctgagccacccccccatccccatcgccgacatggccgagcacaccgagagactgaaggccaacgacagcctgaagctgagccaggagtacgagagcatcgaccccggccagcagttcacctgggagcacagcaacctggaggtgaacaagcccaagaacagatacgccaacgtgatcgcctacgaccacagcagagtgatcctgcagcccatcgagggcatcatgggcagcgactacatcaacgccaactacgtggacggctacagatgccagaacgcctacatcgccacccagggccccctgcccgagaccttcggcgacttctggagaatggtgtgggagcagagaagcgccaccatcgtgatgatgaccagactggaggagaagagcagaatcaagtgcgaccagtactggcccaacagaggcaccgagacctacggcttcatccaggtgaccctgctggacaccatcgagctggccaccttctgcgtgagaaccttcagcctgcacaagaacggcagcagcgagaagagagaggtgagacagttccagttcaccgcctggcccgaccacggcgtgcccgagtaccccacccccttcctggccttcctgagaagagtgaagacctgcaacccccccgacgccggccccatcgtggtgcactgcagcgccggcgtgggcagaaccggctgcttcatcgtgatcgacgccatgctggagagaatcaagcccgagaagaccgtggacgtgtacggccacgtgaccctgatgagaagccagagaaactacatggtgcagaccgaggaccagtacagcttcatccacgaggccctgctggaggccgtgggctgcggcaacaccgaggtgcccgccagaagcctgtacgcctacatccagaagctggcccaggtggagcccggcgagcacgtgaccggcatggagctggagttcaagagactggccaacagcaaggcccacaccagcagattcatcagcgccaacctgccctgcaacaagttcaagaacagactggtgaacatcatgccctacgagagcaccagagtgtgcctgcagcccatcagaggcgtggagggcagcgactacatcaacgccagcttcatcgacggctacagacagcagaaggcctacatcgccacccagggccccctggccgagaccaccgaggacttctggagaatgctgtgggagaacaacagcaccatcgtggtgatgctgaccaagctgagagagatgggcagagagaagtgccaccagtactggcccgccgagagaagcgccagataccagtacttcgtggtggaccccatggccgagtacaacatgccccagtacatcctgagagagttcaaggtgaccgacgccagagacggccagagcagaaccgtgagacagttccagttcaccgactggcccgagcagggcgtgcccaagagcggcgagggcttcatcgacttcatcggccaggtgcacaagaccaaggagcagttcggccaggacggccccatcagcgtgcactgcagcgccggcgtgggcagaaccggcgtgttcatcaccctgagcatcgtgctggagagaatgagatacgagggcgtggtggacatcttccagaccgtgaagatgctgagaacccagagacccgccatggtgcagaccgaggacgagtaccagttctgctaccaggccgccctggagtacctgggcagcttcgaccactacgccacctag

SEQ ID NO: 294913 - protein, 1530 aa, Artificial Sequence
  derived and/or modified sequence
MAPTWGPGMVSVVGPMGLLVVLLVGGCAAEEPPRFIKEPKDQIGVSGGVASFVCQATGDPKPRVTWNKKGKKVNSQRFETIEFDESAGAVLRIQPLRTPRDENVYECVAQNSVGEITVHAKLTVLREDQLPSGFPNIDMGPQLKVVERTRTATMLCAASGNPDPEITWFKDFLPVDPSASNGRIKQLRSDQAFSHLPTGALQIESSEETDQGKYECVATNSAGVRYSSPANLYVRVWRTVRRVAPRFSILPMSHEIMPGGNVNITCVAVGSPMPYVKWMQGAEDLTPEDDMPVGRNVLELTDVKDSANYTCVAMSSLGVIEAVAQITVKSLPKAPGTPMVTENTATSITITWDSGNPDPVSYYVIEYKSKSQDGPYQIKEDITTTRYSIGGLSPNSEYEIWVSAVNSIGQGPPSESVVTRTGEQAPASAPRNVQARMLSATTMIVQWEEPVEPNGLIRGYRVYYTMEPEHPVGNWQKHNVDDSLLTTVGSLLEDETYTVRVLAFTSVGDGPLSDPIQVKTQQGVPGQPMNLRAEARSETSITLSWSPPRQESIIKYELLFREGDHGREVGRTFDPTTSYVVEDLKPNTEYAFRLAARSPQGLGAFTPVVRQRTLQSISPKNFKVKMIMKTSVLLSWEFPDNYNSPTPYKIQYNGLTLDVDGRTTKKLITHLKPHTFYNFVLTNRGSSLGGLQQTVTAWTAFNLLNGKPSVAPKPDADGFIMVYLPDGQSPVPVQSYFIVMVPLRKSRGGQFLTPLGSPEDMDLEELIQDISRLQRRSLRHSRQLEVPRPYIAARFSVLPPTFHPGDQKQYGGFDNRGLEPGHRYVLFVLAVLQKSEPTFAASPFSDPFQLDNPDPQPIVDGEEGLIWVIGPVLAVVFIICIVIAILLYKNKPDSKRKDSEPRTKCLLNNADLAPHHPKDPVEMRRINFQTPDSGLRSPLREPGFHFESMLSHPPIPIADMAEHTERLKANDSLKLSQEYESIDPGQQFTWEHSNLEVNKPKNRYANVIAYDHSRVILQPIEGIMGSDYINANYVDGYRCQNAYIATQGPLPETFGDFWRMVWEQRSATIVMMTRLEEKSRIKCDQYWPNRGTETYGFIQVTLLDTIELATFCVRTFSLHKNGSSEKREVRQFQFTAWPDHGVPEYPTPFLAFLRRVKTCNPPDAGPIVVHCSAGVGRTGCFIVIDAMLERIKPEKTVDVYGHVTLMRSQRNYMVQTEDQYSFIHEALLEAVGCGNTEVPARSLYAYIQKLAQVEPGEHVTGMELEFKRLANSKAHTSRFISANLPCNKFKNRLVNIMPYESTRVCLQPIRGVEGSDYINASFIDGYRQQKAYIATQGPLAETTEDFWRMLWENNSTIVVMLTKLREMGREKCHQYWPAERSARYQYFVVDPMAEYNMPQYILREFKVTDARDGQSRTVRQFQFTDWPEQGVPKSGEGFIDFIGQVHKTKEQFGQDGPISVHCSAGVGRTGVFITLSIVLERMRYEGVVDIFQTVKMLRTQRPAMVQTEDEYQFCYQAALEYLGSFDHYAT

SEQ ID NO: 294914 - DNA, 4593 bp, Artificial Sequence
  derived and/or modified sequence
atggctcctacatggggcccagggatggtatccgttgtgggacctatgggtttattagtcgtcttgctggtcggcggatgcgccgccgaggagcctcccaggttcattaaagagcctaaggatcagattggggtgtcgggtggcgttgcttctttcgtatgtcaggcaaccggagacccaaagccgcgggtcacctggaacaagaagggaaagaaggtgaacagccagaggtttgagactatcgagttcgatgaatccgctggcgccgttctgagaatccagccactccgtacgccacgtgacgagaatgtgtatgagtgcgtagctcagaattccgtaggtgagataaccgtccatgccaaactgaccgtgctgagggaagaccaactcccaagcggattcccgaatattgacatgggcccacagctgaaagtcgtggagcggacgcggacagccaccatgctttgcgcagccagtggcaatcccgatcccgagatcacttggtttaaggactttctgccagtagatcctagcgccagtaacggccgcatcaagcagttgcgcagcgaccaggctttctctcatctgcctacgggcgcactgcagatagaatccagcgaagagaccgatcagggcaagtacgagtgtgtggccacaaactctgcgggggtccggtatagttctcctgccaacctttacgtacgagtctggcggacagtccgtagagtggccccccggttttccattctgcctatgagccacgaaatcatgccaggaggaaatgtgaatattacttgtgtagcagtaggatcccccatgccttacgttaagtggatgcaaggggccgaggatctcactcctgaggatgatatgccagtggggcgcaatgtgctggagctgacagacgtcaaagacagcgctaattacacctgcgtggcaatgtcctcattaggggttatcgaggcagtagcacagatcacagtcaagtctcttcccaaggcacccggaacccccatggtgaccgaaaataccgctaccagcattacaatcacctgggacagcggaaacccagatccagtttcctactacgtgattgaatataaatccaagagccaggatggtccttaccagatcaaagaggacatcactactacaaggtactctattgggggactgagccccaattcagagtacgagatctgggtgtccgcagtgaacagcattggccagggtccaccttcggaatctgtggtgactcggaccggggagcaggcacctgcttcagcccccagaaacgtccaagcaagaatgttgtcagccacgacaatgatagtccagtgggaagaacccgtggagcccaacggcctgatccgaggttatcgtgtgtattacaccatggaacccgagcatccagtgggcaattggcaaaaacacaatgttgacgacagccttttgacaaccgtcggcagcctattagaggacgagacctacactgtccgggtgctggcgtttacaagcgttggggacggcccgctcagcgatcccatccaagtgaaaacccaacaaggggtccctgggcagcccatgaatttacgcgcagaagcaagatccgagacctctatcactttgagctggagcccccccaggcaggagtcaattataaagtacgaattgctcttcagggaaggcgatcatgggcgggaggtgggtcggacttttgatcctactaccagctatgtggtggaagacctgaagccgaacactgaatacgcatttcgactcgccgcaaggagccctcagggactgggggctttcactccagtagtccggcagcggactttacagagcatctccccaaaaaacttcaaagtcaagatgattatgaagaccagtgtcctgctgtcgtgggagtttccagacaactacaacagccccaccccttacaagatccagtataatgggctgaccctggatgtggacggcagaactaccaagaagcttatcacacacctgaagccacacaccttttacaactttgttctaactaatcgaggaagttcccttggcggcctccaacagaccgtgacggcctggacagcctttaatctgctgaacgggaaaccatctgtggctccgaaaccagatgctgacggttttataatggtgtacctccctgatggccaaagcccagtcccagtccaatcctatttcattgtgatggttccactaaggaaatcccgtggtggacagttcttgacccctttgggcagccccgaagacatggacctggaagagctgattcaggatatttcacggttgcaacgccgttccctgagacactctagacaattggaggtcccccgcccctacatagcagcacggttttccgtgttacccccaacattccatccaggcgaccagaagcagtacggaggatttgataatcgggggctcgaaccaggccataggtacgtacttttcgtgttagccgtgctccaaaaatcagaaccgaccttcgcagcctcaccattttcggaccccttccagctagataacccagacccccagccgattgtggacggagaggaaggcctgatctgggtgattgggcccgtgttagctgtggtgtttattatttgtattgttattgccatcttgctctataaaaacaagccagattcaaaaaggaaagacagcgagccaagaaccaagtgccttctcaataacgctgatttggcaccacatcacccaaaagatcctgtggaaatgcgacggattaatttccaaacccccgactcaggccttaggtcccctcttcgggaaccaggcttccacttcgagtccatgctgagtcatccaccaattccaatcgccgacatggcagaacatactgagaggctgaaagctaacgacagtctcaaactttcccaggaatacgaatccatcgaccccggccagcagttcacatgggaacatagtaacttggaagtgaacaaacccaagaaccggtacgccaacgtaattgcttacgaccactctcgagtgatcctgcagcctatcgaaggcatcatgggcagcgattatatcaatgcaaattatgtggacggatacaggtgtcaaaacgcttatatagcaacgcagggccccctgcctgaaactttcggggatttctggcgaatggtctgggaacaacgcagtgcgaccatcgtgatgatgactcgactagaagagaagtcccgaatcaaatgcgaccagtactggcctaaccgagggacagagacctacggattcatccaggtgacactccttgacaccatcgaattagcgaccttttgcgttaggaccttcagtctgcacaaaaatgggtcttccgaaaaacgcgaggtgcgacagtttcagtttaccgcgtggcctgatcacggcgtacctgaatacccaactcctttcttggcctttctgcggagggtgaagacctgtaaccctccggatgccggcccgatcgtggtgcactgcagcgccggagtagggaggactggttgttttattgtcattgacgctatgctggaacgcatcaagcccgaaaaaaccgtggatgtgtacggccatgtaaccctcatgcgatctcaacgcaactatatggtacaaactgaggatcaatactcttttatccatgaagccttgctggaggcagtgggctgtggcaatactgaggttccagcccgttctttgtacgcctacattcagaaattggctcaggttgaacccggcgagcacgtaacgggcatggagctagagttcaagaggttagccaactctaaagcacatacctcacggtttatttccgccaatcttccttgtaataaatttaaaaatagactggtcaatatcatgccatatgagtcgactagggtctgcctgcagccaattcggggggtagagggtagtgattatatcaacgcctccttcatagatggctatcggcagcagaaggcctacatcgctacccagggaccccttgcagaaaccacagaggacttttggcgcatgttgtgggaaaacaacagcaccatcgtggttatgttgacaaagctgcgggagatgggcagagaaaaatgtcatcagtattggcctgccgagaggtctgccaggtaccagtactttgtggttgaccccatggctgaatacaacatgcctcagtacattctcagagagttcaaggtgactgacgccagagatggacagagcagaacggtccggcaattccagtttacggattggcctgaacaaggagtccccaaatcgggagaggggttcatcgattttatcgggcaagtacataagactaaggagcaatttggacaggacggccccatctcagttcactgctccgctggggtgggacgcaccggagtgttcattactttgagcatcgtactggagcggatgcgctatgagggagtagtcgacatattccagacagttaagatgttgcggactcagaggccagccatggttcagactgaagatgaataccagttttgttatcaagccgctctggagtatcttggctccttcgatcattatgccacatag

SEQ ID NO: 294915 - DNA, 4593 bp, Artificial Sequence
  derived and/or modified sequence
atggcccccacctggggccctggcatggtgtctgtggtgggccccatgggcctgctggtggtgctgctggtgggcggctgtgccgctgaggagcccccacgcttcatcaaggagcccaaggaccagattggagtgtctgggggcgtggccagctttgtgtgccaggccactggagaccccaagccccgggtgacctggaacaagaagggcaagaaggtgaacagccagagatttgagaccattgaatttgatgagagcgctggagctgtgctgcgcatccagcccctgcggaccccaagagatgaaaatgtgtatgaatgtgtggcccagaacagcgtgggggagatcaccgtgcacgccaagctgactgtgctgcgggaggaccagctgcccagcggcttccccaacatcgacatgggcccccagctgaaggtggtggagaggaccaggacagccaccatgctgtgtgccgccagcggcaacccagaccctgagatcacctggttcaaggacttcctgcctgtggaccccagcgccagcaatggccgcatcaagcagctgcggagtgaccaggccttcagccacctgcccaccggggccctgcagatcgagagcagcgaggagacagaccagggcaagtatgaatgtgtggccaccaacagcgctggggtgcgctacagcagccctgccaacctgtatgtgcgggtgtggaggacagtgagaagagtggccccccgcttcagcatcctgcccatgagccatgagatcatgcctggaggaaatgtgaacatcacctgtgtggccgtgggcagccccatgccctacgtgaagtggatgcagggcgctgaggacctgaccccagaagatgacatgcctgtgggcagaaatgtgctggagctgacagatgtgaaggacagcgccaactacacctgtgtggccatgagcagcctgggcgtcatcgaggccgtggcccagatcaccgtgaagagcctgcccaaggcccctggcacccccatggtgacagagaacacagccaccagcatcaccatcacctgggacagcggcaacccagaccctgtgtcctactacgtgattgagtacaagagcaagagccaggacggcccctaccagatcaaggaggacatcaccaccacccgctacagcattggaggcctgagccccaacagtgaatatgagatctgggtgtctgctgtgaacagcatcggccagggcccccccagcgagagcgtggtgaccaggactggagagcaggccccagccagcgcccccagaaatgtgcaggccaggatgctgagcgccaccaccatgattgtgcagtgggaggagcctgtggagcccaacggcctcatccggggctacagagtgtactacaccatggagcctgagcaccctgtgggcaactggcagaagcacaacgtggatgacagcctgctgaccaccgtgggcagcctgctggaggatgagacctacacagtgcgggtgctggccttcacctctgtgggagatggccccctgagtgaccccatccaggtgaagacccagcagggcgtgcccggccagcccatgaacctgcgggcagaggcccggtctgagaccagcatcaccctgtcctggagccccccccggcaggagagcatcatcaagtatgagctgctcttccgggagggggaccacggccgggaggtgggccgcacctttgaccccaccaccagctatgtggtggaggacctgaagcccaacacagaatatgccttccggctggccgcccggagcccccagggcctgggcgccttcacccctgtggtgcggcagaggaccctgcagagcatcagccccaagaacttcaaggtgaagatgatcatgaagacctctgtgctgctgtcctgggagttcccagacaactacaacagccccaccccctacaagatccagtacaacggcctgaccctggatgtggatggccgcaccaccaagaagctgatcacccacctgaagccccacaccttctacaactttgtgctgaccaacagaggcagcagcctgggcggcctgcagcagacagtgacagcctggacagccttcaacctgctgaatggcaagcccagcgtggcccccaagccagatgctgatggcttcatcatggtgtacctgcctgatggccagagccctgtgcctgtgcagagctacttcatcgtgatggtgcccctgaggaagagccggggcggccagttcctgacccccctgggcagccctgaggacatggacctggaggagctgatccaggacatcagccggctgcagaggaggagcctgcggcacagccggcagctggaggtgccccggccctacatcgccgcccgcttctctgtgctgccccccaccttccaccctggggaccagaagcagtatggaggctttgacaacagaggcctggagcccggccaccgctacgtgctgtttgtgctggccgtgctgcagaagtctgagcccacctttgctgccagccccttcagtgaccccttccagctggacaacccagacccccagcccatcgtggatggagaggagggcctcatctgggtgattggccctgtgctggccgtggtgttcatcatctgcatcgtgattgccatcctgctgtacaagaacaagccagacagcaagaggaaggacagcgagcccaggaccaagtgcctgctgaacaatgctgacctggccccccaccaccccaaggaccctgtggagatgaggcgcatcaacttccagaccccagattctggcctgcggagccccctgcgggagcccggcttccactttgagagcatgctgagccacccccccatccccatcgctgacatggccgagcacacagagcggctgaaggccaatgacagcctgaagctgagccaggagtatgagagcattgaccccggccagcagttcacctgggagcacagcaacctggaggtgaacaagcccaagaacagatatgccaacgtcatcgcctatgaccacagcagggtcatcctgcagcccatcgagggcatcatgggcagtgactacatcaatgccaactacgtggatggctaccgctgccagaatgcctacatcgccacccagggccccctgcctgagaccttcggggacttctggaggatggtgtgggagcagaggtctgccaccatcgtgatgatgacccggctggaggagaagagccgcatcaagtgtgaccagtactggcccaacagaggaacagagacctacggcttcatccaggtgaccctgctggacaccatcgagctggccaccttctgtgtgaggaccttcagcctgcacaagaatggcagcagcgagaagcgggaggtgcggcagttccagttcaccgcctggccagaccacggcgtgcctgagtaccccacccccttcctggccttcctgcggcgggtgaagacctgcaaccccccagatgctggccccatcgtggtgcactgcagcgctggggtgggccgcacaggctgcttcatcgtgattgatgccatgctggagcgcatcaagccagagaagacagtggatgtgtatggccacgtgaccctgatgaggagccagaggaactacatggtgcagacagaggaccagtacagcttcatccacgaggccctgctggaggccgtgggctgcggcaacacagaggtgcctgcccggagcctgtatgcctacatccagaagctggcccaggtggagcctggagagcacgtgacaggcatggagctggagttcaagaggctggccaacagcaaggcccacaccagccgcttcatcagcgccaacctgccctgcaacaagttcaagaaccggctggtgaacatcatgccctatgagagcaccagggtgtgcctgcagcccatccggggcgtggagggcagtgactacatcaatgccagcttcattgatggctaccggcagcagaaggcctacatcgccacccagggccccctggccgagaccacagaggacttctggaggatgctgtgggagaacaacagcaccatcgtggtgatgctgaccaagctgcgggagatgggccgggagaagtgccaccagtactggccagctgagaggtctgcccgctaccagtactttgtggtggaccccatggccgagtacaacatgccccagtacatcctgcgggagttcaaggtgacagatgccagagatggccagagcaggacagtgcggcagttccagttcacagactggccagagcagggcgtgcccaagagcggggagggcttcatcgacttcatcggccaggtgcacaagaccaaggagcagtttggccaggacggccccatctctgtgcactgcagcgctggggtgggccgcactggagtcttcatcaccctgagcatcgtgctggagaggatgagatatgagggcgtggtggacatcttccagacagtgaagatgctgcggacccagaggcctgccatggtgcagacagaagatgagtaccagttctgctaccaggccgccctggagtacctgggcagctttgaccactacgccacctag

SEQ ID NO: 294916 - DNA, 4593 bp, Artificial Sequence
  derived and/or modified sequence
atggcccccacctggggccccggcatggtgagcgtggtgggccccatgggcctgttggttgtccttctggtcgggggttgtgccgccgaggagcctccccggtttatcaaagagcccaaagaccagataggagtgagcgggggcgttgcttcgttcgtttgtcaggccacaggcgaccctaagcctcgggtgacatggaataagaagggcaagaaggtgaacagccaaaggtttgagacaatcgagttcgatgagagtgcaggcgcagttctgcggatccaaccccttcgaacacccagagacgagaatgtatacgagtgtgtggcccagaattcagttggagaaattactgtccatgcgaaactgacagtgttacgtgaggatcaactgccttccggtttcccaaacatagatatggggccacagctcaaagttgtggaaagaaccagaacggccaccatgctttgcgcagcctcaggtaacccagatccagagattacttggtttaaagatttcctccccgtggacccatcagctagcaatggccgcatcaagcaactcaggtctgatcaggccttcagccacctgcctacaggagccctgcagatcgagtcttccgaagaaaccgatcagggaaaatacgagtgcgtggccaccaattcggccggcgtacggtattcttcaccagccaatctctatgttagggtctggcgtacagtccgacgggtcgccccacgcttctctatacttcccatgagtcatgagattatgccagggggcaatgtcaacattacatgcgtagcagtgggcagccccatgccttatgtgaaatggatgcagggtgcggaagatctgacacctgaggacgatatgccagtgggcagaaatgtacttgaactaaccgacgtgaaagacagtgcaaactatacatgcgtagctatgtcttctctcggcgtcatcgaagccgtagctcagattaccgtgaagagcctccccaaggcccctggaacacccatggtgaccgaaaacaccgccacatcaattactatcacctgggactctgggaatcctgaccctgtgagctactacgtgatcgagtataaatccaagagccaggacggaccttatcagatcaaagaagatataaccactactcgttattctatcggtggcttaagcccaaattctgagtacgagatatgggtcagcgcggtcaatagcattggtcagggacccccaagcgaatcagtggtcacaagaacaggagagcaagcacccgccagcgctccgcggaatgttcaggcccggatgctctctgctactacaatgattgtgcaatgggaggaaccagtggaacccaacgggctcattcgtgggtatagagtgtattacaccatggagccagaacacccagtgggaaattggcagaagcataatgtcgacgattctttgctaactacggttggatcccttcttgaagacgaaacctacaccgttcgagttctggcgttcacctctgtcggagacgggccgctctcagaccctatccaggtcaaaacgcagcagggcgtacccggtcagcccatgaatctccgagccgaagctcgatctgagacctccatcaccctttcttggtctccacctcgccaggaaagcatcatcaaatatgagctcctgttcagagagggggatcacggacgcgaggtgggtcggaccttcgatcctacaacttcctatgttgtggaggacctcaaacctaataccgaatatgcctttcgcttggccgcaaggtcacctcagggactgggggcctttactccagtcgtgcgccagaggacactgcaatctattagccctaaaaactttaaggttaagatgatcatgaaaaccagcgtgctcctgagttgggagtttcctgacaactataactctccaactccatataaaatccagtacaacggtctgactttggacgttgatggccggactaccaaaaaacttatcacacatcttaagcctcacacattctataactttgtgctaaccaatcgaggcagctccctcggtggactccagcaaaccgttacagcttggactgcctttaatctcctcaatggcaagccaagtgtggctcctaagcccgatgctgacggctttattatggtgtacctccctgacggccaatctcctgtgcccgtgcagtcttactttatcgtgatggtgccgttgcgaaaatctagaggaggtcaattcctcacaccgctcggctcgcccgaggacatggacctggaggaactgatccaagatatcagccgactgcaacgtcgctctcttcggcactctagacaacttgaagtgccaagaccttacatagccgccagattctcggtcctaccaccgaccttccaccccggcgatcaaaagcagtacggagggtttgacaacagaggtctcgagccaggccataggtacgtcttgtttgtgcttgccgtcttacagaagagcgaacctacatttgcagcatctcctttttctgacccattccagctggataatccagacccacagccaattgtcgatggcgaggagggtctgatctgggtaatcgggcctgtgctggcagtcgtcttcatcatctgcattgtaattgcaatcctactgtataaaaacaaacccgacagcaagcgcaaagattccgagcctaggacaaaatgtctcctgaataacgccgatctggctccccatcaccccaaagacccggttgaaatgaggagaattaactttcagacccctgactcaggccttagatctcctcttagagagcccgggtttcactttgagtccatgcttagccaccccccaatccctatagcagatatggcggaacacacagaaagattgaaagcgaatgattcacttaaattgtctcaggagtacgagtcaatcgacccaggtcagcagtttacttgggagcattccaatctcgaggtcaataaacccaaaaaccgctacgcaaatgtcatagcatatgaccacagccgggtcattttgcaacctattgaggggatcatggggagcgactacattaacgccaattatgtggatgggtaccgctgtcaaaacgcttacatcgccactcagggccccttacccgaaacgttcggcgacttttggcgtatggtatgggaacagcgatctgccacgattgtcatgatgaccagactcgaggaaaagtcgagaatcaagtgtgatcagtactggccgaatcgtggtactgaaacctatgggtttatccaagtgaccttgctcgacaccatcgagttggccacattctgtgtgcgtaccttttctctccacaaaaatgggtcatcagagaaacgggaagtaagacagtttcaattcacagcatggccagatcatggcgtccctgagtaccccacgcctttcctggcattcctaagacgagtcaagacctgcaaccctcctgatgccggcccaattgtggtccattgcagtgcgggagtgggcaggacaggctgttttatagtgattgacgcgatgctggagcggattaagccagaaaaaactgtagacgtgtatggacatgtaaccctgatgcgctcccagcgcaattatatggtgcagaccgaggaccagtactccttcattcatgaggccttgctggaggcagttggctgtggaaataccgaggtgccggcgagatctttgtacgcctacattcaaaagctcgctcaagttgaaccaggcgaacacgttaccggtatggagctcgagtttaaaaggctcgccaattccaaggcccatacctcccggtttatctcagccaatctaccatgcaacaagttcaagaaccgcctggtgaacattatgccttatgaatctacccgagtctgcctccaacctattaggggcgtggagggttctgattatatcaacgcgagctttatcgacggctaccgacaacaaaaagcctatatagctacgcagggacctctcgccgaaacaaccgaggacttctggcggatgctatgggagaacaattccacaatcgtggtcatgctgaccaagctccgggagatgggtagagagaagtgccaccaatattggcccgctgagcggtccgcgcgctaccagtatttcgtggttgacccaatggctgagtacaacatgccgcaatatatattgcgagaatttaaggttactgacgctcgagatggccaatctcggactgtgcgacagttccagtttaccgactggccagaacagggcgtgcccaagagcggagagggcttcatcgatttcatcggccaggtgcacaagacaaaagaacagttcgggcaagacggccccatctccgtccactgttccgctggcgtgggtagaacgggggtgtttataactttgtctattgtcttggagaggatgcgatacgaaggggttgtggacatcttccagaccgttaagatgctgcgtactcagaggcccgccatggtgcagactgaagacgagtaccaattctgttaccaggctgccctggaatacctcggcagctttgaccactatgccacgtag

SEQ ID NO: 294917 - DNA, 4593 bp, Artificial Sequence
  derived and/or modified sequence
atggcaccaacatggggtcccggaatggtaagcgttgtggggcctatgggcctgctggtagttttgctggtcggtgggtgcgcagccgaagaacctccgagattcataaaggagcccaaggaccaaatcggcgtcagcgggggagtagcctcatttgtgtgtcaggcaaccggcgatccgaagcctcgcgtgacatggaacaaaaagggcaaaaaggttaatagccagagattcgagaccatagaattcgatgagagtgcaggtgctgtcctgaggattcagcccctgagaaccccccgagatgaaaatgtgtacgagtgcgtcgctcagaatagtgttggcgagattacagtccacgccaaactaaccgtgctgcgagaggaccagctcccgagcggatttcctaatatcgacatgggccctcaactcaaagtggtggaaaggacccggacagccacaatgctttgtgcagcttccggcaaccctgacccagaaattacctggttcaaagattttcttcctgtcgatccaagcgcatcgaacggcagaatcaaacaactgagaagcgatcaggccttcagccacctcccaacaggagccctgcagattgagagctctgaggagaccgaccaagggaaatacgagtgtgttgccacaaacagcgctggcgtcagatatagctctccagccaatctgtacgtgcgcgtgtggcgcacagtgcggcgagtcgcaccgagattttcaatcctgcccatgtctcacgagatcatgccaggcggaaacgtgaatattacctgcgtggccgtaggctcaccaatgccatacgtcaaatggatgcagggggcagaggacttgacaccagaggatgacatgcctgtgggcaggaacgtcctcgaacttacagatgtaaaggatagcgccaactatacgtgcgtggccatgtcttccctcggggtaatcgaggccgttgcccagataacagttaagagcctcccgaaggctcccggaaccccaatggttaccgagaacactgcaactagtataaccatcacatgggattccggcaaccctgaccctgtctcttactatgttatcgagtataaatccaagtcacaggacggcccttatcagattaaggaggacatcacaacaacaaggtactccatcggcggactgagtcctaatagtgagtatgagatctgggtgagcgccgtcaatagtatcggacagggcccaccatcggagtctgtggtaacacggacaggcgagcaggctcctgccagcgcccctagaaacgtgcaggcaaggatgctgtctgccacaacaatgattgtgcagtgggaagaacctgtggagcctaatggcctgattagggggtaccgcgtgtattacacgatggaacctgagcatcctgtcggcaattggcagaagcacaacgtagatgatagtcttcttacaactgtgggctcacttctggaggatgaaacgtatacagtcagggtccttgcctttacatcggtgggtgacgggccactcagtgatcccatccaagtcaagacacagcagggagttcctggtcagcctatgaacctgcgtgctgaagccagatctgagacttcaatcacactctcctggtcgcctccacggcaagagagcatcattaagtacgagcttctgttccgcgaaggagaccacggacgcgaagtggggagaaccttcgatcccaccacatcttatgtagttgaggacctgaagccaaacaccgagtatgcctttagactcgccgcacggagcccccaaggactgggcgcttttacgccagtggtccggcaacgtacccttcagagtatcagcccaaagaacttcaaggtgaaaatgatcatgaagacatccgtgcttctgtcctgggaattccccgacaactataattctccaacaccttacaaaattcaatacaacgggttgacactggacgtagacggaaggacaactaagaaacttatcactcacctcaaaccccacaccttttataattttgtgctgacaaaccggggtagctccttaggcggattgcaacagacagtgaccgcctggacagcctttaacctgctgaacggcaaacccagtgtagcgcctaagcctgacgcagacggattcatcatggtttacctccctgatggacagtcccccgtgcctgtccagagctatttcatcgtgatggtgccgctgagaaaatctagaggcggacagttcctcaccccactgggatccccagaagacatggaccttgaagagctgatccaggatatttcgagactgcagcgcagatccctcaggcattctcgccagttggaagtgccacggccatatatagccgcacgcttctcagtactgcctcctacattccaccccggtgaccagaagcagtacggaggcttcgacaataggggcctggagccaggtcatagatacgtgctgttcgtattggccgtcctgcagaagagtgaaccaactttcgccgcatccccgttctccgatccctttcagctggacaaccccgacccccagccaattgtggacggcgaggaaggcctgatctgggtcatcggaccagtgctcgccgtcgttttcatcatatgtattgtcattgcgattcttctgtacaaaaacaagcccgattcaaagagaaaggacagcgaaccgaggaccaagtgtctcttgaacaatgcagatttggctccgcaccaccccaaggatcctgtcgagatgcgcaggattaatttccagacacctgactctggactccgcagtcctctgagggagccgggatttcattttgaaagcatgctgagtcacccgccaattcctattgccgacatggccgagcatacagagcgactgaaggcgaatgactcccttaagttgagtcaagaatacgaatctatagatccgggacagcaattcacatgggagcacagcaatcttgaggtgaataaacctaagaaccgctatgcgaatgtcatcgcttacgaccattcgcgcgttattctgcagcccatcgaaggaatcatgggcagcgattacattaacgctaattacgtcgacgggtatcgatgtcaaaacgcttacatagcgacacagggaccactgcctgaaacctttggggatttctggcgaatggtatgggagcagcggtcagcaacaatcgttatgatgacccgcttggaggagaagtccagaatcaagtgcgaccagtattggccgaacaggggcacagagacctacggcttcattcaggtgacactacttgacactattgaactggctaccttttgtgtccgaaccttctctctacacaagaacggatcaagtgaaaagcgagaggtacgccaattccagttcaccgcttggccagaccacggagtgcccgaatatcccacacctttccttgcttttcttaggcgcgtcaagacctgtaatccacccgatgccggacccattgtggtgcactgttccgctggggtgggccgtactggatgcttcatcgtgattgatgccatgctggaaagaataaaacccgagaagaccgtggacgtgtatggacatgtgacactaatgcgttctcagcgcaactatatggttcagaccgaggaccagtatagcttcattcacgaagcgctgctggaggccgtgggttgtggcaacacagaggtacctgctcgcagcctgtatgcatatattcaaaagctggctcaggtcgagccaggggaacatgtcaccggaatggagctggagttcaagagacttgccaattccaaagcccatacctcgagattcatatcagccaaccttccatgcaataaatttaagaataggcttgtgaatataatgccctacgagagcactcgggtatgtcttcagcccatccgtggagtagaggggtccgattatattaacgcctcctttattgacggctaccgtcagcagaaggcctacattgctacacaggggccactggccgaaaccaccgaggacttttggaggatgttatgggaaaataactcaacaatcgtggtgatgctgacgaagttaagggagatgggccgtgagaagtgtcaccagtactggccagccgagcgatccgctagatatcagtatttcgtcgttgaccctatggccgagtacaacatgccccagtatattctgagagagtttaaggtcactgatgcacgcgacggccagtcccgaacagtgcggcagtttcagttcacagattggcccgagcagggggtgcctaagagtggggagggatttatcgatttcatcggacaggtgcataagacgaaagagcagtttgggcaggacggcccaatcagcgtacattgttcagctggggtgggcaggacgggggtatttatcacgttaagcatcgttctagaaagaatgaggtacgagggagtggtggatatctttcaaacggtaaagatgctccgaactcagagacccgctatggtgcagacggaggatgagtaccagttctgctaccaggccgcattggagtatctgggttcctttgatcactacgctacctag

SEQ ID NO: 294918 - DNA, 6093 bp, Artificial Sequence
  derived and/or modified sequence
cctcgcgccgcccgcccggcagcccggccggcgcgcgcacgccgcgagccgctggcgctcgggctccgctcggatcccatgcaacagccacgatgtgaagcggggcagagccgggggagcccagcccagccagcctccagacgttgccccatctgacgctcggctcgaggcctctctgtgagggaccggggggccatccccctccagggcggagatcggaggtcgctgccaagcatggcgcccacctggggccctggcatggtgtctgtggttggtcccatgggcctccttgtggtcctgctcgttggaggctgtgcagcagaagagccccccaggtttatcaaagaacccaaggaccagatcggcgtgtcggggggtgtggcctctttcgtgtgtcaggccacgggtgaccccaagccacgagtgacctggaacaagaagggcaagaaggtcaactctcagcgctttgagacgattgagtttgatgagagtgcaggggcagtgctgaggatccagccgctgaggacaccgcgggatgaaaacgtgtacgagtgtgtggcccagaactcggttggggagatcacagtccatgccaagcttactgtcctccgagaggaccagctgccctctggcttccccaacatcgacatgggcccacagttgaaggtggtggagcggacacggacagccaccatgctctgtgcagccagcggcaaccctgaccctgagatcacctggttcaaggacttcctgcctgtggatcctagtgccagcaatggacgcatcaaacagctgcgatcagaccaagctttttcccatcttcccacaggagccctgcagattgaaagcagtgaggaaaccgaccagggcaaatatgagtgtgtggccaccaacagcgccggcgtgcgctactcctcacctgccaacctctacgtgcgagtttggagaacagtccgccgcgtggccccgcgcttctccatcctgcccatgagccacgagatcatgccagggggcaacgtgaacatcacctgcgtggccgtgggctcgcccatgccatacgtgaagtggatgcagggggccgaggacctgacccccgaggatgacatgcccgtgggtcggaacgtgctggaactcacagatgtcaaggactcggccaactacacctgcgtggccatgtccagcctgggcgtcattgaggcggttgctcagatcacggtgaaatctctccccaaagctcccgggactcccatggtgactgagaacacagccaccagcatcaccatcacgtgggactcgggcaacccagatcctgtgtcctattacgtcatcgaatataaatccaagagccaagacgggccgtatcagattaaagaggacatcaccaccacacgttacagcatcggcggcctgagccccaactcggagtacgagatctgggtgtcggccgtcaactccatcggccaggggccccccagcgagtccgtggtcacccgcacaggcgagcaggccccggccagcgcgccgcggaacgtgcaagcccggatgctcagcgcgaccaccatgattgtgcagtgggaggagccggtggagcccaacggcctgatccgcggctaccgcgtctactacaccatggaaccggagcaccccgtgggcaactggcagaagcacaacgtggacgacagcctgctgaccaccgtgggcagcctgctggaggacgagacctacaccgtgcgggtgctcgccttcacctccgtcggcgacgggcccctctcggaccccatccaggtcaagacgcagcagggagtgccgggccagcccatgaacctgcgggccgaggccaggtcggagaccagcatcacgctgtcctggagccccccgcggcaggagagtatcatcaagtacgagctcctcttccgggaaggcgaccatggccgggaggtgggaaggaccttcgacccgacgacttcctacgtggtggaggacctgaagcccaacacggagtacgccttccgcctggcggcccgctcgccgcagggcctgggcgccttcacccccgtggtgcggcagcgcacgctgcagtccatctcgcccaagaacttcaaggtgaaaatgatcatgaagacatcagttctgctcagctgggagttccctgacaactacaactcacccacaccctacaagatccagtacaatgggctcacactggatgtggatggccgtaccaccaagaagctcatcacgcacctcaagccccacaccttctacaactttgtgctgaccaatcgcggcagcagcctgggcggcctccagcagacggtcaccgcctggactgccttcaacctgctcaacggcaagcccagcgtcgcccccaagcctgatgctgacggcttcatcatggtgtatcttcctgacggccagagccccgtgcctgtccagagctatttcattgtgatggtgccactgcgcaagtctcgtggaggccaattcctgaccccgctgggtagcccagaggacatggatctggaagagctcatccaggacatctcacggctacagaggcgcagcctgcggcactcgcgtcagctggaggtgccccggccctatattgcagctcgcttctctgtgctgccacccacgttccatcccggcgaccagaagcagtatggcggcttcgataaccggggcctggagcccggccaccgctatgtcctcttcgtgcttgccgtgcttcagaagagcgagcctacctttgcagccagtcccttctcagaccccttccagctggataacccggacccccagcccatcgtggatggcgaggaggggcttatctgggtgatcgggcctgtgctggccgtggtcttcataatctgcattgtcattgctatcctgctctacaagaacaaacccgacagtaaacgcaaggactcagaaccccgcaccaaatgcctcctgaacaatgccgacctcgcccctcaccaccccaaggaccctgtggaaatgagacgcattaacttccagactccagattcaggcctcaggagccccctcagggagccggggtttcactttgaaagcatgcttagccacccgccaattcccatcgcagacatggcggagcacacggagcggctcaaggccaacgacagcctcaagctctcccaggagtatgagtccatcgaccctggacagcagttcacatgggaacattccaacctggaagtgaacaagccgaagaaccgctatgccaacgtcatcgcctatgaccactcccgtgtcatcctccagcccattgaaggcatcatgggcagtgattacatcaatgccaactacgtggacggctaccggtgtcagaacgcgtacattgccacgcaggggccgctgcctgagacctttggggacttctggcgtatggtgtgggagcagcggtcggcgaccatcgtcatgatgacgcggctggaggagaagtcacggatcaagtgtgatcagtattggcccaacagaggcacggagacctacggcttcatccaggtcacgttgctagataccatcgagctggccacattctgcgtcaggacattctctctgcacaagaatggctccagtgagaaacgcgaggtccgccagttccagtttacggcgtggccggaccatggcgtgcccgaatacccaacgcccttcctggctttcctgcggagagtcaagacctgcaacccgccagatgccggccccatcgtggttcactgcagtgccggtgtgggccgcacaggctgctttatcgtcatcgacgccatgcttgagcggatcaagccagagaagacagtcgatgtctatggccacgtgacgctcatgaggtcccagcgcaactacatggtgcagacggaggaccagtacagcttcatccacgaggccctgctggaggccgtgggctgtggcaacacagaagtgcccgcacgcagcctctatgcctacatccagaagctggcccaggtggagcctggcgaacacgtcactggcatggaactcgagttcaagcggctggctaactccaaggcccacacgtcacgcttcatcagtgccaatctgccttgtaacaagttcaagaaccgcctggtgaacatcatgccctatgagagcacacgggtctgtctgcaacccatccggggtgtggagggctctgactacatcaacgccagcttcattgatggctacaggcagcagaaggcctacatcgcgacacaggggccgctggcggagaccacggaagacttctggcgcatgctgtgggagaacaattcgacgatcgtggtgatgctgaccaagctgcgggagatgggccgggagaagtgtcaccagtactggccggccgagcgctctgcccgctaccagtactttgtggtagatccgatggcagaatacaacatgcctcagtatatcctgcgagagttcaaggtcacagatgcccgggatggccagtcccggactgtccggcagttccagttcacagactggccggaacagggtgtgccaaagtcgggggagggcttcatcgacttcattggccaagtgcataagactaaggagcagtttggccaggacggccccatctctgtccactgcagtgccggcgtgggcaggacgggcgtcttcatcacgcttagcatcgtgctggagcggatgcggtatgaaggcgtggtggacatctttcagacggtgaagatgctacgaacccagcggccggccatggtgcagacagaggatgagtaccagttctgttaccaggcggcactggagtacctcggaagctttgaccactatgcaacctaaagccatggttccccccaggcccgacaccactggccccggatgcctctgcccctcccgggcggacctcctgaggcctggacccccagtgggcagggcaggaggtggcagcggcagcagctgtgtttctgcaccatttccgaggacgacgcagcccctcgagcccccccaccggccccggccgccccagcgacctccctggcaccggccgccgccttcaaatacttggcacattcctcctttccttccaattccaaaaccagattccggggtggggggtggggggatggtgagcaaataggagtgctccccagaaccagaggagggtggggcacagaccatagacggacccctcgtcctcccccagcggtggtagggggacccggggggctcctccccgctctgcagcctggggacactgggctgggaccagaatccagctttcttttaaaactctcagtgtaactgtatcccgtgacatttcattttttttaaatagtgtatttttttttccatttttttttttaagagaaacaaacaaaagactcgccagtcaatgactttcaaagagaactaactttggcttattcatattctgttcaaagacagtctattttttcactgtagaaagcgtccttgtgtgatagttacgttcgcaaacgcgcacgccaggcccatggctgtaccttggcttttttttttttttttttttttttaatttttcctaccatcagaaagtgtgctttgctcacagaagaatgggatgtccttttttctttcttggctttttttttccccctttttgtttcatttttataaattaaattttcagacatatcaaatacagttctgagggtaaggtcatgggggagctcggacccagtggcgttgggtgcggttgagggggacgctgctgtaagaggagagagatgacagtggtcctcctctgagagcctgagctgtctccccgtctcccgcccccaaggagacagagaggatcctacttcttcggggacagtggctgtatggctgtgctgccccacatcagggaccctttccccctgggactgtggggcagtttgggagcaaaaccagaaggacaggcccccctctacccgcctaccctgagcaagcgagttgttcctctttgtacaagggcaggtctgcggttactttcaacactgtttattccagcggaagcagccgggtggttttcccacccccgtgtatgtagatatatcgactttgtattaaaggaagatcgtctga

SEQ ID NO: 294919 - DNA, 4593 bp, Artificial Sequence
  derived and/or modified sequence
atggcccccacctggggccccggcatggtgagcgtggtgggccccatgggcctgctggtggtgctgctggtgggcggctgcgccgccgaggagccccccagattcatcaaggagcccaaggaccagatcggcgtgagcggcggcgtggccagcttcgtgtgccaggccaccggcgaccccaagcccagagtgacctggaacaagaagggcaagaaggtgaacagccagagattcgagaccatcgagttcgacgagagcgccggcgccgtgctgagaatccagcccctgagaacccccagagacgagaacgtgtacgagtgcgtggcccagaacagcgtgggcgagatcaccgtgcacgccaagctgaccgtgctgagagaggaccagctgcccagcggcttccccaacatcgacatgggcccccagctgaaggtggtggagagaaccagaaccgccaccatgctgtgcgccgccagcggcaaccccgaccccgagatcacctggttcaaggacttcctgcccgtggaccccagcgccagcaacggcagaatcaagcagctgagaagcgaccaggccttcagccacctgcccaccggcgccctgcagatcgagagcagcgaggagaccgaccagggcaagtacgagtgcgtggccaccaacagcgccggcgtgagatacagcagccccgccaacctgtacgtgagagtgtggagaaccgtgagaagagtggcccccagattcagcatcctgcccatgagccacgagatcatgcccggcggcaacgtgaacatcacctgcgtggccgtgggcagccccatgccctacgtgaagtggatgcagggcgccgaggacctgacccccgaggacgacatgcccgtgggcagaaacgtgctggagctgaccgacgtgaaggacagcgccaactacacctgcgtggccatgagcagcctgggcgtgatcgaggccgtggcccagatcaccgtgaagagcctgcccaaggcccccggcacccccatggtgaccgagaacaccgccaccagcatcaccatcacctgggacagcggcaaccccgaccccgtgagctactacgtgatcgagtacaagagcaagagccaggacggcccctaccagatcaaggaggacatcaccaccaccagatacagcatcggcggcctgagccccaacagcgagtacgagatctgggtgagcgccgtgaacagcatcggccagggcccccccagcgagagcgtggtgaccagaaccggcgagcaggcccccgccagcgcccccagaaacgtgcaggccagaatgctgagcgccaccaccatgatcgtgcagtgggaggagcccgtggagcccaacggcctgatcagaggctacagagtgtactacaccatggagcccgagcaccccgtgggcaactggcagaagcacaacgtggacgacagcctgctgaccaccgtgggcagcctgctggaggacgagacctacaccgtgagagtgctggccttcaccagcgtgggcgacggccccctgagcgaccccatccaggtgaagacccagcagggcgtgcccggccagcccatgaacctgagagccgaggccagaagcgagaccagcatcaccctgagctggagcccccccagacaggagagcatcatcaagtacgagctgctgttcagagagggcgaccacggcagagaggtgggcagaaccttcgaccccaccaccagctacgtggtggaggacctgaagcccaacaccgagtacgccttcagactggccgccagaagcccccagggcctgggcgccttcacccccgtggtgagacagagaaccctgcagagcatcagccccaagaacttcaaggtgaagatgatcatgaagaccagcgtgctgctgagctgggagttccccgacaactacaacagccccaccccctacaagatccagtacaacggcctgaccctggacgtggacggcagaaccaccaagaagctgatcacccacctgaagccccacaccttctacaacttcgtgctgaccaacagaggcagcagcctgggcggcctgcagcagaccgtgaccgcctggaccgccttcaacctgctgaacggcaagcccagcgtggcccccaagcccgacgccgacggcttcatcatggtgtacctgcccgacggccagagccccgtgcccgtgcagagctacttcatcgtgatggtgcccctgagaaagagcagaggcggccagttcctgacccccctgggcagccccgaggacatggacctggaggagctgatccaggacatcagcagactgcagagaagaagcctgagacacagcagacagctggaggtgcccagaccctacatcgccgccagattcagcgtgctgccccccaccttccaccccggcgaccagaagcagtacggcggcttcgacaacagaggcctggagcccggccacagatacgtgctgttcgtgctggccgtgctgcagaagagcgagcccaccttcgccgccagccccttcagcgaccccttccagctggacaaccccgacccccagcccatcgtggacggcgaggagggcctgatctgggtgatcggccccgtgctggccgtggtgttcatcatctgcatcgtgatcgccatcctgctgtacaagaacaagcccgacagcaagagaaaggacagcgagcccagaaccaagtgcctgctgaacaacgccgacctggccccccaccaccccaaggaccccgtggagatgagaagaatcaacttccagacccccgacagcggcctgagaagccccctgagagagcccggcttccacttcgagagcatgctgagccacccccccatccccatcgccgacatggccgagcacaccgagagactgaaggccaacgacagcctgaagctgagccaggagtacgagagcatcgaccccggccagcagttcacctgggagcacagcaacctggaggtgaacaagcccaagaacagatacgccaacgtgatcgcctacgaccacagcagagtgatcctgcagcccatcgagggcatcatgggcagcgactacatcaacgccaactacgtggacggctacagatgccagaacgcctacatcgccacccagggccccctgcccgagaccttcggcgacttctggagaatggtgtgggagcagagaagcgccaccatcgtgatgatgaccagactggaggagaagagcagaatcaagtgcgaccagtactggcccaacagaggcaccgagacctacggcttcatccaggtgaccctgctggacaccatcgagctggccaccttctgcgtgagaaccttcagcctgcacaagaacggcagcagcgagaagagagaggtgagacagttccagttcaccgcctggcccgaccacggcgtgcccgagtaccccacccccttcctggccttcctgagaagagtgaagacctgcaacccccccgacgccggccccatcgtggtgcactgcagcgccggcgtgggcagaaccggctgcttcatcgtgatcgacgccatgctggagagaatcaagcccgagaagaccgtggacgtgtacggccacgtgaccctgatgagaagccagagaaactacatggtgcagaccgaggaccagtacagcttcatccacgaggccctgctggaggccgtgggctgcggcaacaccgaggtgcccgccagaagcctgtacgcctacatccagaagctggcccaggtggagcccggcgagcacgtgaccggcatggagctggagttcaagagactggccaacagcaaggcccacaccagcagattcatcagcgccaacctgccctgcaacaagttcaagaacagactggtgaacatcatgccctacgagagcaccagagtgtgcctgcagcccatcagaggcgtggagggcagcgactacatcaacgccagcttcatcgacggctacagacagcagaaggcctacatcgccacccagggccccctggccgagaccaccgaggacttctggagaatgctgtgggagaacaacagcaccatcgtggtgatgctgaccaagctgagagagatgggcagagagaagtgccaccagtactggcccgccgagagaagcgccagataccagtacttcgtggtggaccccatggccgagtacaacatgccccagtacatcctgagagagttcaaggtgaccgacgccagagacggccagagcagaaccgtgagacagttccagttcaccgactggcccgagcagggcgtgcccaagagcggcgagggcttcatcgacttcatcggccaggtgcacaagaccaaggagcagttcggccaggacggccccatcagcgtgcactgcagcgccggcgtgggcagaaccggcgtgttcatcaccctgagcatcgtgctggagagaatgagatacgagggcgtggtggacatcttccagaccgtgaagatgctgagaacccagagacccgccatggtgcagaccgaggacgagtaccagttctgctaccaggccgccctggagtacctgggcagcttcgaccactacgccacctag

SEQ ID NO: 294920 - protein, 485 aa, Artificial Sequence
  derived and/or modified sequence
MARLTESEARRQQQQLLQPRPSPVGSSGPEPPGGQPDGMKDLDAIKLFVGQIPRHLDEKDLKPLFEQFGRIYELTVLKDPYTGMHKGCAFLTYCARDSAIKAQTALHEQKTLPGMARPIQVKPADSESRGGRDRKLFVGMLNKQQSEEDVLRLFQPFGVIDECTVLRGPDGSSKGCAFVKFSSHTEAQAAIHALHGSQTMPGASSSLVVKFADTDKERTLRRMQQMVGQLGILTPSLTLPFSPYSAYAQALMQQQTTVLSTSGSYLSPGVAFSPCHIQQIGAVSLNGLPATPIAPASGLHSPPLLGTTAVPGLVAPITNGFAGVVPFPGGHPALETVYANGLVPYPAQSPTVAETLHPAFSGVQQYTAMYPTAAITPIAHSVPQPPPLLQQQQREGPEGCNLFIYHLPQEFGDTELTQMFLPFGNIISSKVFMDRATNQSKCFGFVSFDNPASAQAAIQAMNGFQIGMKRLKVQLKRPKDPGHPY

SEQ ID NO: 294921 - DNA, 1458 bp, Artificial Sequence
  derived and/or modified sequence
atggcaaggctcactgaaagcgaggcaaggaggcaacagcagcagctgctacagccacgccccagtccggtgggaagttcaggaccagagccccccggcgggcagcctgacggtatgaaggatttagacgcaatcaaactattcgtgggtcagattcctaggcatttggacgaaaaagacctgaaaccgctgttcgaacagtttggtagaatctatgagctcaccgtgttaaaggacccgtatacaggtatgcataagggatgtgcctttctcacgtactgtgcacgggactccgctatcaaggcccagactgctctgcacgaacagaaaacccttccaggcatggcacgtccgatccaggtcaagcctgctgatagcgagtcccgcggcggcagagatagaaagctgtttgtgggaatgctgaataagcagcagtccgaagaggacgtcctgcggctgtttcagccatttggagttatcgatgaatgcaccgtactcagaggccctgatggtagcagcaaggggtgcgctttcgttaaattctcaagtcataccgaggcccaggccgctatacatgccctccacggcagccagaccatgcctggcgctagctctagcctcgtggtgaagttcgccgacacagataaagaacgaaccctgaggcggatgcagcagatggtcggccagctcggcatcctgacccccagcctgacattaccgttctcgccatacagcgcgtatgcccaggctctgatgcagcagcaaaccactgtcctcagcactagtggatcatacctgagtcctggagttgcctttagtccctgccatattcaacagatcggagccgtgtcattaaacgggttgcccgccacgccgatagcccccgcctcagggcttcactctcctccactccttggcaccacagctgtccccgggctggtggctcccatcacaaatggctttgcaggcgtcgttccttttccgggcgggcaccccgccttagaaactgtatatgcgaacggactggtcccctacccagcacagtcccccaccgtggccgagactctgcacccggccttcagcggagtgcaacagtacactgccatgtatcctactgcggctattactccgatcgcccactctgtcccgcagccaccacctctgctgcaacaacaacaaagggaaggcccagaaggttgcaacctctttatttatcacctgccccaggaattcggagacactgagctgacacagatgttcttacctttcgggaatattatttcttcaaaggtcttcatggatagggccaccaaccagagtaagtgcttcggattcgtttccttcgacaaccctgcctctgcccaggcagcaattcaggcgatgaacgggttccaaattggtatgaaacgcttgaaggtccagctgaagcggcccaaggacccaggccatccttactag

SEQ ID NO: 294922 - DNA, 1458 bp, Artificial Sequence
  derived and/or modified sequence
atggcccggctgacagaaagtgaggcccggcggcagcagcagcagctgctgcagccccggcccagccctgtgggcagcagcggccctgagcccccaggcggccagccagatggcatgaaggacctggatgccatcaagctgtttgtgggccagatccccaggcacctggatgagaaggacctgaagcccctgtttgagcagtttggccgcatctatgagctgactgtgctgaaggacccctacacaggcatgcacaagggctgtgccttcctgacctactgtgcccgggacagcgccatcaaggcccagacagccctgcacgagcagaagaccctgcccggcatggcccggcccatccaggtgaagccagctgacagcgagagccggggcggccgggacaggaagctgtttgtgggcatgctgaacaagcagcagagcgaggaggatgtgctgcggctcttccagccctttggagtgattgatgagtgcaccgtgctgcggggcccagatggcagcagcaagggctgtgcctttgtgaagttcagcagccacacagaggcccaggccgccatccacgccctgcacggcagccagaccatgcctggggccagcagcagcctggtggtgaagtttgctgacacagacaaggagaggaccctgcggaggatgcagcagatggtgggccagctgggcatcctgacccccagcctgaccctgcccttcagcccctacagcgcctatgcccaggccctgatgcagcagcagaccaccgtgctgagcaccagcggcagctacctgagccctggggtggccttcagcccctgccacatccagcagatcggggctgtgtccctgaatggcctgcctgccacccccatcgccccagccagcggcctgcacagcccccccctgctgggcaccacagctgtgcccggcctggtggcccccatcaccaatggatttgctggggtggtgcccttccctgggggccacccagccctggagaccgtgtatgccaacggcctggtgccctacccagcccagagccccaccgtggccgagaccctgcacccagccttctctggagtgcagcagtacacagccatgtaccccacagctgccatcacccccatcgcccacagcgtgccccagcccccacccctgctgcagcagcagcagcgggagggccctgagggctgcaacctcttcatctaccacctgccccaggagtttggagacacagagctgacccagatgttcctgccctttggaaacatcatcagcagcaaggtgttcatggaccgggccaccaaccagagcaaatgttttggatttgtgtcctttgacaacccagccagcgcccaggccgccatccaggccatgaatggcttccagatcggcatgaagaggctgaaggtgcagctgaagaggcccaaggaccccggccacccctactag

SEQ ID NO: 294923 - DNA, 1458 bp, Artificial Sequence
  derived and/or modified sequence
atggcccggctgaccgagagcgaggcccggcggcagcagcagcagctgttgcaaccccggccgagtcccgttggctcatctggtccagagcctcccggtggccaacctgacggaatgaaagatctcgacgccataaaactgtttgtgggacagatcccccgccatctcgatgagaaagatctaaaaccactgtttgaacagtttggcagaatttacgaactcacggttcttaaagatccatacacaggcatgcacaaggggtgcgctttcctgacatactgcgctcgggactcagctattaaggcccagaccgctctgcatgagcagaagaccctccccggcatggcccgtcctattcaggtgaagccagccgactctgagagtaggggcggcagggatcgcaagctgttcgtggggatgctcaataagcaacagtccgaagaagacgtgttgcgcctattccaaccctttggggttattgacgaatgcacggttctccggggaccagacgggagctccaagggctgcgcctttgttaagtttagcagccataccgaggcacaggccgccatccatgcactgcacggctctcaaacaatgccaggcgctagtagtagtctcgtggtaaagttcgctgacacagataaagaaagaaccctgagacgaatgcagcagatggttggacaactgggtattcttacgccatcactgacactgcccttctcaccttactctgcctatgcccaagccctcatgcagcagcagacaactgtgctcagcactagcgggtcctatctgtcccctggcgtggccttcagcccatgtcacatccagcagattggagcagtcagcctgaatgggctgcctgcaacgccaattgcccctgccagcggcctgcactcaccaccgctgttgggcacaaccgctgtgcctgggcttgttgctcccatcaccaacggattcgcaggcgttgtccctttcccaggcggtcaccctgctttagagactgtctatgcgaatggcctagttccttatcccgcacagtcccccacagtagcagagaccctacacccggcgtttagcggcgtgcagcaatacactgccatgtatccgacagcagcaattacacccatcgcacattccgtcccacagccaccccccctgctccagcagcaacagcgcgaggggcccgagggttgcaacttgtttatatatcatctgccccaggagttcggggacaccgaattgactcaaatgttcctgccatttggtaacatcatctcttctaaagttttcatggatcgggccaccaatcagagcaaatgtttcggcttcgtcagctttgataatcctgcttctgcacaggcagccatacaggcaatgaacggatttcagattgggatgaaaaggctcaaggtgcaactgaagaggcccaaggatccggggcatccctactag

SEQ ID NO: 294924 - DNA, 1458 bp, Artificial Sequence
  derived and/or modified sequence
atggcgaggctcaccgaatctgaagctcggcgacagcagcagcagctcttgcaaccgagaccctctcccgtggggtccagtgggcctgagccaccgggagggcagccagatggaatgaaggacttggacgccatcaagcttttcgtaggccaaatccctcggcacctggacgaaaaagacttaaagcctctttttgagcagttcggccgaatttacgagctgacagtactcaaagacccatacaccgggatgcacaaaggctgtgccttcctcacctactgtgccagagacagcgccatcaaagctcaaaccgctctgcatgagcagaagacgttgcccggtatggcaagacccatccaagtcaaaccagcagactccgaaagtcggggagggagagatcgaaagctctttgtggggatgttgaataagcaacagagcgaagaggacgttctgcgcctattccagccctttggagtgatagatgagtgcaccgttctgcggggtccagacgggtcctccaaggggtgcgcctttgtcaaattttcatcccatactgaggctcaggcagccatccacgcactgcacggttcccagactatgccaggagcaagcagcagtttggtcgttaaattcgccgacaccgacaaagaacgtaccttgcgcaggatgcagcaaatggtggggcagctgggcattcttaccccatccctgaccttacccttttccccttattccgcttatgcccaagccttaatgcaacagcaaactaccgtcttgagcacttcagggtcttacctttctccaggtgtcgcgtttagcccctgtcacatacaacagattggagccgtgagtctgaatggcctgccggcaacccccatagcccctgcaagcggacttcacagccccccactgctgggcacaacagctgtccctggcctggtggcaccgatcacaaacggcttcgcaggtgtcgtccctttccccggaggccatccggcactggagacagtgtacgctaacggacttgttccctaccccgcacagtctcccacagtcgctgaaactctccacccagccttcagcggcgtgcaacagtacactgccatgtatcctaccgcagctattaccccaattgctcacagcgtacctcagccccctcccctgctgcaacagcaacagcgagagggcccagagggctgtaatctcttcatttatcatctgccacaagagttcggagatacggagcttacacagatgtttcttcctttcgggaatataatctcaagcaaggttttcatggacagggctacaaaccagtcgaagtgcttcggattcgtgtctttcgataaccctgcctcagcccaggcagctattcaagccatgaatgggttccagattggaatgaagcggcttaaggtgcaactgaagcgtcccaaagatcctgggcacccatattag

SEQ ID NO: 294925 - DNA, 1851 bp, Artificial Sequence
  derived and/or modified sequence
ccgccgccgccgccgccggctcggtcccgcgcccgccatggcccgcctgacggagagcgaggcgcgccggcagcagcagcagctcctgcagccgcggccctcgcccgtgggcagcagcgggcccgagccccccggggggcagcccgacggcatgaaggacctggacgccatcaaactcttcgtgggccagatcccgcggcacctggacgagaaggacctcaagccgctcttcgagcagttcggccgcatctacgagctcacggtgctcaaagacccctacacggggatgcacaaaggctgtgccttcctcacctactgtgccagggattccgccatcaaagctcagactgccctgcacgagcagaagaccttgcccggaatggcgcggccaatccaggtgaagcctgcggacagtgaaagccgcggaggtagggaccggaagctgttcgtggggatgctgaacaagcagcagtcggaggaggacgtgctgcggctgttccagcccttcggggtcattgacgagtgcaccgtgctccgggggcctgacggcagcagcaaaggctgtgctttcgtgaagttctcctcccacacggaggcgcaggcggccatccacgccttgcatgggagccagaccatgccgggagcctcctccagcctggtggtcaagttcgccgacacggacaaggagcggacgctccggcgcatgcagcagatggtgggccagctgggcatcctgacgccgtccctcacattgcccttcagcccctacagtgcctacgcccaggctctcatgcaacagcagacaacagtcctgtccacctcgggcagctacctgagtcccggcgtggccttctcaccctgtcacatccagcagataggcgccgtcagcctcaacgggctgcctgccacacccatcgctcctgcctctgggctgcactcacccccgctgctgggcaccaccgctgtgcctggcctcgtggctcccatcaccaatggctttgcaggtgtcgtgccctttccaggtgggcaccctgccctggaaaccgtctatgccaatggccttgtgccctacccagctcagagcccgactgtggccgagacactgcatcctgccttctccggagtccagcagtacacagccatgtaccccaccgcggccatcacgcccatcgcgcacagcgtcccccagccgccgcccctcctgcagcagcagcagcgagaaggtcccgagggctgtaacctgtttatctaccacctcccccaggagtttggagacacggagctgacgcagatgttcctacccttcggcaatatcatttcctccaaggtgtttatggatcgagctaccaaccagagcaagtgtttcggcttcgtgagctttgataacccggccagcgcccaggcagccatccaggccatgaacggcttccagatcggcatgaagaggctcaaagtccagctgaagcggcccaaagacccgggacacccctactgaccgcgcccacagccgccctgaggctgtaggcatggcccagacctgcgtgatttgtacaatgtactttatttctgctacgagtaatttcatgaagtttcaacttgcaaactgacttttgggacaaaccaacacacacacagaagagaaagcaaagaacttggaactttgggttgactcggtttgagttttgtgtcaaagaagatttcccgcggctgaagaggttggtgttcctgttacgtgtttcaggtgagaagcagcaaagcgtcttaatgttcaaaacgcctctctttggtctggagaaaaaaaaaaaaaaaaaaaaacaactaaaaatttatttaataaaagttttacttgct

SEQ ID NO: 294926 - DNA, 1458 bp, Artificial Sequence
  derived and/or modified sequence
atggccagactgaccgagagcgaggccagaagacagcagcagcagctgctgcagcccagacccagccccgtgggcagcagcggccccgagccccccggcggccagcccgacggcatgaaggacctggacgccatcaagctgttcgtgggccagatccccagacacctggacgagaaggacctgaagcccctgttcgagcagttcggcagaatctacgagctgaccgtgctgaaggacccctacaccggcatgcacaagggctgcgccttcctgacctactgcgccagagacagcgccatcaaggcccagaccgccctgcacgagcagaagaccctgcccggcatggccagacccatccaggtgaagcccgccgacagcgagagcagaggcggcagagacagaaagctgttcgtgggcatgctgaacaagcagcagagcgaggaggacgtgctgagactgttccagcccttcggcgtgatcgacgagtgcaccgtgctgagaggccccgacggcagcagcaagggctgcgccttcgtgaagttcagcagccacaccgaggcccaggccgccatccacgccctgcacggcagccagaccatgcccggcgccagcagcagcctggtggtgaagttcgccgacaccgacaaggagagaaccctgagaagaatgcagcagatggtgggccagctgggcatcctgacccccagcctgaccctgcccttcagcccctacagcgcctacgcccaggccctgatgcagcagcagaccaccgtgctgagcaccagcggcagctacctgagccccggcgtggccttcagcccctgccacatccagcagatcggcgccgtgagcctgaacggcctgcccgccacccccatcgcccccgccagcggcctgcacagcccccccctgctgggcaccaccgccgtgcccggcctggtggcccccatcaccaacggcttcgccggcgtggtgcccttccccggcggccaccccgccctggagaccgtgtacgccaacggcctggtgccctaccccgcccagagccccaccgtggccgagaccctgcaccccgccttcagcggcgtgcagcagtacaccgccatgtaccccaccgccgccatcacccccatcgcccacagcgtgccccagcccccccccctgctgcagcagcagcagagagagggccccgagggctgcaacctgttcatctaccacctgccccaggagttcggcgacaccgagctgacccagatgttcctgcccttcggcaacatcatcagcagcaaggtgttcatggacagagccaccaaccagagcaagtgcttcggcttcgtgagcttcgacaaccccgccagcgcccaggccgccatccaggccatgaacggcttccagatcggcatgaagagactgaaggtgcagctgaagagacccaaggaccccggccacccctactag

SEQ ID NO: 294927 - DNA, 3018 bp, Artificial Sequence
  derived and/or modified sequence
ataaaaccggcccggttctgtggaaagtgggcggcggagccagggtccctggaatggcggagactctgtcaggcctaggtgattctggagcggcgggcgcggcggctctgagctccgcctcgtcagagaccgggacgcggcgcctcagcgacctgcgagtgatcgatctgcgggcggagctgaggaaacggaatgtggactcgagcggcaacaagagcgttttgatggagcggctgaagaaggcaattgaagatgaaggtggtaatcctgacgaaattgaaattacctccgagggaaacaagaaaacatcaaagaggtctagcaaagggcgcaaaccagaagaagagggtgtggaagataacgggctggaggaaaactctggggatggacaggaggatgttgagaccagtctggagaacttgcaggacatcgacatcatggatatcagtgtgttggatgaagcagaaattgataatggaagcgttgcagattgtgtcgaagacgatgatgctgataacctccaggagtccctgtcggatagtagagagctagtcgagggggaaatgaaagagcttccggagcagcttcaggaacatgctatagaggacaaagaaactataaacaatttagatacttcatcatctgacttcactatattacaggaaattgaagagccatccctggagccagaaaatgagaaaatactcgacattttgggggaaacttgtaaatctgagccagtaaaagaagaaagttccgagctggagcagccatttgcacaggacacaagtagcgtggggccagacagaaagcttgcggaggaagaggacctatttgacagcgcccatccggaagagggtgatttagatttggccagcgagtcaacagcacacgctcagtcgagcaaggcagacagcctgttagcggtagtgaaaagggagcccgcggagcagccaggcgatggcgagaggacggactgtgagcctgtagggctagagccggcagttgagcagagtagtgcggcctccgagctcgcggaggcctctagcgaggagctcgcagaagcacccacggaagccccaagcccagaagccagagatagcaaagaagacgggaggaagtttgattttgacgcttgtaatgaagtccctccggctcctaaagagtcctcaaccagtgagggcgctgatcagaaaatgagttctcccgaagatgactcggatacaaaaaggctttccaaagaggaaaagggtcgcagcagttgtggtagaaatttctgggttagtggactctcttctacaaccagagctacagatttgaagaatcttttcagcaaatatgggaaggtggtgggcgccaaggttgtgacaaatgcccggagtcctggagctcgctgttacggttttgtcacgatgtccacagcagaagaggccacaaaatgcattaaccacctgcacaagacggagctccacggaaagatgatctccgtggagaaagccaaaaatgaacctgtgggaaagaaaacctctgacaaaagagacagtgacgggaaaaaggagaagtcgagcaacagtgacagatctacaaaccttaagagggatgataaatgtgacagaaaagatgatgctaagaagggtgacgacggaagtggagaaaagagtaaggaccaagatgatcagaaacctggcccctcagagcgatctcgagccacaaagtcaggaagtcgagggaccgaacggactgtagtaatggataaatccaaaggggtgcctgtgattagtgtaaaaacgtccgggtccaaagagagagcttccaaaagccaggatcgcaaatcagccagcagagagaagcggtccgtcgtgtcctttgataaggtcaaggagcctcggaagtcaagagactcagagtcccatagcagggtgcgtgaacgcagtgaacgcgaacaacgcatgcaggcgcagtgggagcgcgaggagcgtgagcggctggagattgcccgagagaggctggccttccagcgccagcggctggagcgggagcgcatggagcgggaacggctggagcgcgaacgcatgcacgtggagcacgagcgcaggcgcgagcaggagcgcatccaccgtgagcgcgaggagctgaggcgccagcaggaactgcgctatgagcaggagcggcggcccgcggtgcggcggccctacgacctggaccggcgagatgatgcctattggccggaagccaagcgggccgccctggatgagcgctaccattctgactttaaccgccaggaccgcttccacgactttgaccacagggaccgcggccgctaccccgaccactcggtggacaggagagaaggttcaaggtcaatgatgggagaacgagaaggacagcattacccagaacgccatggaggaccagagcgccacggccgggactcccgcgatggctgggggggctatggctctgacaagaggatgagcgagggccgggggctgcctcctccccccagacgtgactggggggaccatggccgaagagaggatgaccggtcatggcagggcacggccgacgggggcatgatggacagggatcacaagaggtggcaaggtggcgagagaagcatgtccggtcactccgggcctggccacatgatgaaccgaggaggaatgtcagggcgcggcagctttgccccaggcggggcctcccggggccaccccatcccacacggtggcatgcagggcgggtttggaggccagagccgggggagcaggcccagcgatgcccgcttcactcgccgctactgagtacttggaatcctgtgtcctgtctcgtggcaacaaggctatgttctgttaggagttaccttaaactgtgtaaaaatatttttttttaatctgctgccatattgtagctcaatacaatgtgaatttgtttttcgttttggggttttttttttttgtaataaatgtgtttccgttcacataccctttaaaaaaaaaaaaaaaaaaaaaaaaaaaaaaa

SEQ ID NO: 294928 - DNA, 2748 bp, Artificial Sequence
  derived and/or modified sequence
atggcagagacgctgagcggcctaggagatagcggcgctgcgggcgctgcggccttgagcagtgccagcagcgaaactggaacacggaggttgagcgacctgagagtgatcgatctgagggcggaactgcggaagagaaatgtcgattcgtcagggaataagagcgttctcatggaacgcttaaaaaaggcaatcgaagacgagggcggcaaccctgatgagatcgaaatcacctcagaaggaaacaagaagacatcgaaacggagttccaagggtcgtaagcccgaggaggagggcgtcgaagacaatgggctcgaggaaaactcaggggatgggcaggaggacgtagagacttctcttgaaaaccttcaggatattgacatcatggatatctcggtgttagatgaggctgaaattgacaatggaagtgtggctgactgcgtggaggatgatgatgctgacaatctccaggaatccctgtctgatagccgcgagttggtggaaggcgaaatgaaggagttgccggaacagctgcaggagcatgctattgaagacaaagaaactattaataacctggacacatccagttccgatttcacaattctgcaggagatcgaggaaccttctttggaaccagagaatgagaaaatcctagacatccttggggagacctgcaagtcagagcccgttaaggaagagtcctcagaacttgaacagccattcgctcaggacactagctctgttgggccagaccgaaagctagctgaggaggaagacctttttgactcagcccacccagaagaaggtgacctcgaccttgcgtccgaaagtaccgcgcatgctcagagcagcaaagctgactcgctgttagcagtggtgaagcgcgaacccgctgagcaaccaggcgatggtgagcggacagactgtgaaccagtaggactcgaacccgcagttgagcagtcctcagcagccagcgagcttgcagaggcaagcagcgaagagctggccgaagcaccaacagaggctccttcaccagaagcccgagacagcaaagaagatgggaggaagttcgattttgatgcttgcaatgaagtgccaccagcaccaaaggagagctctactagcgaaggggcagaccagaagatgtcgtcacctgaagacgatagcgacacaaagcggctctcaaaggaggagaagggacggtcctcgtgcggtaggaacttttgggtgagtggattgagctccacaacgcgcgcaactgacctgaaaaacttgttcagtaaatatggaaaggtcgtgggcgcaaaagttgtcaccaatgcacgaagccccggggctcgctgctatggctttgtcactatgagcaccgcagaagaggcaacaaaatgtatcaaccatctgcacaagaccgaactccacgggaagatgataagtgtggagaaagccaaaaacgagcctgtcgggaaaaaaacctctgacaagagggatagtgatggcaaaaaggaaaaaagctctaattcagacaggagcaccaatctgaagcgggatgacaagtgcgaccgcaaggatgacgccaaaaagggggatgatgggagtggggagaaatcaaaggatcaagatgaccaaaaacctgggccatcagagagatctcgggctactaaatccggctctagaggcaccgagaggactgtggttatggacaagagcaagggcgtgccagtaatttcggtcaagacatccggaagcaaggaacgagcaagcaagagccaggaccggaagtctgccagtcgcgagaaaaggagtgtggtcagcttcgataaagttaaggaaccccgcaagtcccgggactccgagtctcacagtcgcgtgcgagaacgatctgaacgagaacagagaatgcaagcccagtgggaacgggaggagcgcgagcgcttggagattgccagggagcgactggccttccagcgccagcgactcgagcgggaaagaatggaaagagagagactggagcgagaacggatgcatgtagaacacgagagaagaagagagcaggagcgcatccaccgagagcgcgaggaattgcggcgtcaacaggagctaagatacgagcaggaacgccgccctgctgtgcggcggccttatgacctcgaccgacgggacgatgcctactggcccgaggcaaaacgagcagccctggacgagcgctatcatagtgactttaaccggcaggatagatttcacgactttgatcaccgggaccggggcaggtacccagaccattcagtggatcgacgagaagggtctcggtcgatgatgggtgagagagagggtcagcattaccccgagagacacggtgggcccgagaggcatggtcgagacagccgggacgggtggggcggatacggcagtgataagcgtatgtctgaaggaagaggactcccacccccacccagacgagattggggtgaccatggaaggcgagaggacgatagatcttggcagggcaccgccgatggcggtatgatggaccgggatcacaagaggtggcaaggaggtgagagaagtatgtcgggacactcaggacctgggcacatgatgaatagagggggcatgtcagggagggggagcttcgcccccggtggggccagtcggggccatccaatcccgcacggcgggatgcagggtggatttgggggtcagtcacgcggatccagaccgtccgacgcaagattcactcgccgctactag

SEQ ID NO: 294929 - DNA, 2244 bp, Artificial Sequence
  derived and/or modified sequence
atgaaagagctccctgaacaactgcaagaacatgccatcgaggataaggaaaccattaataacctggacactagctcttcagactttacaatcctgcaggagatcgaggagcccagcctggagccagagaacgaaaaaatattggacattctgggcgaaacctgtaagtccgaaccagtcaaggaggaatcatcggagcttgaacaaccattcgcccaggatacatcttccgtaggtcctgaccgaaagctggctgaagaagaggatctgtttgatagcgcccacccagaggagggggacctggacctcgcatcggaatcaacggcccacgcccagtcaagtaaagctgactccttgttagccgtggttaaaagagagcctgccgagcagccgggtgacggggaacgcactgactgtgaaccagtgggcttggagcccgcagtcgagcaaagtagtgccgcgtctgaattggctgaggctagcagtgaagaattggctgaggctcctaccgaggcaccgtctcctgaggcccgggattccaaggaagacggcaggaaatttgacttcgacgcttgtaacgaggtgcctcccgctcctaaggaatcctccactagtgaaggcgctgaccagaagatgtcatccccagaggatgattcggatacgaaacgtctgagcaaagaggaaaaagggcggtcctcatgtggaagaaatttctgggtgtcaggcctgtctagcaccacccgggccacagacctgaagaacttgttcagtaagtacggaaaagtggtaggtgcaaaggtagtgacaaacgctcgttccccaggcgcccgctgctatggcttcgtgaccatgtctacggcagaggaagctaccaagtgcataaatcacctgcataaaaccgagctacatggaaaaatgatttccgtcgaaaaagcaaaaaacgagccggtcggcaaaaaaacctcggataagagagacagtgatggtaagaaggagaagagttccaactcggacagatctacaaatttaaagagagacgacaagtgcgacaggaaggatgacgcgaaaaaaggagacgacgggtcaggtgagaaaagcaaagatcaggacgatcagaagccaggcccctccgaaaggtctcgtgcaacgaaaagcggaagccgcggtacagagagaaccgtagtgatggataagagtaaaggcgtgcccgtcatctcggtcaaaaccagcggatcaaaggagagagcatccaaaagccaggaccgcaaaagcgcctctagggaaaagcgtagcgttgtctcctttgacaaggtgaaagagcctaggaaaagtagagatagcgaaagtcattcacgcgtgcgagaaagaagtgaaagagagcagcgtatgcaggcccagtgggagcgggaggagcgggagaggctggagatcgcccgcgagcggcttgcgtttcagagacagcgattagaacgcgaaagaatggaaagagagcgactggagagagaaagaatgcacgtggaacatgaaaggcgtcgcgaacaagagcggattcacagggaacgggaagaactacgaaggcagcaggagttaaggtacgaacaggaacggcggcctgctgttagaagaccctacgatctcgatcggagagacgatgcatactggccagaggcaaaaagagctgccctggacgaacgttaccactctgactttaaccggcaggataggttccacgacttcgatcacagggaccggggtcggtacccagaccattcagtggaccgtcgcgagggatctcgctccatgatgggcgaaagagaaggccagcactatcctgagcgacatgggggaccagagcggcatgggagagactctagagatggttggggtggctatgggtcagataagcggatgagcgagggaagagggctcccccccccgccccgtggacgacgggactggggagaccacggtcggcgggaggacgacaggtcatggcaaggcaccgccgacggaggcatgatggatcgcgatcataagcgatggcaggggggcgagcgctccatgtcgggacacagcggccctgggcatatgatgaacaggggtggaatgagcggacgcggatcgttcgctcccgggggtgcttcccgcggtcaccctatccctcatggagggatgcagggcggctttgggggccagtcccggggttcacggccaagcgatgctcgattcacccgccgctattag

SEQ ID NO: 294930 - DNA, 2748 bp, Artificial Sequence
  derived and/or modified sequence
atggccgagaccctgagcggcctgggggacagcggggccgccggggctgctgccctgagcagcgccagcagcgagaccggcacccggcggctgagtgacctgcgggtgattgacctgcgggcagagctgaggaagagaaatgtggacagcagcggcaacaagtctgtgctgatggagcggctgaagaaggccattgaagatgaaggaggcaacccagatgaaattgagatcaccagcgagggcaacaagaagaccagcaagaggagcagcaaaggaaggaagccagaggaggagggcgtggaggacaatggcctggaggagaacagcggagatggccaggaggatgtggagaccagcctggagaacctgcaggacatcgacatcatggacatctctgtgctggatgaagctgagattgacaatggatctgtggccgactgtgtggaggatgatgatgctgacaacctgcaggagagcctgagtgacagccgggagctggtggagggggagatgaaggagctgcctgagcagctgcaggagcacgccatcgaggacaaggagaccatcaacaacctggacaccagcagcagtgacttcaccatcctgcaggagattgaggagcccagcctggagccagaaaatgagaagatcctggacatcctgggggagacctgcaagtctgagcctgtgaaggaggagagcagcgagctggagcagccctttgcccaggacaccagctctgtgggccctgacaggaagctggccgaggaggaggacctgtttgattctgcccaccctgaggagggggacctggacctggccagcgagagcacagcccacgcccagagcagcaaggctgacagcctgctggccgtggtgaagcgggagcctgctgagcagcctggagatggagagaggacagactgtgagcctgtgggcctggagcctgctgtggagcagagcagcgctgccagcgagctggccgaggccagcagcgaggagctggccgaggcccccacagaggcccccagccctgaggcccgggacagcaaggaggatggcaggaagtttgattttgatgcctgcaatgaggtgcccccagcccccaaggagagcagcaccagcgagggcgctgaccagaagatgagcagcccagaagatgacagcgacaccaagaggctgagcaaggaggagaagggccgcagcagctgtggcaggaacttctgggtgtctggcctgagcagcaccacccgggccacagacctgaagaacctcttcagcaaatatggcaaggtggtgggcgccaaggtggtgaccaatgcccggagccctggggcccgctgctacggctttgtgaccatgagcacagctgaggaggccaccaagtgcatcaaccacctgcacaagacagagctgcacggcaagatgatctctgtggagaaggccaagaatgaacctgtgggcaagaagaccagtgacaagagggacagtgatggcaagaaggagaagagcagcaacagcgacaggagcaccaacctgaagagagatgacaagtgtgacaggaaggatgatgccaagaagggagatgatggcagcggggagaagagcaaggaccaggatgaccagaagccaggccccagcgagaggagccgggccaccaagagcggcagccggggcacagagaggacagtggtgatggacaagagcaagggcgtgcctgtgatctctgtgaagaccagcggcagcaaggagcgggccagcaagagccaggacaggaagagcgccagccgggagaagaggtctgtggtgtcctttgacaaggtgaaggagcccaggaagagccgggacagcgagagccacagccgggtgcgggagaggtctgagcgggagcagaggatgcaggcccagtgggagcgggaggagcgggagcggctggagatcgcccgggagcggctggccttccagaggcagaggctggagcgggagaggatggagcgggagcggctggagcgggagaggatgcacgtggagcacgagaggagaagagagcaggagcgcatccaccgggagcgggaggagctgcggcggcagcaggagctgcgctatgagcaggagcggcggcctgctgtgagaagaccctatgacctggacagaagagatgatgcctactggccagaggccaagagagctgccctggatgagcgctaccacagcgacttcaaccggcaggaccgcttccatgactttgaccaccgggaccggggccgctacccagaccacagcgtggaccggcgggagggcagccgctccatgatgggagagcgggagggccagcactacccagagcggcacggcggccctgagcggcacggccgggacagcagagatggctggggcggctacggcagtgacaagaggatgtctgagggccggggcctgcccccaccaccccggcgggactggggagaccacggccggcgggaggatgaccgctcctggcagggcacagcagatggcggcatgatggaccgggaccacaagcgctggcagggcggggagaggtccatgagcggccacagcggccctggccacatgatgaacagaggaggcatgagcggccggggcagctttgcccctggaggagccagccggggccaccccatcccccacggcggcatgcagggcggctttggaggccagagccggggcagccggcccagtgatgcccgcttcacccggcgctactag

SEQ ID NO: 294931 - DNA, 2244 bp, Artificial Sequence
  derived and/or modified sequence
atgaaggagctgcctgagcagctgcaggagcacgccatcgaggacaaggagaccatcaacaacctggacaccagcagcagtgacttcaccatcctgcaggagattgaggagcccagcctggagccagaaaatgagaagatcctggacatcctgggggagacctgcaagtctgagcctgtgaaggaggagagcagcgagctggagcagccctttgcccaggacaccagctctgtgggccctgacaggaagctggccgaggaggaggacctgtttgattctgcccaccctgaggagggggacctggacctggccagcgagagcacagcccacgcccagagcagcaaggctgacagcctgctggccgtggtgaagcgggagcctgctgagcagcctggagatggagagaggacagactgtgagcctgtgggcctggagcctgctgtggagcagagcagcgctgccagcgagctggccgaggccagcagcgaggagctggccgaggcccccacagaggcccccagccctgaggcccgggacagcaaggaggatggcaggaagtttgattttgatgcctgcaatgaggtgcccccagcccccaaggagagcagcaccagcgagggcgctgaccagaagatgagcagcccagaagatgacagcgacaccaagaggctgagcaaggaggagaagggccgcagcagctgtggcaggaacttctgggtgtctggcctgagcagcaccacccgggccacagacctgaagaacctcttcagcaaatatggcaaggtggtgggcgccaaggtggtgaccaatgcccggagccctggggcccgctgctacggctttgtgaccatgagcacagctgaggaggccaccaagtgcatcaaccacctgcacaagacagagctgcacggcaagatgatctctgtggagaaggccaagaatgaacctgtgggcaagaagaccagtgacaagagggacagtgatggcaagaaggagaagagcagcaacagcgacaggagcaccaacctgaagagagatgacaagtgtgacaggaaggatgatgccaagaagggagatgatggcagcggggagaagagcaaggaccaggatgaccagaagccaggccccagcgagaggagccgggccaccaagagcggcagccggggcacagagaggacagtggtgatggacaagagcaagggcgtgcctgtgatctctgtgaagaccagcggcagcaaggagcgggccagcaagagccaggacaggaagagcgccagccgggagaagaggtctgtggtgtcctttgacaaggtgaaggagcccaggaagagccgggacagcgagagccacagccgggtgcgggagaggtctgagcgggagcagaggatgcaggcccagtgggagcgggaggagcgggagcggctggagatcgcccgggagcggctggccttccagaggcagaggctggagcgggagaggatggagcgggagcggctggagcgggagaggatgcacgtggagcacgagaggagaagagagcaggagcgcatccaccgggagcgggaggagctgcggcggcagcaggagctgcgctatgagcaggagcggcggcctgctgtgagaagaccctatgacctggacagaagagatgatgcctactggccagaggccaagagagctgccctggatgagcgctaccacagcgacttcaaccggcaggaccgcttccatgactttgaccaccgggaccggggccgctacccagaccacagcgtggaccggcgggagggcagccgctccatgatgggagagcgggagggccagcactacccagagcggcacggcggccctgagcggcacggccgggacagcagagatggctggggcggctacggcagtgacaagaggatgtctgagggccggggcctgcccccaccaccccggggccggcgggactggggagaccacggccggcgggaggatgaccgctcctggcagggcacagcagatggcggcatgatggaccgggaccacaagcgctggcagggcggggagaggtccatgagcggccacagcggccctggccacatgatgaacagaggaggcatgagcggccggggcagctttgcccctggaggagccagccggggccaccccatcccccacggcggcatgcagggcggctttggaggccagagccggggcagccggcccagtgatgcccgcttcacccggcgctactag

SEQ ID NO: 294932 - DNA, 2748 bp, Artificial Sequence
  derived and/or modified sequence
atggccgagaccctgagcggcctgggcgacagcggcgccgccggcgcagccgccctgtcttccgcatcatcggagactgggacaagaaggctgtccgacctgagggtgatcgatcttcgcgccgaattaaggaagcggaacgtagatagttcaggcaacaagtccgtcctaatggaaagattgaagaaggcgatcgaagatgaggggggcaatcctgacgaaatcgaaattacctctgaaggcaataagaagacatccaaacggagctcgaagggaaggaaaccagaggaagagggtgtcgaagataatggtcttgaagagaactcaggcgatgggcaggaagatgttgagacaagcttagaaaacttgcaggatattgatataatggatattagcgtccttgatgaggccgagatcgacaacggttctgtcgccgattgtgtagaggacgatgatgccgacaacctacaggaatccttgagcgacagcagggagctggtagagggcgaaatgaaagaactccccgaacagctacaagagcacgccattgaagacaaggaaacgatcaacaacctggataccagtagttccgactttaccatacttcaagagattgaggagccatccttggagcccgagaacgaaaagatcctggacattctgggagagacctgcaagagtgaaccagtgaaggaagaaagttccgagctcgaacagccttttgcccaggacactagctcggttggacctgaccgaaagttggccgaagaggaagacctgttcgatagtgctcatcccgaggagggagacctggatcttgccagcgagtccacagcacacgcccagagctccaaggcagacagtctcctggccgtggtgaaacgggaaccggccgagcaacccggcgacggagagcggacagactgtgagccagtgggcctggaaccggccgtggaacagtcttcagctgccagcgagctggcagaagcctcatccgaagaacttgcagaagcccctacagaggctccgagccctgaggcacgtgacagcaaagaagatgggcgcaagtttgattttgatgcgtgtaacgaggtccccccagctcccaaggagagttccacatctgaaggtgcagaccagaagatgagtagtcccgaggatgacagtgacaccaagaggttgtccaaggaagaaaaaggtagatcctcctgtggtcgaaatttttgggtgtctggtctgagctcaaccactagagccactgacctgaagaatctcttctccaaatacgggaaagtagtgggagctaaagtggtgacaaatgctcggtctcctggcgcacgatgttatggctttgtgaccatgtcgacagctgaagaagctaccaaatgtatcaaccatctgcacaaaacggaattgcatgggaagatgattagtgtcgaaaaggctaaaaatgagcctgtgggcaagaaaactagcgataagcgcgattcagacgggaagaaagaaaagtcttccaatagcgatcggagtaccaatttgaaacgagacgataagtgtgatcgtaaagacgatgcaaaaaagggcgatgacgggtcgggggagaaaagtaaggaccaggatgatcagaaaccagggcctagtgagcgatcgagggccaccaagtctggctcccgaggcaccgagagaacagtcgtcatggacaaatccaaaggagtccccgtaataagcgtcaaaacttcaggctcaaaagagcgtgcttctaagagccaagaccgcaaaagtgcctctcgcgagaaacggagcgtggtttcgtttgataaagtcaaggaacctcgcaagagccgggattcagaatctcatagccgggttcgcgagcgtagtgagcgcgagcagcgcatgcaggcgcagtgggaacgcgaggagagggagaggctggagatcgcacgggagcggctcgccttccagcgccagaggctcgaaagggagaggatggaacgcgagcgtttagagagggagcgcatgcacgtagaacacgagcggagacgggagcaggaacggatccatcgagagcgcgaagaactcagacgccaacaagaactgaggtatgaacaggagcggcggccagctgtcagacgaccctacgacctagatcgccgggacgatgcttactggcctgaggctaaacgtgcggccctcgatgagcgatatcacagcgattttaatcggcaggaccggttccacgactttgaccatcgtgatcggggtcgataccccgatcactctgttgacagaagggagggaagtcgatccatgatgggagaacgggaggggcagcattatcctgaacggcacggtggtccagaaagacacggtagagactcccgggacggctggggagggtacggcagtgacaaacgcatgtcagagggccgcggactcccaccaccacctcgcagggattggggagatcatggaagaagagaggacgaccgttcatggcagggaacagccgatggcggaatgatggaccgcgatcataaaaggtggcagggaggagagaggtcgatgagtggacactcaggtcctgggcatatgatgaaccgcggaggaatgagtggcagaggtagctttgcgcctgggggcgcctcacggggacacccaattccgcacggaggcatgcaaggaggctttggtggccagtcccggggttctcgcccttccgacgctcgattcacacgtcggtattag

SEQ ID NO: 294933 - DNA, 2244 bp, Artificial Sequence
  derived and/or modified sequence
atgaaggagctgcccgagcagctgcaggagcacgccatcgaggacaaagagaccatcaataaccttgacactagctcttcagattttacaattcttcaggagatcgaagagccctctcttgaacccgaaaatgaaaagatactggatatccttggtgagacctgcaagtctgaacctgtgaaagaggaatcttccgaactggaacagccctttgcgcaagatacttcctccgtgggaccggatcgcaaactggccgaagaggaggatctgttcgattcagctcatcctgaagagggcgacctggacctggcctcagaatccaccgcccatgcccagagcagtaaggccgattctctgcttgccgtcgtgaagcgcgagccagccgagcagccaggggacggggagaggactgattgtgagcccgtgggcctcgagccggctgttgaacagtcttcggccgcgtccgaactggctgaagcctccagcgaagaactggcagaggctcccacagaggcaccttctcctgaagctcgggacagcaaagaggacgggcgaaagttcgattttgacgcatgcaatgaggtcccgccagctcctaaggaaagcagcacaagcgagggagcggaccagaagatgagctcccctgaggacgactcagacaccaagagattgtccaaagaggagaaggggaggtccagctgcggacggaacttttgggtctccgggctgagtagcactaccagggccaccgatctcaaaaacttgttttcaaagtatgggaaagttgttggagctaaggtcgtgactaacgcaagatcacccggtgccaggtgctatggttttgtcaccatgtctaccgcagaagaagcaactaagtgcatcaatcacctgcataaaaccgagctgcacggcaagatgatttcagttgagaaggccaagaacgaaccagtgggaaaaaaaacgtcagacaaaagggactccgatggcaagaaagagaagtccagtaacagcgatcgcagcacaaatctcaaaagggacgataagtgcgacaggaaggacgatgccaagaagggcgacgacgggtctggcgagaagagcaaagaccaggatgaccaaaaacccgggccgtcagagcgctctcgggcaacgaagagcggctctaggggcacagagcgcactgttgtcatggataagtctaaaggagttccagtcataagcgtcaagacaagcggttcaaaggagcgcgccagcaaaagccaagataggaagagcgcctccagagaaaaaaggtctgttgtgagtttcgacaaagtcaaagagcctcggaaatcacgcgattccgagtcccactcccgagtgcgtgagcgaagcgagagggagcagcggatgcaggcacagtgggaacgggaagaaagagagaggctcgagatcgctagagagcggttggcattccagaggcagaggttggagcgcgagaggatggagcgggagaggctggaacgggaaagaatgcacgtggaacatgaaagacggcgggaacaggagagaattcacagagaacgagaggagcttcgacgacaacaagaacttcggtacgaacaggagcgacgccctgccgttcgcaggccctatgatttggacaggagggatgacgcttattggccggaggccaagcgggcggcgctggacgagaggtaccacagtgacttcaacagacaggaccggttccacgatttcgaccatagggatcgtggcagataccccgaccactcggttgacaggcgagaagggagccgcagtatgatgggggagagggagggtcaacattatcctgaaaggcacggtggtcctgaaaggcacgggcgggattctagggatgggtggggcggatatgggagcgataaacgcatgagcgaaggccgcggcctcccccctccaccgagaggacgacgggattggggagaccatggacgacgcgaagacgatcggagctggcagggtaccgcagacggaggtatgatggacagagatcacaaacgctggcaaggtggcgagcgttcgatgagtggtcatagtgggccaggacacatgatgaaccgaggaggcatgtccggccggggcagctttgcccccgggggagctagtagagggcacccaatcccacacggcggcatgcagggtgggtttgggggacaatctcggggctcccggccctctgacgctcgttttacgcgtaggtactag

SEQ ID NO: 294934 - DNA, 2748 bp, Artificial Sequence
  derived and/or modified sequence
atggcggaaacactgtccggcctgggagacagcggtgctgctggcgctgccgctttatcaagtgcttctagtgagactggtacccggagattatctgacctcagagtcatcgacttgcgcgcagagcttaggaaaaggaatgtggatagcagcgggaataagtccgtgctgatggagagactgaagaaagcaatcgaagacgagggaggcaacccggatgagatcgagattacctctgaggggaataagaagacttctaagcgtagttctaagggcaggaagcccgaggaggaaggggtagaggacaatggccttgaagagaattccggcgacggacaggaagacgtggagactagccttgagaacttacaggacatcgatatcatggacatcagtgtcctggatgaagcggagattgacaacgggtctgtggccgactgcgtcgaggacgacgatgcggacaacctccaagagagcctttctgacagccgggaacttgtcgagggagaaatgaaggagttgccagagcagctccaggaacacgcgatcgaggataaggaaactatcaacaacctggatacaagttccagcgattttacgatcctccaggagatcgaagagccctccctcgagcctgaaaacgaaaagatcctggacatcctgggcgagacttgcaagtcagagccagtgaaggaagagagcagcgaacttgaacagccgtttgcccaggacacgagctccgtggggccagatcgtaaactggcagaggaggaggatctcttcgactctgcgcaccccgaggaaggtgacctcgacctggcctcagagagtacagctcacgcccaatctagcaaagcagactcactgctagcagtggtgaaacgcgagccagccgagcaaccaggcgatggagagcgcactgattgtgagcccgtcggtttagagcctgctgtcgagcagtcaagtgctgctagtgagctagcagaggcctctagtgaggagctggcggaagcaccgaccgaggctccttccccagaggcacgagattctaaagaagacggcagaaaattcgacttcgatgcatgtaatgaggtgcctcccgcaccaaaggaatcatccacaagcgaaggcgctgaccaaaaaatgtcaagccccgaagacgatagtgacactaaacggctgtcaaaagaagagaagggcagaagcagttgcgggcgaaacttctgggtaagtggactgtccagtaccaccagggccactgacctgaagaacctgttcagcaagtacggaaaagtggtgggtgctaaagtggtcacaaatgccagaagcccaggcgctaggtgctatggcttcgtgacaatgagtaccgcagaagaagcaactaagtgcataaatcaccttcataagaccgagctgcacggaaagatgatatccgtggagaaggcgaagaacgaacctgtagggaagaagaccagcgacaagagagactccgatgggaagaaggaaaaaagcagtaatagcgatcgcagcacgaaccttaagagggatgataaatgtgacaggaaagatgatgcaaagaagggggacgatgggtccggtgagaaaagcaaggatcaggatgaccaaaaaccaggaccatccgaacggtctcgtgctaccaagtcaggctctagaggtacagaaaggaccgtggttatggacaagagcaaaggagtacctgtgatcagcgtcaagacctcagggagcaaggagcgcgcttctaagtctcaggacagaaaatctgctagcagagagaagaggtctgtggtcagttttgacaaagtgaaagaaccacgaaagtctcgggactccgagtctcactcacgcgtacgcgagcggtctgaaagagagcagcgcatgcaggcgcagtgggaacgggaggaacgcgagaggctggaaattgctagggaacgcctggccttccagcggcagagattagagcgcgagcgcatggaacgagaacgcctggaacgggagcgaatgcatgttgagcatgagcggaggcgcgagcaggagcggatacaccgagagcgtgaggagctgcggagacagcaagaactgcggtacgagcaggaaaggaggccagcagtgcggcgaccttacgacctggaccgcagggatgatgcctactggccagaagcgaagcgagcagcgctggacgaacgctaccactctgacttcaatcgtcaggatagatttcacgactttgaccaccgagatagagggcgttaccctgatcattccgtcgacagaagagagggatctcgttccatgatgggcgagagagaagggcagcattatcccgagcgacacgggggaccggagcgccatggcagagactcgcgcgatgggtgggggggttacggatccgataagcgcatgtccgaaggaagaggtttgcctcccccacccagaagggactggggagatcacggccgtagagaggacgacagatcctggcagggaacagctgatgggggaatgatggaccgggatcataagcgttggcagggcggagaacggtccatgtcaggtcactcgggacctggtcacatgatgaacaggggcggtatgtcagggcgaggatcctttgccccaggcggagcaagcaggggtcaccctattccccacggaggaatgcagggtggctttggaggacaatcaagggggagcagacctagcgatgccagatttacacggaggtactag

SEQ ID NO: 294935 - DNA, 2244 bp, Artificial Sequence
  derived and/or modified sequence
atgaaagaactgcctgaacagctccaggaacatgcaatagaagacaaagagacgatcaacaatttagatacatcaagtagtgacttcaccatcctgcaggagatcgaggagccctctcttgagcccgaaaacgaaaagattctggatattctgggagagacatgtaaatcagaacccgtgaaagaagagagcagcgaacttgagcaaccgtttgctcaagatacatcatcagtagggccagatcgaaaattggctgaggaggaagacttgtttgactcggcccatccagaagaaggggacctcgacttggcatctgagagtactgcacatgcccagagttcgaaggccgactccctgctggccgtggtgaagcgcgagcccgctgagcagcccggtgacggtgagcgcactgactgcgagcccgtcggtctcgaaccggctgtggagcagtcctcagccgcatctgagcttgccgaagcttcaagcgaggagctggctgaggcacctaccgaggcacctagcccggaagccagggactccaaagaggatggcagaaaatttgacttcgacgcctgcaacgaagttccacctgctcctaaggagtcaagtaccagcgagggtgcggaccagaagatgtcaagtcctgaggacgactcagacaccaagagattgtccaaagaagagaagggaaggtctagttgcgggagaaatttttgggtctcaggcctgtcttccaccactagggccacagatcttaagaacctgttttccaagtatggaaaagtcgttggtgccaaggtcgtgacaaatgctcggagccctggtgccagatgctatgggtttgtaaccatgtcaactgccgaggaggccaccaagtgcatcaatcatttacacaagactgagctacatggaaagatgattagcgtggaaaaagctaagaatgaaccggttggcaaaaaaacctccgacaagcgagacagcgatggcaaaaaggaaaagtcctccaactctgaccggagtaccaaccttaagcgagatgataagtgcgacagaaaagatgacgctaaaaaaggggatgacggcagcggtgaaaagtcaaaggatcaggatgatcagaagcctgggccatccgagagatcccgggctaccaaatccggctcgcgcggaaccgagcgaactgttgtgatggataaaagcaaaggagtgccggtgatctctgttaaaacttcagggtcaaaagagagagcttctaaatcgcaggacagaaaatccgcatcacgtgagaagcgatccgtggtaagcttcgataaggttaaagagcctaggaaatctcgtgacagcgagtctcatagccgcgtgcgggagcggagcgaaagggaacagaggatgcaggcccagtgggagagggaagaacgcgagaggctcgaaatcgctagagaaaggttggcttttcagagacagcggctggaacgtgaacggatggagagagagaggttggagcgggaacgcatgcatgtggagcacgaacgcagacgggagcaggagaggattcaccgggagagagaggaactgaggaggcagcaggaactgaggtacgaacaggaacgcagaccagccgtgcgccgaccttacgacctagaccgacgcgatgacgcatactggccagaggccaaacgggctgcacttgatgagaggtatcactccgattttaaccgccaagatagattccacgattttgatcaccgcgaccgcggaagataccccgaccacagcgtcgaccggagggaaggctcgcgtagcatgatgggcgagcgggaaggacagcattaccccgaaaggcacggcggtcctgagcgacacggccgtgactcaagagatgggtggggagggtatggatctgacaaacggatgtccgaaggaagagggctgcctccacctccaagagggcgacgggattggggcgatcatggtcgacgcgaggacgatcgtagctggcaggggacggctgatggaggtatgatggacagagatcataaaagatggcagggaggggaacgtagcatgtctggccacagcggccctggtcacatgatgaatcgcggtgggatgagcgggcgaggctctttcgcaccaggaggggcttcaagggggcatcccataccacacggtggcatgcagggcggatttggaggacaaagtagggggtcccggccaagtgatgccaggttcacgagaagatattag

SEQ ID NO: 294936 - DNA, 2987 bp, Artificial Sequence
  derived and/or modified sequence
ataaaaccggcccggttctgtggaaagtgggcggcggagccagggtccctggaatggcggagactctgtcaggcctaggtgattctggagcggcgggcgcggcggctctgagctccgcctcgtcagagaccgggacgcggcgcctcagcgacctgcgagtgatcgatctgcgggcggagctgaggaaacggaatgtggactcgagcggcaacaagagcgttttgatggagcggctgaagaaggcaattgaagatgaaggtggtaatcctgacgaaattgaaattacctccgagggaaacaagaaaacatcaaagaggtctagcaaagggcgcaaaccagaagaagagggtgtggaagataacgggctggaggaaaactctggggatggacaggaggatgttgagaccagtctggagaacttgcaggacatcgacatcatggatatcagtgtgttggatgaagcagaaattgataatggaagcgttgcagattgtgtcgaagacgatgatgctgataacctccaggagtccctgtcggatagtagagagctagtcgagggggaaatgaaagagcttccggagcagcttcaggaacatgctatagaggacaaagaaactataaacaatttagatacttcatcatctgacttcactatattacaggaaattgaagagccatccctggagccagaaaatgagaaaatactcgacattttgggggaaacttgtaaatctgagccagtaaaagaagaaagttccgagctggagcagccatttgcacaggacacaagtagcgtggggccagacagaaagcttgcggaggaagaggacctatttgacagcgcccatccggaagagggtgatttagatttggccagcgagtcaacagcacacgctcagtcgagcaaggcagacagcctgttagcggtagtgaaaagggagcccgcggagcagccaggcgatggcgagaggacggactgtgagcctgtagggctagagccggcagttgagcagagtagtgcggcctccgagctcgcggaggcctctagcgaggagctcgcagaagcacccacggaagccccaagcccagaagccagagatagcaaagaagacgggaggaagtttgattttgacgcttgtaatgaagtccctccggctcctaaagagtcctcaaccagtgagggcgctgatcagaaaatgagttctcccgaagatgactcggatacaaaaaggctttccaaagaggaaaagggtcgcagcagttgtggtagaaatttctgggttagtggactctcttctacaaccagagctacagatttgaagaatcttttcagcaaatatgggaaggtggtgggcgccaaggttgtgacaaatgcccggagtcctggagctcgctgttacggttttgtcacgatgtccacagcagaagaggccacaaaatgcattaaccacctgcacaagacggagctccacggaaagatgatctccgtggagaaagccaaaaatgaacctgtgggaaagaaaacctctgacaaaagagacagtgacgggaaaaaggagaagtcgagcaacagtgacagatctacaaaccttaagagggatgataaatgtgacagaaaagatgatgctaagaagggtgacgacggaagtggagaaaagagtaaggaccaagatgatcagaaacctggcccctcagagcgatctcgagccacaaagtcaggaagtcgagggaccgaacggactgtagtaatggataaatccaaaggggtgcctgtgattagtgtaaaaacgtccgggtccaaagagagagcttccaaaagccaggatcgcaaatcagccagcagagagaagcggtccgtcgtgtcctttgataaggtcaaggagcctcggaagtcaagagactcagagtcccatagcagggtgcgtgaacgcagtgaacgcgaacaacgcatgcaggcgcagtgggagcgcgaggagcgtgagcggctggagattgcccgagagaggctggccttccagcgccagcggctggagcgggagcgcatggagcgggaacggctggagcgcgaacgcatgcacgtggagcacgagcgcaggcgcgagcaggagcgcatccaccgtgagcgcgaggagctgaggcgccagcaggaactgcgctatgagcaggagcggcggcccgcggtgcggcggccctacgacctggaccggcgagatgatgcctattggccggaagccaagcgggccgccctggatgagcgctaccattctgactttaaccgccaggaccgcttccacgactttgaccacagggaccgcggccgctaccccgaccactcggtggacaggagagaaggttcaaggtcaatgatgggagaacgagaaggacagcattacccagaacgccatggaggaccagagcgccacggccgggactcccgcgatggctgggggggctatggctctgacaagaggatgagcgagggccgggggctgcctcctccccccagacgtgactggggggaccatggccgaagagaggatgaccggtcatggcagggcacggccgacgggggcatgatggacagggatcacaagaggtggcaaggtggcgagagaagcatgtccggtcactccgggcctggccacatgatgaaccgaggaggaatgtcagggcgcggcagctttgccccaggcggggcctcccggggccaccccatcccacacggtggcatgcagggcgggtttggaggccagagccgggggagcaggcccagcgatgcccgcttcactcgccgctactgagtacttggaatcctgtgtcctgtctcgtggcaacaaggctatgttctgttaggagttaccttaaactgtgtaaaaatatttttttttaatctgctgccatattgtagctcaatacaatgtgaatttgtttttcgttttggggttttttttttttgtaataaatgtgtttccgttcacatacccttt

SEQ ID NO: 294937 - DNA, 2996 bp, Artificial Sequence
  derived and/or modified sequence
gtgctaggagcctgataaaaccggcccggttctgtggaaagtgggcggcggagccagggtccctggaatggcggagactctgtcaggcctaggtgattctggagcggcgggcgcggcggctctgagctccgcctcgtcagagaccgggacgcggcgcctcagcgacctgcgagtgatcgatctgcgggcggagctgaggaaacggaatgtggactcgagcggcaacaagagcgttttgatggagcggctgaagaaggcaattgaagatgaaggtggtaatcctgacgaaattgaaattacctccgagggaaacaagaaaacatcaaagaggtctagcaaagggcgcaaaccagaagaagagggtgtggaagataacgggctggaggaaaactctggggatggacaggaggatgttgagaccagtctggagaacttgcaggacatcgacatcatggatatcagtgtgttggatgaagcagaaattgataatggaagcgttgcagattgtgtcgaagacgatgatgctgataacctccaggagtccctgtcggatagtagagagctagtcgagggggaaatgaaagagcttccggagcagcttcaggaacatgctatagaggacaaagaaactataaacaatttagatacttcatcatctgacttcactatattacaggaaattgaagagccatccctggagccagaaaatgagaaaatactcgacattttgggggaaacttgtaaatctgagccagtaaaagaagaaagttccgagctggagcagccatttgcacaggacacaagtagcgtggggccagacagaaagcttgcggaggaagaggacctatttgacagcgcccatccggaagagggtgatttagatttggccagcgagtcaacagcacacgctcagtcgagcaaggcagacagcctgttagcggtagtgaaaagggagcccgcggagcagccaggcgatggcgagaggacggactgtgagcctgtagggctagagccggcagttgagcagagtagtgcggcctccgagctcgcggaggcctctagcgaggagctcgcagaagcacccacggaagccccaagcccagaagccagagatagcaaagaagacgggaggaagtttgattttgacgcttgtaatgaagtccctccggctcctaaagagtcctcaaccagtgagggcgctgatcagaaaatgagttctcccgaagatgactcggatacaaaaaggctttccaaagaggaaaagggtcgcagcagttgtggtagaaatttctgggttagtggactctcttctacaaccagagctacagatttgaagaatcttttcagcaaatatgggaaggtggtgggcgccaaggttgtgacaaatgcccggagtcctggagctcgctgttacggttttgtcacgatgtccacagcagaagaggccacaaaatgcattaaccacctgcacaagacggagctccacggaaagatgatctccgtggagaaagccaaaaatgaacctgtgggaaagaaaacctctgacaaaagagacagtgacgggaaaaaggagaagtcgagcaacagtgacagatctacaaaccttaagagggatgataaatgtgacagaaaagatgatgctaagaagggtgacgacggaagtggagaaaagagtaaggaccaagatgatcagaaacctggcccctcagagcgatctcgagccacaaagtcaggaagtcgagggaccgaacggactgtagtaatggataaatccaaaggggtgcctgtgattagtgtaaaaacgtccgggtccaaagagagagcttccaaaagccaggatcgcaaatcagccagcagagagaagcggtccgtcgtgtcctttgataaggtcaaggagcctcggaagtcaagagactcagagtcccatagcagggtgcgtgaacgcagtgaacgcgaacaacgcatgcaggcgcagtgggagcgcgaggagcgtgagcggctggagattgcccgagagaggctggccttccagcgccagcggctggagcgggagcgcatggagcgggaacggctggagcgcgaacgcatgcacgtggagcacgagcgcaggcgcgagcaggagcgcatccaccgtgagcgcgaggagctgaggcgccagcaggaactgcgctatgagcaggagcggcggcccgcggtgcggcggccctacgacctggaccggcgagatgatgcctattggccggaagccaagcgggccgccctggatgagcgctaccattctgactttaaccgccaggaccgcttccacgactttgaccacagggaccgcggccgctaccccgaccactcggtggacaggagagaaggttcaaggtcaatgatgggagaacgagaaggacagcattacccagaacgccatggaggaccagagcgccacggccgggactcccgcgatggctgggggggctatggctctgacaagaggatgagcgagggccgggggctgcctcctccccccaggggcagacgtgactggggggaccatggccgaagagaggatgaccggtcatggcagggcacggccgacgggggcatgatggacagggatcacaagaggtggcaaggtggcgagagaagcatgtccggtcactccgggcctggccacatgatgaaccgaggaggaatgtcagggcgcggcagctttgccccaggcggggcctcccggggccaccccatcccacacggtggcatgcagggcgggtttggaggccagagccgggggagcaggcccagcgatgcccgcttcactcgccgctactgagtacttggaatcctgtgtcctgtctcgtggcaacaaggctatgttctgttaggagttaccttaaactgtgtaaaaatatttttttttaatctgctgccatattgtagctcaatacaatgtgaatttgtttttcgttttggggttttttttttttgtaataaatgtgtttccgttc

SEQ ID NO: 294938 - DNA, 2748 bp, Artificial Sequence
  derived and/or modified sequence
atggccgagaccctgagcggcctgggcgacagcggcgccgccggcgccgccgccctgagcagcgccagcagcgagaccggcaccagaagactgagcgacctgagagtgatcgacctgagagccgagctgagaaagagaaacgtggacagcagcggcaacaagagcgtgctgatggagagactgaagaaggccatcgaggacgagggcggcaaccccgacgagatcgagatcaccagcgagggcaacaagaagaccagcaagagaagcagcaagggcagaaagcccgaggaggagggcgtggaggacaacggcctggaggagaacagcggcgacggccaggaggacgtggagaccagcctggagaacctgcaggacatcgacatcatggacatcagcgtgctggacgaggccgagatcgacaacggcagcgtggccgactgcgtggaggacgacgacgccgacaacctgcaggagagcctgagcgacagcagagagctggtggagggcgagatgaaggagctgcccgagcagctgcaggagcacgccatcgaggacaaggagaccatcaacaacctggacaccagcagcagcgacttcaccatcctgcaggagatcgaggagcccagcctggagcccgagaacgagaagatcctggacatcctgggcgagacctgcaagagcgagcccgtgaaggaggagagcagcgagctggagcagcccttcgcccaggacaccagcagcgtgggccccgacagaaagctggccgaggaggaggacctgttcgacagcgcccaccccgaggagggcgacctggacctggccagcgagagcaccgcccacgcccagagcagcaaggccgacagcctgctggccgtggtgaagagagagcccgccgagcagcccggcgacggcgagagaaccgactgcgagcccgtgggcctggagcccgccgtggagcagagcagcgccgccagcgagctggccgaggccagcagcgaggagctggccgaggcccccaccgaggcccccagccccgaggccagagacagcaaggaggacggcagaaagttcgacttcgacgcctgcaacgaggtgccccccgcccccaaggagagcagcaccagcgagggcgccgaccagaagatgagcagccccgaggacgacagcgacaccaagagactgagcaaggaggagaagggcagaagcagctgcggcagaaacttctgggtgagcggcctgagcagcaccaccagagccaccgacctgaagaacctgttcagcaagtacggcaaggtggtgggcgccaaggtggtgaccaacgccagaagccccggcgccagatgctacggcttcgtgaccatgagcaccgccgaggaggccaccaagtgcatcaaccacctgcacaagaccgagctgcacggcaagatgatcagcgtggagaaggccaagaacgagcccgtgggcaagaagaccagcgacaagagagacagcgacggcaagaaggagaagagcagcaacagcgacagaagcaccaacctgaagagagacgacaagtgcgacagaaaggacgacgccaagaagggcgacgacggcagcggcgagaagagcaaggaccaggacgaccagaagcccggccccagcgagagaagcagagccaccaagagcggcagcagaggcaccgagagaaccgtggtgatggacaagagcaagggcgtgcccgtgatcagcgtgaagaccagcggcagcaaggagagagccagcaagagccaggacagaaagagcgccagcagagagaagagaagcgtggtgagcttcgacaaggtgaaggagcccagaaagagcagagacagcgagagccacagcagagtgagagagagaagcgagagagagcagagaatgcaggcccagtgggagagagaggagagagagagactggagatcgccagagagagactggccttccagagacagagactggagagagagagaatggagagagagagactggagagagagagaatgcacgtggagcacgagagaagaagagagcaggagagaatccacagagagagagaggagctgagaagacagcaggagctgagatacgagcaggagagaagacccgccgtgagaagaccctacgacctggacagaagagacgacgcctactggcccgaggccaagagagccgccctggacgagagataccacagcgacttcaacagacaggacagattccacgacttcgaccacagagacagaggcagataccccgaccacagcgtggacagaagagagggcagcagaagcatgatgggcgagagagagggccagcactaccccgagagacacggcggccccgagagacacggcagagacagcagagacggctggggcggctacggcagcgacaagagaatgagcgagggcagaggcctgccccccccccccagaagagactggggcgaccacggcagaagagaggacgacagaagctggcagggcaccgccgacggcggcatgatggacagagaccacaagagatggcagggcggcgagagaagcatgagcggccacagcggccccggccacatgatgaacagaggcggcatgagcggcagaggcagcttcgcccccggcggcgccagcagaggccaccccatcccccacggcggcatgcagggcggcttcggcggccagagcagaggcagcagacccagcgacgccagattcaccagaagatactag

SEQ ID NO: 294939 - DNA, 2244 bp, Artificial Sequence
  derived and/or modified sequence
atgaaggagctgcccgagcagctgcaggagcacgccatcgaggacaaggagaccatcaacaacctggacaccagcagcagcgacttcaccatcctgcaggagatcgaggagcccagcctggagcccgagaacgagaagatcctggacatcctgggcgagacctgcaagagcgagcccgtgaaggaggagagcagcgagctggagcagcccttcgcccaggacaccagcagcgtgggccccgacagaaagctggccgaggaggaggacctgttcgacagcgcccaccccgaggagggcgacctggacctggccagcgagagcaccgcccacgcccagagcagcaaggccgacagcctgctggccgtggtgaagagagagcccgccgagcagcccggcgacggcgagagaaccgactgcgagcccgtgggcctggagcccgccgtggagcagagcagcgccgccagcgagctggccgaggccagcagcgaggagctggccgaggcccccaccgaggcccccagccccgaggccagagacagcaaggaggacggcagaaagttcgacttcgacgcctgcaacgaggtgccccccgcccccaaggagagcagcaccagcgagggcgccgaccagaagatgagcagccccgaggacgacagcgacaccaagagactgagcaaggaggagaagggcagaagcagctgcggcagaaacttctgggtgagcggcctgagcagcaccaccagagccaccgacctgaagaacctgttcagcaagtacggcaaggtggtgggcgccaaggtggtgaccaacgccagaagccccggcgccagatgctacggcttcgtgaccatgagcaccgccgaggaggccaccaagtgcatcaaccacctgcacaagaccgagctgcacggcaagatgatcagcgtggagaaggccaagaacgagcccgtgggcaagaagaccagcgacaagagagacagcgacggcaagaaggagaagagcagcaacagcgacagaagcaccaacctgaagagagacgacaagtgcgacagaaaggacgacgccaagaagggcgacgacggcagcggcgagaagagcaaggaccaggacgaccagaagcccggccccagcgagagaagcagagccaccaagagcggcagcagaggcaccgagagaaccgtggtgatggacaagagcaagggcgtgcccgtgatcagcgtgaagaccagcggcagcaaggagagagccagcaagagccaggacagaaagagcgccagcagagagaagagaagcgtggtgagcttcgacaaggtgaaggagcccagaaagagcagagacagcgagagccacagcagagtgagagagagaagcgagagagagcagagaatgcaggcccagtgggagagagaggagagagagagactggagatcgccagagagagactggccttccagagacagagactggagagagagagaatggagagagagagactggagagagagagaatgcacgtggagcacgagagaagaagagagcaggagagaatccacagagagagagaggagctgagaagacagcaggagctgagatacgagcaggagagaagacccgccgtgagaagaccctacgacctggacagaagagacgacgcctactggcccgaggccaagagagccgccctggacgagagataccacagcgacttcaacagacaggacagattccacgacttcgaccacagagacagaggcagataccccgaccacagcgtggacagaagagagggcagcagaagcatgatgggcgagagagagggccagcactaccccgagagacacggcggccccgagagacacggcagagacagcagagacggctggggcggctacggcagcgacaagagaatgagcgagggcagaggcctgccccccccccccagaggcagaagagactggggcgaccacggcagaagagaggacgacagaagctggcagggcaccgccgacggcggcatgatggacagagaccacaagagatggcagggcggcgagagaagcatgagcggccacagcggccccggccacatgatgaacagaggcggcatgagcggcagaggcagcttcgcccccggcggcgccagcagaggccaccccatcccccacggcggcatgcagggcggcttcggcggccagagcagaggcagcagacccagcgacgccagattcaccagaagatactag

SEQ ID NO: 294940 - protein, 564 aa, Artificial Sequence
  derived and/or modified sequence
MSSHGNSLFLRESGQRLGRVGWLQRLQESLQQRALRTRLRLQTMTLEHVLRFLRRNAFILLTVSAVVIGVSLAFALRPYQLTYRQIKYFSFPGELLMRMLQMLVLPLIVSSLVTGMASLDNKATGRMGMRAAVYYMVTTIIAVFIGILMVTIIHPGKGSKEGLHREGRIETIPTADAFMDLIRNMFPPNLVEACFKQFKTQYSTRVVTRTMVRTENGSEPGASMPPPFSVENGTSFLENVTRALGTLQEMLSFEETVPVPGSANGINALGLVVFSVAFGLVIGGMKHKGRVLRDFFDSLNEAIMRLVGIIIWYAPVGILFLIAGKILEMEDMAVLGGQLGMYTLTVIVGLFLHAGIVLPLIYFLVTHRNPFPFIGGMLQALITAMGTSSSSATLPITFRCLEEGLGVDRRITRFVLPVGATVNMDGTALYEALAAIFIAQVNNYELNLGQITTISITATAASVGAAGIPQAGLVTMVIVLTSVGLPTEDITLIIAVDWFLDRLRTMTNVLGDSIGAAVIEHLSQRELELQEAELTLPSLGKPYKSLMAQEKGASRGRGGNESAM

SEQ ID NO: 294941 - protein, 500 aa, Artificial Sequence
  derived and/or modified sequence
MSIDHEQPWQQPVPAGERPAAGPGGLAAAAAGKPAAESTAHAPAPADHDPRARAALPAPKRLHSADGQRRGHWGQPGLCPAPISAHLPPDQVLLFSWRASDEDAADAGVTSHCLQPGHRNMFPPNLVEACFKQFKTQYSTRVVTRTMVRTENGSEPGASMPPPFSVENGTSFLENVTRALGTLQEMLSFEETVPVPGSANGINALGLVVFSVAFGLVIGGMKHKGRVLRDFFDSLNEAIMRLVGIIIWYAPVGILFLIAGKILEMEDMAVLGGQLGMYTLTVIVGLFLHAGIVLPLIYFLVTHRNPFPFIGGMLQALITAMGTSSSSATLPITFRCLEEGLGVDRRITRFVLPVGATVNMDGTALYEALAAIFIAQVNNYELNLGQITTISITATAASVGAAGIPQAGLVTMVIVLTSVGLPTEDITLIIAVDWFLDRLRTMTNVLGDSIGAAVIEHLSQRELELQEAELTLPSLGKPYKSLMAQEKGASRGRGGNESAM

SEQ ID NO: 294942 - protein, 205 aa, Artificial Sequence
  derived and/or modified sequence
TMSSHGNSLFLRESGQRLGRVGWLQRLQESLQQRALRTRLRLQTMTLEHVLRFLRRNAFILLTVSAVVIGVSLAFALRPYQLTYRQIKYFSFPGELLMRMLQMLVLPLIVSSLVTGMASLDNKATGRMGMRAAVYYMVTTIIAVFIGILMVTIIHPGKGSKEGLHREGRIETIPTADAFMDLIRNMFPPNLVEACFKQVRGKYTV

SEQ ID NO: 294943 - protein, 312 aa, Artificial Sequence
  derived and/or modified sequence
MSSHGNSLFLRESGQRLGRVGWLQRLQESLQQRALRTRLRLQTMTLEHVLRFLRRNAFILLTVSAVVIGVSLAFALRPYQLTYRQIKYFSFPGELLMRMLQMLVLPLIVSSLVTGMASLDNKATGRMGMRAAVYYMVTTIIAVFIGILMVTIIHPGKGSKEGLHREGRIETIPTADAFMDLIRNMFPPNLVEACFKQFKTQYSTRVVTRTMVRTENGSEPGASMPPPFSVENGTSFLENVTRALGTLQEMLSFEETVPVPGSANGINALGLVVFSVAFGLVIGGMKHKGRVLRDFFDSLNEAIMRLVGIIIW

SEQ ID NO: 294944 - DNA, 1503 bp, Artificial Sequence
  derived and/or modified sequence
atgagcatcgaccacgagcagccctggcagcagcccgtgcccgccggcgagagacccgccgccggccccggcggcctggccgccgccgccgccggcaagcccgccgccgagagcaccgcccacgcccccgcccccgccgaccacgaccccagagccagagccgccctgcccgcccccaagagactgcacagcgccgacggccagagaagaggccactggggccagcccggcctgtgccccgcccccatcagcgcccacctgccccccgaccaggtgctgctgttcagctggagagccagcgacgaggacgccgccgacgccggcgtgaccagccactgcctgcagcccggccacagaaacatgttcccccccaacctggtggaggcctgcttcaagcagttcaagacccagtacagcaccagagtggtgaccagaaccatggtgagaaccgagaacggcagcgagcccggcgccagcatgcccccccccttcagcgtggagaacggcaccagcttcctggagaacgtgaccagagccctgggcaccctgcaggagatgctgagcttcgaggagaccgtgcccgtgcccggcagcgccaacggcatcaacgccctgggcctggtggtgttcagcgtggccttcggcctggtgatcggcggcatgaagcacaagggcagagtgctgagagacttcttcgacagcctgaacgaggccatcatgagactggtgggcatcatcatctggtacgcccccgtgggcatcctgttcctgatcgccggcaagatcctggagatggaggacatggccgtgctgggcggccagctgggcatgtacaccctgaccgtgatcgtgggcctgttcctgcacgccggcatcgtgctgcccctgatctacttcctggtgacccacagaaaccccttccccttcatcggcggcatgctgcaggccctgatcaccgccatgggcaccagcagcagcagcgccaccctgcccatcaccttcagatgcctggaggagggcctgggcgtggacagaagaatcaccagattcgtgctgcccgtgggcgccaccgtgaacatggacggcaccgccctgtacgaggccctggccgccatcttcatcgcccaggtgaacaactacgagctgaacctgggccagatcaccaccatcagcatcaccgccaccgccgccagcgtgggcgccgccggcatcccccaggccggcctggtgaccatggtgatcgtgctgaccagcgtgggcctgcccaccgaggacatcaccctgatcatcgccgtggactggttcctggacagactgagaaccatgaccaacgtgctgggcgacagcatcggcgccgccgtgatcgagcacctgagccagagagagctggagctgcaggaggccgagctgaccctgcccagcctgggcaagccctacaagagcctgatggcccaggagaagggcgccagcagaggcagaggcggcaacgagagcgccatgtag

SEQ ID NO: 294945 - DNA, 1503 bp, Artificial Sequence
  derived and/or modified sequence
atgagcatcgaccacgaacagccctggcagcagccggttcctgctggtgaacgccccgccgcaggcccagggggtcttgctgcagccgcagccggaaaaccagccgctgagagcaccgcacatgcccccgctcctgccgaccatgacccaagagcacgtgctgccctgcctgcaccaaagcgattgcactctgccgatggacaacggaggggtcattggggacaaccagggctatgtcctgctccaatctccgcacatctccctccagaccaggtcctcctattctcatggagggcctcagatgaagacgccgcagatgccggtgtgacttcccactgcctccaacctggccacaggaacatgttcccccctaacctcgtggaggcttgttttaagcagttcaaaactcagtattcaacccgggtggtgactaggacaatggtcaggaccgaaaacggtagtgaacctggcgctagcatgccaccaccgtttagcgtcgaaaatggtacatccttcttagaaaacgtcacccgcgccctgggcaccttacaagagatgctctcattcgaggagactgtgcccgtgccggggtcagcaaatgggataaatgccctgggcctggtggtgtttagtgtggctttcggcctcgtcatcggtggcatgaaacacaaaggacgcgtgctgagggactttttcgattccttaaatgaggctatcatgaggctagtgggcattattatctggtacgcccctgtgggaatcctatttcttatcgccggaaaaatccttgagatggaagacatggcggtcctgggcggacagctagggatgtacactctcactgtcattgtgggcctgtttctgcatgctggaattgttctgcctttgatctactttctcgtgacccacaggaaccccttccctttcattggagggatgctccaagctctcattaccgcaatggggacgagctctagcagtgcaaccctccctattaccttccgatgtctggaggaagggctgggagtcgaccgacgaatcactcgcttcgtgcttcctgttggagccacagttaatatggacggcacggctctgtatgaagcccttgcggcgatcttcatcgcccaggtgaataactatgaactgaatctgggacaaatcaccacaatttccatcacagccacagccgcgtcagttggcgccgccggtatccctcaggcaggtctggtgaccatggtgatcgtcctcacctccgtcggcctgccaaccgaagacattactcttatcattgcagtcgattggttcttagacagactgcgcaccatgaccaatgttctcggggatagcatcggtgccgcggtaatcgaacacctctcccagagagaactcgagctacaagaggccgaactgacactgccttccctgggcaaaccatataagtcgctcatggcccaagagaaaggggcctcccgcggcagaggcggaaacgaatccgccatgtag

SEQ ID NO: 294946 - DNA, 1503 bp, Artificial Sequence
  derived and/or modified sequence
atgagcattgaccacgagcagccctggcagcagcctgtgcctgctggggagaggcctgctgctggccctgggggcctggccgctgctgctgctgggaagccagctgctgagagcacagcccacgccccagccccagctgaccatgacccccgggcccgggccgccctgcctgcccccaagaggctgcacagcgcagatggccagaggcggggccactggggccagcccggcctgtgcccagcccccatcagcgcccacctgcccccagaccaggtgctgctcttctcctggagggccagtgatgaagatgctgctgatgctggggtgaccagccactgcctgcagcccggccacaggaacatgtttcctcccaacctggtggaggcctgcttcaagcagttcaagacccagtacagcaccagggtggtgaccaggaccatggtgaggacagaaaatggcagcgagcccggggcctccatgcccccacccttctctgtggagaatggcaccagcttcctggagaatgtgacccgggccctgggcaccctgcaggagatgctgagctttgaggagaccgtgcctgtgcccggcagcgccaacggcatcaatgccctgggcctggtggtgttttctgtggccttcggcctggtgattggaggcatgaagcacaagggccgggtgctgcgggacttctttgacagcctgaatgaggccatcatgaggctggtgggcatcatcatctggtacgcccctgtgggcatcctcttcctgattgctgggaagatcctggagatggaggacatggctgtgctgggcggccagctgggcatgtacaccctgactgtgattgtgggcctcttcctgcacgccggcatcgtgctgcccctcatctacttcctggtgacccacaggaaccccttccccttcatcggcggcatgctgcaggccctgatcacagccatgggcaccagcagcagcagcgccaccctgcccatcaccttccgctgcctggaggagggcctgggcgtggaccggcgcatcaccaggtttgtgctgcctgtgggcgccaccgtgaacatggatggaacagccctgtatgaggccctggccgccatcttcatcgcccaggtgaacaactatgagctgaacctgggccagatcaccaccatcagcatcacagccacagctgcctctgtgggcgccgccggcatcccccaggccggcctggtgaccatggtgattgtgctgacctctgtgggcctgcccacagaggacatcaccctcatcatcgctgtggactggttcctggaccggctgcggaccatgaccaacgtgctgggggacagcatcggggctgctgtgattgagcacctgagccagcgggagctggagctgcaggaggccgagctgaccctgcccagcctgggcaagccctacaagagcctgatggcccaggagaagggggccagccggggccggggcggcaatgaaagtgccatgtag

SEQ ID NO: 294947 - DNA, 1503 bp, Artificial Sequence
  derived and/or modified sequence
atgagcatcgaccacgagcagccctggcagcagcccgtgcccgccggcgagcgcccagctgcagggcctggggggttggccgcagccgcagcgggcaagcccgctgccgagagcaccgctcacgcccctgcccccgcagatcacgaccctcgtgccagagccgcactgccagcccccaagaggctacacagcgcggacggccagcggagaggccattgggggcagccaggtctgtgtccagcccccattagtgcgcaccttccacccgatcaggttctacttttcagttggagagcatccgatgaggatgccgccgatgccggggtcacatcccattgcctccaacccggccatcggaatatgtttcctcccaaccttgtagaagcctgctttaaacagttcaaaacgcagtactctacacgtgtggtcaccaggacgatggtgcgcactgaaaacggcagcgagccaggggcttcaatgcccccacctttcagcgtggagaacggaaccagctttctggaaaacgtcacccgcgctctcggtactttgcaggagatgctgtccttcgaggaaacagtgcccgttcccggaagcgccaacggtattaacgcccttggactggtagtgtttagcgtggcttttggtctagtcataggcggcatgaagcataaaggcagggtcctacgtgactttttcgactctctgaatgaggccatcatgaggctggtgggcattattatttggtatgccccagttggcatccttttcctaatagccggcaagatacttgagatggaggatatggctgttctgggtggacagcttgggatgtatacactgactgttattgtgggtctttttctgcacgccggaatcgtgctccccttaatctacttcttggttacccacagaaatccgtttcccttcattggtggtatgctccaggcattaatcactgccatggggacgagtagtagttctgcaactctgcccataaccttccggtgtttagaagaaggcttaggagtggatcgcaggataacaagatttgtcctccccgtgggagcaaccgtgaacatggacggcactgcactgtacgaggccctggccgccattttcatagcccaggttaataattacgaattaaatctgggtcagattacgacaatttctatcactgccaccgctgccagtgtcggagcagccggtattcctcaggccggactagtgaccatggtgattgtgctgacctccgtcggtctcccaacagaagatattaccttaatcatagcagtggactggtttctggacagacttcggactatgaccaacgtgctcggagattccatcggagctgcagtgatcgaacacttgtcccaaagagagctggaattgcaggaggcagagcttacgctgccctccctgggtaagccttacaaatccctgatggcgcaggaaaagggggcatcacggggtcgggggggcaacgaatcagccatgtag

SEQ ID NO: 294948 - DNA, 1503 bp, Artificial Sequence
  derived and/or modified sequence
atgtcaatcgaccatgagcagccatggcagcaacctgttcccgcaggtgaacgaccagctgccggtccaggaggcctggcagccgctgccgctggcaagccagcagccgagtcgaccgctcatgcgccagctcctgctgatcatgacccccgagcacgggctgccctgcctgccccaaaacgtctgcacagtgctgacgggcagagaaggggacactggggtcaacctggactgtgtccggcacccatctcagcacatttgcctcccgaccaggtgctcctgttttcttggagggcatcggacgaagatgccgcagatgcgggagtaacatcccactgcctgcagccagggcatcggaatatgttcccacccaacctcgttgaggcttgctttaagcagtttaagactcaatattctactcgagttgtgaccaggacgatggttagaacggaaaatgggtccgagccgggagcttcaatgcctccccctttttcggtggaaaacggtaccagctttttggaaaacgtgacaagagccctcgggaccctgcaggagatgctttccttcgaagagacggtgcctgtgccaggatcagctaacggcataaatgccctgggactggtcgtattcagcgtagcttttgggctcgtcataggcggaatgaaacataaaggcagggtgttgagagacttctttgattctctgaacgaagctattatgcgtctcgtgggcatcattatctggtatgcacctgtcgggatccttttcctcatcgctgggaaaattcttgagatggaggatatggccgtgttaggaggccagttgggtatgtatactctcaccgttatcgttgggctatttcttcacgcagggattgtgcttcctttgatctactttctggtgacgcatagaaatccctttcccttcatcggcggtatgttgcaggccttaattactgcaatgggcaccagcagtagcagtgccactctacctattacattccgatgccttgaggaggggctgggtgtcgataggagaatcactcggttcgtgctgcccgttggggctacagtgaatatggacggcacagcgctttatgaagccttggctgccatcttcattgctcaagtgaacaactacgagctcaatctggggcagatcaccaccataagtatcaccgcgaccgcggctagcgttggtgcggctggaatcccccaagccggattggtcactatggtcattgtactgacctcagtcggcctgcctactgaagatataacacttatcatcgccgtggactggttcctggataggctgagaaccatgactaatgtgctgggagatagcataggcgctgccgtcatcgagcacttgtcccagcgcgaactggaactgcaagaagctgagctgacactgccttccttggggaaaccgtataagtcactcatggcccaggaaaaaggcgcatctagggggagggggggaaacgagtctgctatgtag

SEQ ID NO: 294949 - DNA, 1719 bp, Artificial Sequence
  derived and/or modified sequence
gatagaccatgagcagccatggcaacagcctgttcctgcgggagagcggccagcggctgggccgggtgggctggctgcagcggctgcaggaaagcctgcagcagagagcactgcgcacgcgcctgcgcctgcagaccatgaccctcgagcacgtgctgcgcttcctgcgccgaaacgccttcattctgctgacggtcagcgccgtggtcattggggtcagcctggcctttgccctgcgcccatatcagctcacctaccgccagatcaagtacttctcttttcctggagagcttctgatgaggatgctgcagatgctggtgttacctctcattgtctccagcctggtcacaggtatggcatccctggacaacaaggccacggggcggatggggatgcgggcagctgtgtactacatggtgaccaccatcatcgcggtcttcatcggcatcctcatggtcaccatcatccatcccgggaagggctccaaggaggggctgcaccgggagggccggatcgagaccatccccacagctgatgccttcatggacctgatcagaaatatgtttccaccaaaccttgtggaggcctgcttcaaacagttcaagacgcagtacagcacgagggtggtaaccaggaccatggtgaggacagagaacgggtctgagccgggtgcctccatgcctcctccattctcagtggagaacggaaccagcttcctggaaaatgtcactcgggccttgggtaccctgcaggagatgctgagctttgaggagactgtacccgtgcctggctccgccaatggcatcaacgccctgggcctcgtggtcttctctgtggcctttgggctggtcattggtggcatgaaacacaagggcagagtcctcagggacttcttcgacagcctcaatgaggctattatgaggctggtgggcatcattatctggtatgcacctgtgggcatcctgttcctgattgctgggaagattctggagatggaagacatggccgtcctggggggtcagctgggcatgtacaccctgaccgtcatcgtgggcctgttcctccatgccggcattgtccttcccctcatctacttcctcgtcactcaccggaaccccttccccttcattgggggcatgctacaagccctcatcaccgctatgggcacgtcttccagctcggcaacgctgcccatcaccttccgctgcctggaggagggcctgggtgtggaccgccgcatcaccaggttcgtcctgcccgtgggcgccacggtcaacatggatggcactgccctctacgaggccctggctgccatcttcattgctcaagttaacaactacgagctcaacctgggtcagatcacaaccatcagcatcacggccacagcagccagtgttggggctgctggcatcccccaggcgggtctggtcaccatggtcattgtgcttacgtcggtcggcttgcccacggaagacatcacgctcatcattgccgtggactggttccttgaccggcttcgcacaatgaccaacgtactgggggactcaattggagcggccgtcatcgagcacttgtctcagcgggagctggagcttcaggaagctgagcttaccctccccagcctggggaaaccctacaagtccctcatggcacaggagaagggggcatcccggggacggggaggcaacgagagtgctatgtgaggggcctccagctctg

SEQ ID NO: 294950 - DNA, 1794 bp, Artificial Sequence
  derived and/or modified sequence
actggcatcctgactccttgagaaagagcccatctagcatccttctcgccgttgcttccagcaacatggcccttcttccagctttaggatgtcctaagcgcttccagctgtccaggtcacactctgtcgcatgtcgatagaccatgagcagccatggcaacagcctgttcctgcgggagagcggccagcggctgggccgggtgggctggctgcagcggctgcaggaaagcctgcagcagagagcactgcgcacgcgcctgcgcctgcagaccatgaccctcgagcacgtgctgcgcttcctgcgccgaaacgccttcattctgctgacggtcagcgccgtggtcattggggtcagcctggcctttgccctgcgcccatatcagctcacctaccgccagatcaagtacttctcttttcctggagagcttctgatgaggatgctgcagatgctggtgttacctctcattgtctccagcctggtcacagaaatatgtttccaccaaaccttgtggaggcctgcttcaaacagttcaagacgcagtacagcacgagggtggtaaccaggaccatggtgaggacagagaacgggtctgagccgggtgcctccatgcctcctccattctcagtggagaacggaaccagcttcctggaaaatgtcactcgggccttgggtaccctgcaggagatgctgagctttgaggagactgtacccgtgcctggctccgccaatggcatcaacgccctgggcctcgtggtcttctctgtggcctttgggctggtcattggtggcatgaaacacaagggcagagtcctcagggacttcttcgacagcctcaatgaggctattatgaggctggtgggcatcattatctggtatgcacctgtgggcatcctgttcctgattgctgggaagattctggagatggaagacatggccgtcctggggggtcagctgggcatgtacaccctgaccgtcatcgtgggcctgttcctccatgccggcattgtccttcccctcatctacttcctcgtcactcaccggaaccccttccccttcattgggggcatgctacaagccctcatcaccgctatgggcacgtcttccagctcggcaacgctgcccatcaccttccgctgcctggaggagggcctgggtgtggaccgccgcatcaccaggttcgtcctgcccgtgggcgccacggtcaacatggatggcactgccctctacgaggccctggctgccatcttcattgctcaagttaacaactacgagctcaacctgggtcagatcacaaccatcagcatcacggccacagcagccagtgttggggctgctggcatcccccaggcgggtctggtcaccatggtcattgtgcttacgtcggtcggcttgcccacggaagacatcacgctcatcattgccgtggactggttccttgaccggcttcgcacaatgaccaacgtactgggggactcaattggagcggccgtcatcgagcacttgtctcagcgggagctggagcttcaggaagctgagcttaccctccccagcctggggaaaccctacaagtccctcatggcacaggagaagggggcatcccggggacggggaggcaacgagagtgctatgtgaggggcctccagctctgcccccccagagaggagggaagggggctggggaggggagtcctggtgacacatctgttgcccaactgaccgtgggctgaacacacgttctgcttgactcatttaggggggagggaaaagtgaaataaaggagcaggaatgaaaggt

SEQ ID NO: 294951 - DNA, 1695 bp, Artificial Sequence
  derived and/or modified sequence
atgtcatcccacggcaactctctgttccttagggaaagtggacagcgactgggtcgcgtcggttggctgcagagattacaggaaagcctccagcagcgtgctctgaggacccgtcttcgtctgcaaaccatgaccctggagcacgtgctgcggttccttcgcaggaacgccttcatactgttgacagtgtccgccgttgtgataggggtgagcttggcattcgccctgcggccctaccaactcacgtacagacagatcaagtactttagctttccaggagagctgctcatgcgtatgctccaaatgttagttcttccgcttattgtctccagtctggtgaccggcatggcaagccttgacaacaaagctaccggaaggatgggcatgcgagcggccgtgtattatatggttactacaatcattgctgttttcattgggattctaatggtgaccattatacatccaggcaaagggagcaaggagggtctgcatcgcgaaggtcgcatcgagaccatcccgacagcagatgcattcatggatctcatcagaaatatgttccctcccaatctcgttgaagcctgtttcaagcagttcaaaacgcagtatagtacacgagttgtgaccaggactatggtgagaactgagaacggtagcgagcccggtgcctccatgccccctcctttctccgtagaaaatgggacctccttcttagagaatgtaactcgcgcactggggaccctgcaagaaatgcttagctttgaagagactgtgcccgtaccgggctctgcaaacggaatcaacgcgctgggcctggtggtgttcagtgtggccttcggactggtaattggagggatgaaacataaaggcagggtcctgcgggattttttcgactcgttgaacgaagccataatgcgcttggtgggcattattatttggtatgcgccagtggggatcctattcctcattgcgggaaaaatcctcgagatggaggacatggccgtgctgggcggccagctgggcatgtacaccctgacagtaatcgtgggcctgtttctccacgctggcattgtgcttccacttatctattttttggttacccaccgtaacccatttccttttattggcggcatgctgcaggccctgataaccgccatggggacctcatctagttccgccacactcccaatcacgtttagatgcctggaggagggcctcggtgttgataggaggattacgaggtttgtcctcccggtaggggccacggttaatatggatggcactgctctgtacgaagcacttgctgctatttttattgctcaggtcaataactatgaactcaacctgggccagattacaaccatctccatcacagcaaccgctgccagtgttggggcagcaggaataccccaggccggattagtgacaatggtgattgtgctcactagcgtggggctacccaccgaggacattacactcataattgctgtggattggtttttagaccggctgaggactatgaccaatgtgctcggagatagcatcggggccgccgttatcgaacaccttagtcagagggaactggaactgcaggaggcagagctgactctgccttcgctgggcaagccctacaagagtctgatggcacaagaaaagggggcctcaaggggacggggaggcaacgaatccgccatgtag

SEQ ID NO: 294952 - DNA, 1695 bp, Artificial Sequence
  derived and/or modified sequence
atgagcagccacggcaacagcctcttcctgcgggagagcggccagaggctgggccgggtgggctggctgcagaggctgcaggagagcctgcagcagagggccctgcggacccggctgcggctgcagaccatgaccctggagcacgtgctgcgcttcctgcggagaaatgccttcatcctgctgactgtgtctgctgtggtgattggagtgtccctggcctttgccctgcggccctaccagctgacctaccggcagatcaagtacttctccttccctggagagctgctgatgaggatgctgcagatgctggtgctgcccctcatcgtgagcagcctggtgacaggcatggccagcctggacaacaaggccaccggccgcatgggcatgagagctgctgtgtactacatggtgaccaccatcatcgctgtgttcatcggcatcctgatggtgaccatcatccaccctgggaagggcagcaaggagggcctgcaccgggagggcagaattgagaccatccccacagcagatgccttcatggacctgatccggaacatgtttcctcccaacctggtggaggcctgcttcaagcagttcaagacccagtacagcaccagggtggtgaccaggaccatggtgaggacagaaaatggcagcgagcccggggcctccatgcccccacccttctctgtggagaatggcaccagcttcctggagaatgtgacccgggccctgggcaccctgcaggagatgctgagctttgaggagaccgtgcctgtgcccggcagcgccaacggcatcaatgccctgggcctggtggtgttttctgtggccttcggcctggtgattggaggcatgaagcacaagggccgggtgctgcgggacttctttgacagcctgaatgaggccatcatgaggctggtgggcatcatcatctggtacgcccctgtgggcatcctcttcctgattgctgggaagatcctggagatggaggacatggctgtgctgggcggccagctgggcatgtacaccctgactgtgattgtgggcctcttcctgcacgccggcatcgtgctgcccctcatctacttcctggtgacccacaggaaccccttccccttcatcggcggcatgctgcaggccctgatcacagccatgggcaccagcagcagcagcgccaccctgcccatcaccttccgctgcctggaggagggcctgggcgtggaccggcgcatcaccaggtttgtgctgcctgtgggcgccaccgtgaacatggatggaacagccctgtatgaggccctggccgccatcttcatcgcccaggtgaacaactatgagctgaacctgggccagatcaccaccatcagcatcacagccacagctgcctctgtgggcgccgccggcatcccccaggccggcctggtgaccatggtgattgtgctgacctctgtgggcctgcccacagaggacatcaccctcatcatcgctgtggactggttcctggaccggctgcggaccatgaccaacgtgctgggggacagcatcggggctgctgtgattgagcacctgagccagcgggagctggagctgcaggaggccgagctgaccctgcccagcctgggcaagccctacaagagcctgatggcccaggagaagggggccagccggggccggggcggcaatgaaagtgccatgtag

SEQ ID NO: 294953 - DNA, 1695 bp, Artificial Sequence
  derived and/or modified sequence
atgagcagccacggcaacagcctgttcctgcgggagagcggccagcgcctaggcagagtaggatggctgcaacgtcttcaagaaagtctccagcaaagagcgctgcgtacacggctgcgtctccaaactatgaccctcgagcatgttctccgcttcttgcgaagaaatgcgtttattctgctgacggttagtgctgtggtgattggtgttagtcttgcattcgccttgcgaccctaccaactgacttatcgacagattaagtacttttcctttcctggggaattactaatgcgcatgctccaaatgctggtccttccacttattgtttccagcctggtcactgggatggcaagtctcgataataaagctacaggtaggatgggcatgagagccgcagtttactacatggtcacgaccattatcgcagttttcatcggcatcctgatggttaccattattcaccctggcaaaggatcgaaagagggattgcaccgcgaaggtaggatagagacaatcccaacggctgacgctttcatggacctcatccggaacatgttccctccgaacctggtggaggcatgcttcaaacaatttaagacacagtactccactagagttgtgacgcgaacaatggttagaacagagaacgggtcagaacccggtgcgagcatgcctccccccttcagcgtcgagaatggtacctcattcctggaaaacgtgacccgcgcactgggaacactgcaggagatgttaagtttcgaggaaactgtgcctgtccctggttctgcaaacggcattaatgccctggggctcgtagtttttagcgtcgcgttcggtctggtaatcggcggcatgaaacataaaggaagagtgttgcgggacttttttgactctctgaacgaagccatcatgaggctggtgggtattatcatttggtacgccccagtcggtattctgtttctgatcgcaggcaaaatcttggagatggaggatatggcagtcctaggcggacagctcggcatgtacactctgactgtgattgtcggactatttctgcacgcaggaattgtactccccttgatctacttcctcgtgacccaccggaatccatttcccttcattggaggcatgctgcaagctctcattacagcaatgggcacatccagttcctccgcgacattacctataacatttcggtgtctcgaggaggggttgggcgtagaccgccggatcacgagatttgttttgcccgtgggagcgaccgtgaacatggatggcaccgccctatacgaagctctggccgcaatattcattgctcaggtcaacaactatgaactcaacctgggtcagattaccaccatttccattaccgccacagcagcatctgttggcgcagccggcatacctcaggcagggctcgtgaccatggtgattgtgctcactagcgtcggattgccaactgaagacatcactctcataattgctgtcgactggtttcttgatagacttcgcaccatgacgaatgtcctgggcgactccatcggtgcagccgtgatcgaacacctgtcccagagagagctggagctgcaggaggctgagctgactctgccctcattgggtaagccttataagagcctgatggcgcaggagaagggcgcctctcggggtaggggcggaaatgagtccgctatgtag

SEQ ID NO: 294954 - DNA, 1695 bp, Artificial Sequence
  derived and/or modified sequence
atgagtagccatgggaatagcctttttttaagggagagtggccagcgtcttggaagagtcggctggctacaacgtctacaggagtcactgcagcagagggctctccggacccgtctccggctgcagacaatgacgcttgaacacgtgctccgatttctgagacgcaatgctttcattttactaactgtctccgccgtcgtgatcggagtgagcctggctttcgctcttcgcccatatcagctcacataccggcagatcaagtatttttcatttccaggcgagctgctcatgcgaatgttacagatgctggttctccctctgatagtatccagtttagtgactggcatggcaagcctcgataacaaggctaccgggaggatgggtatgcgcgcagccgtgtattatatggtgaccaccatcattgctgtcttcattgggatcttaatggtgaccatcatccacccagggaagggatcgaaggaaggccttcaccgcgagggacgcatagagacaattccaactgccgatgcttttatggatcttataagaaacatgtttcctccgaacttggttgaggcatgttttaaacagttcaaaacccagtatagcaccagggtggtcactcgaacaatggtgcgcactgagaatggctctgagcccggtgcgtctatgccacccccattcagtgtggaaaacgggacaagttttctggagaacgttacgcgggctctcgggacattgcaggaaatgttgagttttgaagaaacagtccctgtccctggtagcgccaacggaattaatgctctgggactcgtagtcttttccgtcgcttttgggctggtgatcgggggtatgaagcataagggccgtgttctccgggacttcttcgactcattgaacgaggctatcatgcgcctggtgggcattatcatctggtacgccccagtcggcattctgtttctgattgctgggaagatactggaaatggaggatatggctgttctggggggtcaactcggcatgtacactcttactgtaattgtcggactgtttctacatgcaggcattgtcctccctctgatctatttcctggtgacccataggaacccattcccgttcatcggcggtatgcttcaggctctgatcacagccatggggacctcgtcttcttccgctacactacccattacttttcggtgtctggaggagggccttggcgtggatcgtagaatcactcgattcgtgctgcccgtgggcgcaacagtaaatatggacggaactgccctgtatgaggcactcgctgcgatcttcatcgcccaggtcaacaattatgagctgaatttgggccagatcacaactatttcaatcacggcaactgcggctagcgtcggggctgcaggcataccccaggccggtctggttacaatggtgatagtgctgacatcagtgggactgcccacggaggacatcactctgatcattgcagtcgattggtttctcgacagactgcgcaccatgactaatgttctcggagatagtatcggcgcagccgtgattgaacacctgtcccagcgagagctggagctccaagaggccgagctcacccttccttccctaggtaagccttacaaaagccttatggcccaagagaagggcgcttcacggggacgaggagggaacgagtccgcaatgtag

SEQ ID NO: 294955 - DNA, 1695 bp, Artificial Sequence
  derived and/or modified sequence
atgagcagccacggcaacagcctgttcctgagagagagcggccagagactgggcagagtgggctggctgcagagactgcaggagagcctgcagcagagagccctgagaaccagactgagactgcagaccatgaccctggagcacgtgctgagattcctgagaagaaacgccttcatcctgctgaccgtgagcgccgtggtgatcggcgtgagcctggccttcgccctgagaccctaccagctgacctacagacagatcaagtacttcagcttccccggcgagctgctgatgagaatgctgcagatgctggtgctgcccctgatcgtgagcagcctggtgaccggcatggccagcctggacaacaaggccaccggcagaatgggcatgagagccgccgtgtactacatggtgaccaccatcatcgccgtgttcatcggcatcctgatggtgaccatcatccaccccggcaagggcagcaaggagggcctgcacagagagggcagaatcgagaccatccccaccgccgacgccttcatggacctgatcagaaacatgttcccccccaacctggtggaggcctgcttcaagcagttcaagacccagtacagcaccagagtggtgaccagaaccatggtgagaaccgagaacggcagcgagcccggcgccagcatgcccccccccttcagcgtggagaacggcaccagcttcctggagaacgtgaccagagccctgggcaccctgcaggagatgctgagcttcgaggagaccgtgcccgtgcccggcagcgccaacggcatcaacgccctgggcctggtggtgttcagcgtggccttcggcctggtgatcggcggcatgaagcacaagggcagagtgctgagagacttcttcgacagcctgaacgaggccatcatgagactggtgggcatcatcatctggtacgcccccgtgggcatcctgttcctgatcgccggcaagatcctggagatggaggacatggccgtgctgggcggccagctgggcatgtacaccctgaccgtgatcgtgggcctgttcctgcacgccggcatcgtgctgcccctgatctacttcctggtgacccacagaaaccccttccccttcatcggcggcatgctgcaggccctgatcaccgccatgggcaccagcagcagcagcgccaccctgcccatcaccttcagatgcctggaggagggcctgggcgtggacagaagaatcaccagattcgtgctgcccgtgggcgccaccgtgaacatggacggcaccgccctgtacgaggccctggccgccatcttcatcgcccaggtgaacaactacgagctgaacctgggccagatcaccaccatcagcatcaccgccaccgccgccagcgtgggcgccgccggcatcccccaggccggcctggtgaccatggtgatcgtgctgaccagcgtgggcctgcccaccgaggacatcaccctgatcatcgccgtggactggttcctggacagactgagaaccatgaccaacgtgctgggcgacagcatcggcgccgccgtgatcgagcacctgagccagagagagctggagctgcaggaggccgagctgaccctgcccagcctgggcaagccctacaagagcctgatggcccaggagaagggcgccagcagaggcagaggcggcaacgagagcgccatgtag

SEQ ID NO: 294956 - DNA, 175 bp, Artificial Sequence
  derived and/or modified sequence
attcagttggccactgctgagcagctgagaaggtggcgacgtaggggccatggggctgggccgggtcctgctgtttctggccgtcgccttcccttttgcacccccggcagccgccgctgtagagatggggtttcaccgtgttagtcaggatggtctcgatctcctgacctcgtga

SEQ ID NO: 294957 - protein, 1112 aa, Artificial Sequence
  derived and/or modified sequence
MALKMVKGSIDRMFDKNLQDLVRGIRNHKEDEAKYISQCIDEIKQELKQDNIAVKANAVCKLTYLQMLGYDISWAAFNIIEVMSASKFTFKRIGYLAASQSFHEGTDVIMLTTNQIRKDLSSPSQYDTGVALTGLSCFVTPDLARDLANDIMTLMSHTKPYIRKKAKLIEPLTNLIHSTSAMSLLYECVNTVIAVLISLSSGMPNHSASIQLCVQKLRILIEDSDQNLKYLGLLAMSKILKTHPKSVQSHKDLILQCLDDKDESIRLRALDLLYGMVSKKNLMEIVKKLMTHVDKAEGTTYRDELLTKIIDICSQSNYQYITNFEWYISILVELTRLEGTRHGHLIAAQMLDVAIRVKAIRKFAVSQMSALLDSAHLLASSTQRNGICEVLYAAAWICGEFSEHLQEPHHTLEAMLRPRVTTLPGHIQAVYVQNVVKLYASILQQKEQAGEAEGAQAVTQLMVDRLPQFVQSADLEVQERASCILQLVKHIQKLQAKDVPVAEEVSALFAGELNPVAPKAQKKVPVPEGLDLDAWINEPLSDSESEDERPRAVFHEEEQRRPKHRPSEADEEELARRREARKQEQANNPFYIKSSPSPQKRYQDTPGVEHIPVVQIDLSVPLKVPGLPMSDQYVKLEEERRHRQKLEKDKRRKKRKEKEKKGKRRHSSLPTESDEDIAPAQQVDIVTEEMPENALPSDEDDKDPNDPYRALDIDLDKPLADSEKLPIQKHRNTETSKSPEKDVPMVEKKSKKPKKKEKKHKEKERDKEKKKEKEKKAEDLDFWLSTTPPPAPAPAPAPVPSTDECEDAKTEAQGEEDDAEGQDQDKKSPKPKKKKHRKEKEERTKGKKKSKKQPPGSEEAAGEPVQNGAPEEEQLPPESSYSLLAENSYVKMTCDIRGSLQEDSQVTVAIVLENRSSSILKGMELSVLDSLNARMARPQGSSVHDGVPVPFQLPPGVSNEAQYVFTIQSIVMAQKLKGTLSFIAKNDEGATHEKLDFRLHFSCSSYLITTPCYSDAFAKLLESGDLSMSSIKVDGIRMSFQNLLAKICFHHHFSVVERVDSCASMYSRSIQGHHVCLLVKKGENSVSVDGKCSDSTLLSNLLEEMKATLAKC

SEQ ID NO: 294958 - DNA, 3339 bp, Artificial Sequence
  derived and/or modified sequence
atggccctgaagatggtgaagggcagcatcgacagaatgttcgacaagaacctgcaggacctggtgagaggcatcagaaaccacaaggaggacgaggccaagtacatcagccagtgcatcgacgagatcaagcaggagctgaagcaggacaacatcgccgtgaaggccaacgccgtgtgcaagctgacctacctgcagatgctgggctacgacatcagctgggccgccttcaacatcatcgaggtgatgagcgccagcaagttcaccttcaagagaatcggctacctggccgccagccagagcttccacgagggcaccgacgtgatcatgctgaccaccaaccagatcagaaaggacctgagcagccccagccagtacgacaccggcgtggccctgaccggcctgagctgcttcgtgacccccgacctggccagagacctggccaacgacatcatgaccctgatgagccacaccaagccctacatcagaaagaaggccaagctgatcgagcccctgaccaacctgatccacagcaccagcgccatgagcctgctgtacgagtgcgtgaacaccgtgatcgccgtgctgatcagcctgagcagcggcatgcccaaccacagcgccagcatccagctgtgcgtgcagaagctgagaatcctgatcgaggacagcgaccagaacctgaagtacctgggcctgctggccatgagcaagatcctgaagacccaccccaagagcgtgcagagccacaaggacctgatcctgcagtgcctggacgacaaggacgagagcatcagactgagagccctggacctgctgtacggcatggtgagcaagaagaacctgatggagatcgtgaagaagctgatgacccacgtggacaaggccgagggcaccacctacagagacgagctgctgaccaagatcatcgacatctgcagccagagcaactaccagtacatcaccaacttcgagtggtacatcagcatcctggtggagctgaccagactggagggcaccagacacggccacctgatcgccgcccagatgctggacgtggccatcagagtgaaggccatcagaaagttcgccgtgagccagatgagcgccctgctggacagcgcccacctgctggccagcagcacccagagaaacggcatctgcgaggtgctgtacgccgccgcctggatctgcggcgagttcagcgagcacctgcaggagccccaccacaccctggaggccatgctgagacccagagtgaccaccctgcccggccacatccaggccgtgtacgtgcagaacgtggtgaagctgtacgccagcatcctgcagcagaaggagcaggccggcgaggccgagggcgcccaggccgtgacccagctgatggtggacagactgccccagttcgtgcagagcgccgacctggaggtgcaggagagagccagctgcatcctgcagctggtgaagcacatccagaagctgcaggccaaggacgtgcccgtggccgaggaggtgagcgccctgttcgccggcgagctgaaccccgtggcccccaaggcccagaagaaggtgcccgtgcccgagggcctggacctggacgcctggatcaacgagcccctgagcgacagcgagagcgaggacgagagacccagagccgtgttccacgaggaggagcagagaagacccaagcacagacccagcgaggccgacgaggaggagctggccagaagaagagaggccagaaagcaggagcaggccaacaaccccttctacatcaagagcagccccagcccccagaagagataccaggacacccccggcgtggagcacatccccgtggtgcagatcgacctgagcgtgcccctgaaggtgcccggcctgcccatgagcgaccagtacgtgaagctggaggaggagagaagacacagacagaagctggagaaggacaagagaagaaagaagagaaaggagaaggagaagaagggcaagagaagacacagcagcctgcccaccgagagcgacgaggacatcgcccccgcccagcaggtggacatcgtgaccgaggagatgcccgagaacgccctgcccagcgacgaggacgacaaggaccccaacgacccctacagagccctggacatcgacctggacaagcccctggccgacagcgagaagctgcccatccagaagcacagaaacaccgagaccagcaagagccccgagaaggacgtgcccatggtggagaagaagagcaagaagcccaagaagaaggagaagaagcacaaggagaaggagagagacaaggagaagaagaaggagaaggagaagaaggccgaggacctggacttctggctgagcaccacccccccccccgcccccgcccccgcccccgcccccgtgcccagcaccgacgagtgcgaggacgccaagaccgaggcccagggcgaggaggacgacgccgagggccaggaccaggacaagaagagccccaagcccaagaagaagaagcacagaaaggagaaggaggagagaaccaagggcaagaagaagagcaagaagcagccccccggcagcgaggaggccgccggcgagcccgtgcagaacggcgcccccgaggaggagcagctgccccccgagagcagctacagcctgctggccgagaacagctacgtgaagatgacctgcgacatcagaggcagcctgcaggaggacagccaggtgaccgtggccatcgtgctggagaacagaagcagcagcatcctgaagggcatggagctgagcgtgctggacagcctgaacgccagaatggccagaccccagggcagcagcgtgcacgacggcgtgcccgtgcccttccagctgccccccggcgtgagcaacgaggcccagtacgtgttcaccatccagagcatcgtgatggcccagaagctgaagggcaccctgagcttcatcgccaagaacgacgagggcgccacccacgagaagctggacttcagactgcacttcagctgcagcagctacctgatcaccaccccctgctacagcgacgccttcgccaagctgctggagagcggcgacctgagcatgagcagcatcaaggtggacggcatcagaatgagcttccagaacctgctggccaagatctgcttccaccaccacttcagcgtggtggagagagtggacagctgcgccagcatgtacagcagaagcatccagggccaccacgtgtgcctgctggtgaagaagggcgagaacagcgtgagcgtggacggcaagtgcagcgacagcaccctgctgagcaacctgctggaggagatgaaggccaccctggccaagtgctag

SEQ ID NO: 294959 - DNA, 3339 bp, Artificial Sequence
  derived and/or modified sequence
atggctttgaagatggtaaaaggcagcattgacaggatgttcgataagaatttgcaggacttagtgaggggcattcggaatcacaaggaggatgaggctaaatatatcagccagtgcattgatgaaattaagcaggagttgaaacaggataacatagccgtgaaggccaacgccgtctgtaagttaacctatctgcaaatgctgggatatgacatcagctgggccgccttcaatataattgaagtcatgtctgcgtcaaagtttacctttaagaggattgggtatctggctgctagccaatcttttcacgaaggcacagatgtaattatgttaactaccaaccagatccgcaaagatctgagtagcccctcgcaatacgacaccggggtggccctgaccgggctttcctgcttcgttacaccagacctggctagagatctcgccaacgacatcatgactttgatgtcccatacgaagccgtatattaggaagaaggctaaactcattgagcccctgactaacttaatacactctacttccgccatgtccctactctatgaatgtgtcaatacagtgatagccgtgttaatcagcttgtctagcggtatgccaaatcattccgcatcgatccagctgtgtgttcaaaagctcaggattctgatcgaggatagcgaccagaatctcaagtaccttggcttgctggctatgagcaaaatcttgaaaacacaccccaagagtgtgcaatcccacaaagacctcatcctgcagtgccttgacgacaaggacgaatcaattaggctccgcgctttggacttgctgtacggaatggtgagtaagaaaaacctcatggagattgtgaagaaattaatgacgcacgtggacaaagcagagggtactacatacagggatgagcttctaacgaagatcatagatatctgtagtcagagcaactaccagtacattacaaacttcgagtggtatatatctatcttggttgagctgaccaggttggagggaacacggcacgggcatttgattgctgctcagatgctggacgtggctattagagtgaaggcaatcagaaaatttgcagtcagccagatgagtgcgttattggactcagcccatctcctggcctcctccacccagcgcaacggtatctgcgaagttctctacgctgcggcatggatttgcggagaatttagcgaacacttacaggagccccatcacacattggaggccatgttacgacccagagtcacaactctgccaggccatatccaggccgtatacgtgcagaatgtggtcaagctgtacgcgagtatcctgcaacaaaaagagcaggccggagaggccgagggcgcccaggcagtgactcaactgatggtggatcgcctcccccagttcgtgcagtcagccgacctggaagtgcaggaacgcgcttcctgcattttgcagctggtgaagcatatccagaaactgcaggctaaggatgtgcccgtggcagaagaagtatcagctttgttcgccggagagcttaatccagttgcacccaaagctcaaaagaaagtgcccgtcccagagggacttgatctcgacgcgtggattaatgaaccactcagtgattcagaaagcgaagacgagcggccgagggccgtgttccacgaggaagagcagagaaggccaaaacacagaccctccgaggctgatgaagaggaacttgcccgcagacgcgaagctaggaaacaggagcaggccaataatcccttttatattaaatccagtccttcaccacagaaacggtatcaggatacccctggtgttgagcatattccagtggtgcaaatagacctcagcgttcctctgaaggtgcccggcctacccatgagcgatcagtacgtcaagctcgaggaggagagaaggcaccgtcaaaaacttgaaaaggataagcgtcgtaaaaagaggaaagagaaggagaagaagggtaagagacggcactcctccctcccaactgagtctgatgaggacattgccccagcccaacaagttgatatcgtgaccgaggaaatgcccgagaatgctctaccctcagacgaggacgacaaagatccaaacgatccctatcgcgcccttgacattgatctggacaagcctctcgcagactcggaaaaacttcctattcagaagcacagaaataccgaaacttctaaaagccccgagaaggacgtgcccatggtggagaagaagtctaagaagcccaaaaagaaggagaaaaagcacaaggaaaaggagcgggataaagagaaaaaaaaagaaaaagagaagaaggcagaggatcttgatttttggctttctactactccccccccagcccctgccccagcccctgcgcccgtgcccagtacggacgagtgtgaggacgcaaagaccgaagcgcaaggcgaagaagatgatgccgaggggcaagaccaggataagaagagccctaagcctaagaagaagaagcacaggaaggagaaggaagaaagaaccaaaggcaagaaaaaaagcaaaaagcaacccccgggaagcgaggaagccgcaggagaaccggtgcagaatggggcaccagaggaggagcagctgcctcctgaatcatcctattcgctcctggctgagaactcttacgtgaaaatgacgtgtgacataaggggatccctgcaagaagattcccaggtcaccgtggccatcgttctcgagaatcggtcaagctctatcctgaagggcatggagctgagcgtattagactcactcaatgcacgtatggcacgacctcaaggcagttctgtgcacgatggagtgcccgtccctttccagctgcccccaggtgtctcaaatgaagcacagtacgtatttaccatacagagcatcgtaatggcacagaaactcaaaggcaccctctcattcattgccaaaaatgacgagggagctacccatgaaaagctggattttcgcttgcacttcagttgtagttcctacctgatcacaactccatgttattccgacgcttttgccaagttactggaaagcggggacttatccatgtcgagcataaaggtggacgggatccgtatgtctttccagaatctccttgctaagatctgctttcaccatcacttttcagtcgttgagagagtggatagttgtgcaagcatgtatagcaggtctatccaaggtcatcacgtgtgcctcctcgtcaagaaaggggagaatagcgtctcagtggacggaaaatgcagcgatagcaccctactgagcaatcttttggaagagatgaaagctactcttgcaaaatgttag

SEQ ID NO: 294960 - DNA, 4741 bp, Artificial Sequence
  derived and/or modified sequence
ttgtccgccatttgcaaggggcccggagcgggatcgcggcacctgccgagcgggtcgccgcctctgccgcggtccttggaccccgccgccgccctggcctgggagcttgccccgccgcagcggccggcagcgcggcgctccgcgggcggcaggcacgggccccgggccccctcacggcgcccagccgcgggcctcccgaggcaaaagcccgtgggccgccgcgatggccctcaagatggtgaagggcagcatcgaccgcatgttcgacaagaatctgcaggacttggtccgcggcatccgtaaccacaaggaggacgaggcaaaatacatatctcagtgcattgatgagatcaagcaggagctgaagcaggacaacatagcggtgaaggcgaacgcggtctgcaagctgacgtatttacagatgttgggatacgacatcagctgggccgccttcaacatcatagaagtgatgagtgcctccaagttcaccttcaagcgaattggctacctcgctgcttcccagagctttcacgaaggcaccgacgtcatcatgctgaccaccaatcagatccgtaaggacttgagcagccccagccagtacgacacaggtgttgcactgacgggtctgtcctgcttcgtcaccccagaccttgccagagacctggcaaatgacatcatgacactgatgtcacacaccaagccctacatcaggaagaaggctaagctgatcgagcccctcaccaatctcatccacagcacgtctgccatgtctctcctctatgaatgtgtgaacaccgtgattgcagtgctcatctcgctgtcctccggcatgcccaaccacagcgccagcatccagctttgtgttcagaaattaaggatattgatcgaggactccgatcagaacttgaagtacctggggctgctggcaatgtccaagatcctgaagacccaccccaagtccgtgcagtcccacaaggacctcatcctgcagtgcctggacgacaaggacgagtccatccggctgcgggccctggacctgctctatgggatggtgtccaagaagaacctgatggagatcgtgaagaagctgatgacccacgtagacaaggcagagggtaccacctaccgtgacgagctgctcaccaagatcattgacatctgcagccagtccaactaccagtacatcaccaacttcgagtggtacatcagcatcctggtggagctgacccggctggagggcacacggcacggccacctcatcgccgcccaaatgctggacgtggccatccgcgtgaaggccatccgcaagttcgccgtgtcccagatgtctgcgctgcttgacagtgcacacctgctggccagcagcacccagcggaacgggatctgtgaggtgctgtacgctgccgcctggatctgcggggagttctcagagcatctgcaggaaccacaccacactttggaggccatgctgcggcccagagtcaccacgctgccaggccacatccaggccgtgtatgtgcagaacgtggtcaagctctacgcctccatcctgcagcagaaggagcaggccggggaggcagagggcgctcaggccgtcacccagctcatggtggaccggctgccccagtttgtgcagagcgcagacctggaggtgcaggagcgggcgtcctgcatcctgcagctggtcaagcacatccagaagcttcaggccaaggacgtgcctgtggcagaggaggtcagcgctctctttgctggggagctgaacccagtggcccccaaggcccagaagaaggttccagtccccgaaggcctggacctggacgcctggatcaatgagccactctcggacagcgagtcagaggacgagaggcccagggccgtcttccacgaggaggagcagcggcgtcccaagcaccggccgtcggaggcggacgaggaagagctggctcggcgccgagaggcccggaagcaggagcaggccaacaaccccttctacatcaagagctcgccatcgccacagaagcggtaccaggacaccccgggcgtggagcacattcccgtggtgcagattgacctctccgtccccttgaaggttccagggctgcctatgtcagatcagtatgtgaagctggaggaggagcggcggcaccggcagaagctggagaaggacaagaggaggaaaaagaggaaggagaaggagaagaagggcaagcgccgccacagctcgctgcccacggagagcgacgaggacatcgcccctgcccagcaggtggacatcgtcacagaggagatgcctgagaatgctctgcccagcgacgaggatgacaaagaccccaacgacccctacagggctctggatattgacctggataagcccttagccgacagcgagaaactgcctattcagaaacacagaaacaccgagacctcaaaatcccctgagaaggacgttcccatggtagaaaagaagagcaagaaacccaagaagaaagagaaaaaacacaaagagaaagagagagacaaggagaagaagaaggagaaggagaagaaggctgaggacctggacttctggctgtctaccaccccaccgcctgcccccgcccccgcccccgcccccgttccatccacggacgagtgtgaggacgccaagacggaggcgcagggcgaggaggacgatgccgaggggcaagaccaggacaagaaatctcccaagcctaagaagaagaagcacaggaaggagaaggaggagcggaccaaaggcaagaagaagtccaagaagcagcctccaggcagcgaggaggcagcgggggagccggtgcagaatggcgcgccagaggaggagcagctcccgcctgagtccagctactccctcctcgctgaaaattcctatgttaaaatgacctgtgacatccggggcagtctgcaggaggacagccaggtcactgtggccatcgtgctggagaacaggagcagcagcatcctcaagggcatggagctcagcgtgctggactcactcaatgccaggatggcccggccgcagggctcctccgtccacgatggcgtccccgtgcctttccagctgcccccaggcgtctccaacgaagcccagtatgtgttcaccatccagagcatcgtcatggcgcagaagctcaaggggaccctgtccttcattgccaagaatgacgagggtgcgacccacgagaagctggacttcaggctgcacttcagctgcagctcctacttgatcaccactccctgctacagtgacgcctttgctaagttgctggagtctggggacttgagcatgagctcaatcaaagtcgatggcattcggatgtccttccagaatcttctggcgaagatctgttttcaccaccatttttccgttgtggagcgagtggactcctgcgcctccatgtacagccgctccatccagggccaccatgtctgcctcctggtgaaaaagggtgagaactctgtctcagtcgacgggaagtgcagtgactccacgctactgagcaacttgttagaagagatgaaggcgacgctggccaagtgttgagagctgcctgcgagccccgcaccaccccgcggagcacgtacccagggaccgcagccctgacgtgtctcgcctctcctcagtcgtgtgtactgtacccaagcctgagtgttaatttaactctatgttgtccgccgtgtagacatccgaggtcatttgttgcgttgaattatctgaccatccttttttactgtgactcttcccattctctttggcaagaagtccccttctcgcccccaaaccagcaagggactcccccacctgggtctgtgccctgccccgcgctgggggccgagtccttgaatgtggcttcaggggctcctgtcctgggccagggcctgatgggcaccacgtgaggggcacttggtggacagggcggggctgacgtggcctcctctggggtcgcctgcttttgacccaaaggtcctgacggttgcgtccgggggaggggaaggaagggccgctgtcgccaaggttttctctcccagaacccacagtgggaaagcggtcttgccaggcgttgtccattgtcagtgtgctcgtgggctggtgactgggtcttgggatcccaggccacgcgccagccaggctgtgggcagggcggggccagggacgccaaagagaggttgcagtcagaaccgtggacggggtgggttgaggcctctctgccacccgtcttcctggtcagcagaagtgcatctcggcttgggtttggggtggtccgcatcccctgcttgccactatgcgcaccaaggtttccccacatccttcccagcacccttaggaaggcccaggcagggcctggaagcagcggacctgggctgttctgtgttgaaggagtgtgcccagtgcccttgggcaggacctgtgagagccacctcacaggcagagcccccaccaggcagggcaaggagactccgctcactccccacggccagcgtgggcacaggactgacccttcttcagagataatgacattttatcttctccttttgatgaaaactgtcactttagcatgtaatccattacagaatcccatgcagtgattccaggatttgaaattgtatgatgtgttacataagaatttatttgctatcgacattcccgtataaagagagagacatatcacgctgctgtcatgattttgtgtcaagatgatccaataaagttgtaaaacaggca

SEQ ID NO: 294961 - DNA, 3339 bp, Artificial Sequence
  derived and/or modified sequence
atggccctgaagatggtgaagggcagcattgacaggatgtttgacaagaacctgcaggacctggtgcggggcatccggaaccacaaggaggatgaggccaagtacatcagccagtgcattgatgagatcaagcaggagctgaagcaggacaacattgctgtgaaggccaatgctgtgtgcaagctgacctacctgcagatgctgggctatgacatctcctgggccgccttcaacatcatcgaggtgatgtctgccagcaagttcaccttcaagagaattggctacctggccgccagccagagcttccacgagggcacagatgtgatcatgctgaccaccaaccagatcaggaaggacctgagcagccccagccagtatgacaccggggtggccctgaccggcctgagctgctttgtgaccccagacctggcccgggacctggccaatgacatcatgaccctgatgagccacaccaagccctacatcaggaagaaggccaagctgattgagcccctgaccaacctgatccacagcaccagcgccatgagcctgctgtatgaatgtgtgaacacagtgattgctgtgctgatcagcctgagcagcggcatgcccaaccacagcgccagcatccagctgtgtgtgcagaagctgcgcatcctgattgaggacagcgaccagaacctgaagtacctgggcctgctggccatgagcaagatcctgaagacccaccccaagtctgtgcagagccacaaggacctgatcctgcagtgcctggatgacaaggatgagagcatccggctgcgggccctggacctgctgtatggcatggtgtccaagaagaacctgatggagatcgtgaagaagctgatgacccacgtggacaaggccgagggcaccacctacagagatgagctgctgaccaagatcatcgacatctgcagccagagcaactaccagtacatcaccaactttgagtggtacatcagcatcctggtggagctgacccggctggagggcaccaggcatggccacctgattgctgcccagatgctggatgtggccatccgggtgaaggccatcaggaagtttgctgtgtcccagatgtctgccctgctggacagcgcccacctgctggccagcagcacccagagaaatggcatctgtgaggtgctgtatgctgctgcctggatctgtggggagttcagcgagcacctgcaggagccccaccacaccctggaggccatgctgcggccccgggtgaccaccctgcccggccacatccaggccgtgtatgtgcagaatgtggtgaagctgtatgccagcatcctgcagcagaaggagcaggccggggaggccgagggcgcccaggccgtgacccagctgatggtggaccggctgccccagtttgtgcagagcgctgacctggaggtgcaggagcgggccagctgcatcctgcagctggtgaagcacatccagaagctgcaggccaaggatgtgcctgtggccgaggaggtgtctgccctgtttgctggggagctgaaccctgtggcccccaaggcccagaagaaggtgcctgtgcctgagggcctggacctggatgcctggatcaatgagcccctgagtgacagcgagagtgaagatgagcggcccagggctgtgttccacgaggaggagcagaggcggcccaagcaccggcccagcgaggctgatgaggaggagctggccaggagaagagaggccaggaagcaggagcaggccaacaaccccttctacatcaagagcagccccagcccccagaagcgctaccaggacaccccaggagtggagcacatccctgtggtgcagattgacctgtctgtgcccctgaaggtgcccggcctgcccatgtctgaccagtatgtgaagctggaggaggagcggcggcaccggcagaagctggagaaggacaagaggaggaagaagaggaaggagaaggagaagaagggcaagaggaggcacagcagcctgcccacagaaagtgatgaagatattgccccagcccagcaggtggacatcgtgacagaggagatgccagaaaatgccctgcccagtgatgaagatgacaaggaccccaatgacccctaccgggccctggacatcgacctggacaagcccctggccgacagcgagaagctgcccatccagaagcacaggaacacagagaccagcaagagccctgagaaggatgtgcccatggtggagaagaagagcaagaagcccaagaagaaggagaagaagcacaaggagaaggagcgggacaaggagaagaagaaggagaaggagaagaaggccgaggacctggacttctggctgagcaccaccccacctccagccccagccccagccccagcccctgtgcccagcacagatgaatgtgaagatgccaagacagaggcccagggcgaggaggatgatgctgagggccaggaccaggacaagaagagccccaagcccaagaagaagaagcacaggaaggagaaggaggagaggaccaagggcaagaagaagagcaagaagcagcccccaggcagcgaggaggccgccggggagcctgtgcagaatggagcccctgaggaggagcagctgcccccagagagcagctacagcctgctggccgagaacagctatgtgaagatgacctgtgacatccggggcagcctgcaggaggacagccaggtgacagtggccatcgtgctggagaacagaagcagcagcatcctgaagggcatggagctgtctgtgctggacagcctgaatgccaggatggcccggccccagggcagctctgtgcatgatggagtgcctgtgcccttccagctgcccccaggagtgtccaatgaggcccagtatgtgttcaccatccagagcatcgtgatggcccagaagctgaagggcaccctgtccttcatcgccaagaatgatgaaggagccacccatgagaagctggacttccggctgcacttcagctgcagcagctacctgatcaccaccccctgctacagtgatgcctttgccaagctgctggagagcggggacctgtccatgagcagcatcaaggtggatggcatccgcatgtccttccagaacctgctggccaagatctgcttccaccaccacttctctgtggtggagcgggtggacagctgtgcctccatgtacagccgcagcatccagggccaccacgtgtgcctgctggtgaagaagggagaaaattctgtgtctgtggatggaaaatgtagtgacagcaccctgctgagcaacctgctggaggagatgaaggccaccctggccaagtgctag

SEQ ID NO: 294962 - DNA, 3339 bp, Artificial Sequence
  derived and/or modified sequence
atggccctgaagatggtgaagggcagcatcgaccggatgttcgacaagaacttgcaagacctggtccgcgggattcgaaaccacaaagaggatgaggccaaatatatatctcagtgtatcgatgagataaaacaggaactgaaacaggataatatcgccgttaaggccaatgccgtgtgcaagctgacctacctgcagatgctcggctacgacatctcatgggctgccttcaatattatcgaagtaatgagtgcttcaaagttcacctttaaacgaatcggttatctagccgcctcgcagtctttccacgagggcacagatgtaattatgctgactactaatcagataagaaaagatctgtcctctccttcacaatatgataccggcgttgcgttgaccggcctaagctgtttcgtcactcctgatctagcacgggacctcgccaatgacattatgactcttatgagccatacaaagccatacattaggaagaaggccaaactgatcgaacctctgactaacctgattcattccacatctgctatgagcctgctgtatgagtgcgtgaatacagtcattgctgtgttaatcagtctgagcagcggcatgccaaatcactcagcgagcattcagctgtgtgtgcagaaactacgcatcctgatcgaagactctgaccaaaacctcaaatacctgggcttactggctatgtctaagatcctgaagacccacccaaaatctgtgcagagtcataaagacctgattttacagtgccttgatgataaagacgagagtatccggctgagagctctcgacctgctttacggaatggtgagcaaaaagaatctgatggagatagtgaagaagctaatgactcacgtcgacaaagcagaggggaccacataccgagacgaactgctgacgaaaattatcgacatttgcagccagtccaactatcaatacataacaaattttgagtggtacatctctatccttgtggagctgactcgacttgaggggacgaggcatggacacctgattgcagcgcaaatgctggacgtcgcaattagggttaaagctatccggaaattcgcagtctcacagatgtcagcccttctggattcagcgcatcttcttgcctcttctactcagaggaacggaatatgcgaggttctttatgccgcagcgtggatttgcggtgaattttccgagcaccttcaagagccccatcacaccctcgaggccatgctccgacccagggtgacaaccctcccaggccatattcaggctgtctacgtgcagaatgtagtgaagctgtacgcctctattctccagcaaaaagagcaggccggcgaagccgagggcgcacaggcagtcacccaattgatggtggaccgactgccacaatttgttcagagcgccgacctggaagtgcaagagagggcctcatgcatccttcagctggtgaagcatatacagaagcttcaagcaaaagatgtgcctgtggccgaagaagttagtgcactcttcgctggagaacttaacccagtggccccgaaagcccagaaaaaggtgcctgtgccagaagggcttgacctggatgcctggattaatgagccgctgagcgatagcgaatccgaggacgaacgcccaagggctgtgttccacgaggaggagcagaggcgaccaaagcataggccaagcgaagctgatgaggaggagttagccagaaggagggaggctcgaaaacaggaacaggctaacaacccgttttacatcaaatcctccccttctccacagaaacggtaccaggatacccctggtgtagaacatatccctgtggttcagatcgacctctcagttcctctcaaagtacctggccttccaatgagcgatcaatatgtgaagctcgaggaggaaagaaggcaccggcagaagctggagaaggataaacggcggaagaaaagaaaagagaaagaaaaaaaggggaagcgaaggcacagcagcctgcctacggagtctgatgaagacattgccccggctcagcaggttgatatcgtcactgaagagatgcccgaaaatgctctcccaagcgacgaggacgacaaggatccgaacgatccctacagagctctagatatcgatctggataagccgctggcagattctgaaaagctgcccattcaaaagcatagaaatactgaaacctcaaagtcgcccgagaaggatgtccctatggttgagaaaaagtccaagaaaccaaaaaaaaaagaaaagaagcataaggaaaaggagcgggataaggagaagaagaaggagaaggaaaagaaggccgaggatctagacttttggctgagcacgactccacccccagccccagcccctgctccagcccccgtgcctagcaccgacgaatgtgaagatgcaaagactgaggcccagggtgaagaagatgatgctgaaggccaggaccaagacaaaaaatcacccaagccaaagaaaaaaaagcaccgcaaggagaaggaagagcggaccaaggggaagaagaaatctaaaaagcagcccccagggagtgaagaagctgccggggagccagtccaaaacggtgctcctgaggaagagcagctaccaccagagtcatcatactctttgctcgccgagaactcatacgtgaagatgacctgtgacattcggggttctcttcaagaggactcccaggtaacggtggcaatcgttctagaaaataggagtagtagtatccttaagggtatggagctgagtgttctagattcactgaatgctagaatggcccgaccacagggtagttccgtacatgacggtgtgccagtcccattccaactccctccaggagtgtcaaacgaggcgcagtacgtcttcactattcagagtattgtcatggcacagaaattaaagggcacgctgtccttcatcgcaaagaatgacgagggcgctacgcatgagaagctcgattttaggctccactttagctgttccagctacctgattactactccttgctatagtgacgccttcgcgaaattactcgaaagcggggacttgtctatgtcgtctattaaagtcgacggcattcgaatgtcgtttcagaacctgctagcaaagatctgcttccaccaccactttagtgtggtagagcgggtagactcgtgtgcttccatgtattccagaagtatacaagggcaccatgtttgcctgcttgtgaaaaagggagaaaactcagtgtcagtggacggcaaatgttctgatagcaccctgctgtcaaatttactggaggaaatgaaggcaactctggccaaatgctag

SEQ ID NO: 294963 - DNA, 3339 bp, Artificial Sequence
  derived and/or modified sequence
atggccctcaaaatggtcaagggttccattgaccgcatgttcgataagaatctgcaagaccttgtgcggggaatcagaaaccataaagaggatgaggccaagtatattagtcagtgcattgacgaaatcaaacaggaattgaagcaggacaacattgctgttaaggccaacgccgtttgcaaattgacatacctccaaatgctgggctacgacattagctgggctgccttcaatatcattgaggtgatgtccgcatccaagttcacattcaaacggattgggtaccttgctgcgagtcaaagcttccatgaggggacagacgtcatcatgctcactactaaccaaattcgaaaggatttaagctcccctagccaatatgatacaggagtcgccctaacggggctgagctgtttcgttacccctgatttggcccgtgacttggcaaacgatattatgacattgatgtcccacacaaaaccatacatcagaaaaaaagccaaattaatcgaacccctcacgaatctcatccactctactagcgctatgtctttgctgtatgaatgtgtgaacacagtgatcgcggttttaatctcccttagttctgggatgcctaatcattccgcctccatccagctctgtgtgcagaaattgaggatcctaatcgaggattccgaccagaaccttaaatatctgggtcttctggccatgagcaagatcctgaaaacccacccaaagagcgtacagtcccataaggacctaatcctgcaatgtctcgatgataaagacgaatctatccgattgcgggcactggacctgctttatggtatggtgagcaagaagaatcttatggagatcgttaaaaagcttatgacgcacgttgataaagcagagggaaccacttatcgggacgagttgttgacaaaaattatagacatttgctcccagtccaactaccagtacatcacaaatttcgagtggtatatctccatcctcgttgagctcacccggctggaggggacaagacacggccacctaattgccgctcagatgttggacgtggccattcgagtaaaggccatccggaagtttgctgtgtctcaaatgagtgcactcctagattcagctcatctcctcgcttcatcaacacagcgcaatggcatatgcgaagtattatacgccgcagcctggatctgcggtgagtttagtgaacatcttcaggagcctcatcatactctggaggccatgctgagacctcgggtcaccactttgccaggtcacatacaggcagtttatgtgcaaaatgtagtaaagctctatgcgagcattctgcagcagaaggaacaggccggagaggcagaaggggctcaggcagtcacgcagttgatggtagaccgcctgccccaattcgtgcagagcgctgacctagaggtgcaggagcgcgctagctgcattctccagttggtgaagcacatccagaaacttcaggcaaaggatgtgcctgtggctgaggaagtgtccgcactgttcgcaggcgaactcaacccggtcgcccctaaggctcaaaagaaagttccagtgccagaaggtctggatctggacgcttggatcaatgagccgctctctgatagcgaaagcgaggatgagcgccctagagctgtgtttcatgaagaggagcagaggaggcctaagcaccggccatccgaagctgatgaagaagagctggctcgtaggcgcgaggccagaaagcaggagcaagccaacaatcccttttacatcaagagcagtcctagtcctcagaaaagatatcaggatacgcccggagtagagcacattccggtcgtgcagatcgacctgtctgttccacttaaggtccccggactccctatgtccgaccagtatgtgaagctagaggaagagcgacggcatcggcagaaactggaaaaggataaaagacggaaaaagcgcaaagagaaggaaaaaaagggcaagaggcgacattcttctctcccgacagagagtgacgaggatatcgcccctgctcagcaagttgatatcgtgacagaagaaatgccagaaaatgctctgcccagtgacgaagacgacaaggacccaaatgatccatacagagcactggatatagatctcgacaaacctctggctgattccgagaagctacccatacagaagcaccggaatacggaaaccagcaagtctcctgagaaggatgtacccatggtggagaaaaaatcgaaaaagcccaagaaaaaggagaagaagcacaaagagaaggagagggacaaggaaaaaaagaaagagaaggagaaaaaggcggaggacctggacttttggttaagtactactccacctcccgctcctgctccagcacccgctcccgttccaagcacagacgagtgcgaagatgctaaaactgaggctcagggcgaggaagatgacgcagagggtcaggatcaggataagaaaagtcctaagcccaagaagaagaagcacagaaaagaaaaagaagagcggacaaaaggaaaaaaaaagtcaaagaagcagccacctggctctgaggaagctgctggagagcccgtgcagaatggggcacctgaggaggagcagcttccccctgaatcttcctactcactcctggctgagaactcctacgtaaagatgacatgcgatatacggggaagcctacaggaggattctcaagtaaccgtggccattgtgctcgagaataggagttccagtatactgaagggaatggagttgtccgtcctggactccctaaacgctcggatggcgcgtccacagggaagctctgtccacgacggggttcctgtgcctttccagctccccccaggggtctctaacgaggctcagtatgtgtttacaatacagtccatcgtgatggcgcaaaagttgaagggcacactgtccttcatcgccaagaatgacgaaggtgccacgcacgaaaagttggacttccgtttgcattttagctgctctagctacctgatcaccacgccatgttactcagacgccttcgccaaactattggagtctggcgatttgagtatgtccagtattaaagtcgatggcattcgtatgtctttccagaatctgctagccaagatatgcttccaccaccacttttccgtggtcgaaagagttgactcctgcgctagcatgtacagcaggagcatccaaggtcatcacgtgtgcctcctcgtaaagaagggcgagaacagtgtcagtgtggacggcaagtgctcagactccactctgcttagtaatcttctggaagaaatgaaagccaccctagccaagtgctag

SEQ ID NO: 294964 - protein, 145 aa, Artificial Sequence
  derived and/or modified sequence
MSTAREQPIFSTRAHVFQIDPATKRNWIPAGKHALTVSYFYDATRNVYRIISIGGAKAIINSTVTPNMTFTKTSQKFGQWADSRANTVYGLGFASEQHLTQFAEKFQEVKEAARLAREKSQDGWGGPQSALVVGSFGAVFELLIV

SEQ ID NO: 294965 - protein, 361 aa, Artificial Sequence
  derived and/or modified sequence
MSTAREQPIFSTRAHVFQIDPATKRNWIPAGKHALTVSYFYDATRNVYRIISIGGAKAIINSTVTPNMTFTKTSQKFGQWADSRANTVYGLGFASEQHLTQFAEKFQEVKEAARLAREKSQDGGELTSPALGLASHQVPPSPLVSANGPGEEKLFRSQSADAPGPTERERLKKMLSEGSVGEVQWEAEFFALQDSNNKLAGALREANAAAAQWRQQLEAQRAEAERLRQRVAELEAQAASEVTPTGEKEGLGQGQSLEQLEALVQTKDQEIQTLKSQTGGPREALEAAEREETQQKVQDLETRNAELEHQLRAMERSLEEARAERERARAEVGRAAQLLDVSLFELSELREGLARLAEAAP

SEQ ID NO: 294966 - DNA, 1086 bp, Artificial Sequence
  derived and/or modified sequence
atgtccacagcacgtgaacagcccatctttagtactcgcgcacatgtttttcagattgaccccgcgaccaagcgcaattggattcctgccggcaagcacgcactgactgtcagctatttctacgacgctacccgcaatgtctatcgtatcattagcattggtggcgccaaggcgataatcaatagtactgtgacccccaacatgacttttactaagactagccagaagtttggccagtgggccgatagcagagctaacaccgtatatggcctgggatttgcctccgagcaacacctgacccagtttgcagagaagtttcaggaagtaaaggaggcggctagactggcacgcgaaaaatctcaagatggcggcgagctgactagccctgccctgggactggcttcccatcaggtccctccaagtccactcgtgagtgccaacggcccgggcgaggagaaactcttcaggagtcagtcagccgatgcccccggaccgacagagcgggaacgcctcaagaagatgctgtccgaggggagtgtaggtgaggtccaatgggaggctgaattctttgcactccaggacagtaataataagcttgctggcgcactgcgggaagctaatgctgctgccgcccagtggcgccaacaactggaggctcaaagggccgaggcggagcgactccggcagagggttgcagagctggaagcccaagccgcatctgaagtgacgcctacaggcgagaaagagggacttggacagggccagtccttggaacagctcgaagctttagttcagaccaaggaccaggagatacaaacactgaagtcccaaactggcgggccgcgcgaagcactggaggcagcagaacgggaggagactcagcagaaggtccaggatctggagactagaaacgcagagctcgagcaccagcttcgcgctatggagcggagcttggaggaagcgcgtgccgaacgcgagcgggcccgggctgaggtcgggcgagcggcccaattgctcgatgtctctctgttcgagctcagcgagttaagagaaggtctggctagattggctgaggcagctccttag

SEQ ID NO: 294967 - DNA, 1086 bp, Artificial Sequence
  derived and/or modified sequence
atgagcaccgcccgtgaacagcctattttcagcacaagagctcacgtgtttcagattgaccccgcaactaagaggaattggatccccgcaggaaaacatgcgttaactgtgagctatttctacgatgccactcggaacgtgtaccgaatcatctcaattgggggcgctaaagcgatcattaatagtaccgtgacaccaaatatgacgttcaccaagacctcccaaaagtttggacaatgggccgatagtcgggcaaacaccgtttacggtctgggcttcgcaagcgagcagcatctgacccaatttgctgaaaaattccaggaggtaaaggaggcagcacggttggcacgcgagaaaagtcaagacggaggggagctgacatcccccgccctcggattggccagtcatcaggtccccccctccccactggtgagtgctaacggacccggcgaggaaaagctttttaggagccagtcagccgacgcacccgggccaaccgagcgagaacggttgaaaaaaatgcttagcgaagggagtgttggtgaagtgcagtgggaggcagagttctttgcactccaggattccaacaataagctggccggggcactaagggaggctaatgctgctgcagcccagtggaggcagcagctcgaggctcagagagccgaggcggagcggcttagacagcgggttgctgagctggaggcccaggccgctagcgaggtgacacctacaggagagaaagaaggacttggccaggggcagtcattggaacagctggaggccctggtacaaaccaaggaccaggagattcagactctgaaatcccaaacaggcggcccacgagaggcacttgaggccgcggagagggaggaaacacagcagaaagttcaagacctggagaccaggaacgcggaactcgaacaccagttgcgcgccatggaaagatcattagaggaggcgcgggccgaacgggagagggcacgcgccgaagtcggcagagcagcccagctgctggatgttagtctcttcgagctgtctgaacttagggaaggcctcgctaggctggcggaagctgcgccttag

SEQ ID NO: 294968 - DNA, 1086 bp, Artificial Sequence
  derived and/or modified sequence
atgtccacagccagagaacagcccatcttcagcactcgggctcatgttttccagatcgaccctgccaccaagaggaactggattcctgccggaaaacacgccctcactgtcagttatttttacgatgcgacacggaacgtgtaccggatcattagcatcggcggtgccaaagcgatcataaactctaccgtgacacctaacatgacattcacgaaaacctctcagaagtttggtcagtgggcggactctagggccaacacggtgtatgggctaggtttcgcgagcgaacaacatcttactcaattcgctgagaagtttcaggaggtgaaggaggctgcgaggttagctagggagaaatcccaggatgggggcgagcttacgtctccagctctcgggctcgcaagccaccaggtccctccctcaccgttggtgtccgctaacgggcctggtgaggaaaagctatttcggagtcaatccgcagatgcaccaggacccacggaaagagaaaggttgaagaagatgttgtcagaggggtcagtcggcgaggtccagtgggaagccgagttttttgctctacaggactccaataataagctggccggcgccctaagagaggccaatgccgccgctgctcaatggagacagcagctcgaagctcagcgcgccgaggcggaacggctgagacagcgggtcgccgaactagaagctcaggcagcctcagaagtgaccccgaccggggaaaaggaaggtctggggcaggggcaaagtctggagcagctggaagccctggtgcaaacaaaggatcaagagattcaaacgcttaagagccagaccggcggccctcgagaagcccttgaggcggcagaacgggaggagacgcagcagaaggttcaggaccttgaaacaagaaacgcagagctagaacatcaattgcgtgccatggaaaggagcctggaggaggcaagggccgagagggagcgggccagggctgaggtcgggcgggccgcccagctacttgacgtctccctttttgaactgagtgagctgcgagagggcctggccagactcgcagaagcagcgccatag

SEQ ID NO: 294969 - DNA, 1577 bp, Artificial Sequence
  derived and/or modified sequence
gggaccggaggcggcgcgggcggcggcggcgcagacaaaggcacgggcggcgtggagggcggcgcggagggcgcgggcccgggagccagggagcgagcggggcgcccggcagcgcggagtcagcgccgcgggggccgcacccgactcgcgcctggacactcgcggggcgccgacctggcagggggccaaaccagtgctcctgccacctctctggctgccccctagagcctgcccatcccagcctgaccaatgtccacagccagggagcagccaatcttcagcacacgggcgcacgtgttccaaattgacccagccaccaagcgaaactggatcccagcgggcaagcacgcactcactgtctcctatttctacgatgccacccgcaatgtgtaccgcatcatcagcatcggaggcgccaaggccatcatcaacagcactgtcactcccaacatgaccttcaccaaaacttcccagaagttcgggcagtgggccgacagtcgcgccaacacagtctacggcctgggctttgcctctgaacagcatctgacacagtttgccgagaagttccaggaagtgaaggaagcagccaggctggccagggagaaatctcaggatggcggggagctcaccagtccagccctggggctcgcctcccaccaggtgcccccgagccctctcgtcagtgccaacggccccggcgaggaaaaactgttccgcagccagagcgctgatgcccccggccccacagagcgcgagcggctaaagaagatgttgtctgagggctccgtgggcgaggtacagtgggaggccgagtttttcgcactgcaggacagcaacaacaagctggcaggcgccctgcgagaggccaacgccgccgcagcccagtggaggcagcagctggaggctcagcgtgcagaggccgagcggctgcggcagcgggtggctgagctggaggctcaggcagcttcagaggtgacccccaccggtgagaaggaggggctgggccagggccagtcgctggaacagctggaagctctggtgcaaaccaaggaccaggagattcagaccctgaagagtcagactggggggccccgcgaggccctggaggctgccgagcgtgaggagactcagcagaaggtgcaggacctggagacccgcaatgcggagttggagcaccagctgcgggcgatggagcgcagcctggaggaggcacgggcagagcgggagcgggcgcgggctgaggtgggccgggcagcgcagctgctggacgtcagcctgtttgagctgagtgagctgcgtgagggcctggcccgcctggctgaggctgcgccctgagccggggctggttttctatgaacgattccggcctgggatgcgggccaggctgcaggcggcatagttgggcccattcgtcctggaaagggactggggggtcccaacttagccctgggtgggccgggccgggctgggctggggtgggccccagtcggctctggttgttggcagctttggggctgtttttgagcttctcattgtgtagaatttctagatcccccgattacatttctaagcgtggc

SEQ ID NO: 294970 - DNA, 1979 bp, Artificial Sequence
  derived and/or modified sequence
caataaccaggacaatgagaaatttacatctggatgtcagcggccaccaggctcctctcagagggccatctcctgtacagggtgttgtgggggcttcccctagacaaagaaagatggggtctgcttgctctgagttatctataataattatcttacctttttgtttctttttataatttctttcttttttgagacagggtctcactctcttgtccaggctggagtgcagtggcctgaccatagctcactgcactgcagccttgacctcctgggctcaagtgatcctcccacctcagcctccccagtagctgggacggcaggcacatgccaccacacccagctaattgtttaaatttttggtagagatggggtctcgccatgttgctcaggatggtctcgaactcctgggctcaaaggatcctcctgactcagcctcccaaagcaccaggtgtactttgggcctctcctgcctttttgattgaaagttccatgacgggcacacctggtgatgggtcctgagatggaacctgcttggcctccctcagcctggcctgagggacactcatagtccctcctctctccctaggggccaaaccagtgctcctgccacctctctggctgccccctagagcctgcccatcccagcctgaccaatgtccacagccagggagcagccaatcttcagcacacgggcgcacgtgttccaaattgacccagccaccaagcgaaactggatcccagcgggcaagcacgcactcactgtctcctatttctacgatgccacccgcaatgtgtaccgcatcatcagcatcggaggcgccaaggccatcatcaacagcactgtcactcccaacatgaccttcaccaaaacttcccagaagttcgggcagtgggccgacagtcgcgccaacacagtctacggcctgggctttgcctctgaacagcatctgacacagtttgccgagaagttccaggaagtgaaggaagcagccaggctggccagggagaaatctcaggatggcggggagctcaccagtccagccctggggctcgcctcccaccaggtgcccccgagccctctcgtcagtgccaacggccccggcgaggaaaaactgttccgcagccagagcgctgatgcccccggccccacagagcgcgagcggctaaagaagatgttgtctgagggctccgtgggcgaggtacagtgggaggccgagtttttcgcactgcaggacagcaacaacaagctggcaggcgccctgcgagaggccaacgccgccgcagcccagtggaggcagcagctggaggctcagcgtgcagaggccgagcggctgcggcagcgggtggctgagctggaggctcaggcagcttcagaggtgacccccaccggtgagaaggaggggctgggccagggccagtcgctggaacagctggaagctctggtgcaaaccaaggaccaggagattcagaccctgaagagtcagactggggggccccgcgaggccctggaggctgccgagcgtgaggagactcagcagaaggtgcaggacctggagacccgcaatgcggagttggagcaccagctgcgggcgatggagcgcagcctggaggaggcacgggcagagcgggagcgggcgcgggctgaggtgggccgggcagcgcagctgctggacgtcagcctgtttgagctgagtgagctgcgtgagggcctggcccgcctggctgaggctgcgccctgagccggggctggttttctatgaacgattccggcctgggatgcgggccaggctgcaggcggcatagttgggcccattcgtcctggaaagggactggggggtcccaacttagccctgggtgggccgggccgggctgggctggggtgggccccagtcggctctggttgttggcagctttggggctgtttttgagcttctcattgtgtagaatttctagatcccccgattacatttctaagcgtg

SEQ ID NO: 294971 - DNA, 1849 bp, Artificial Sequence
  derived and/or modified sequence
aaacgctgcaagtcgcagcaggagctgccggaccggaagggcctgggttccggggacccctgtgttccccaactcccacccggcgcaggacccgcccccagtccaggccagagctgccgccccacccccactcaggggctccggtttcagaccctgtgaccaggacagcagctgcccaggacaggatagggggggcatcccccctttgaccacagaggccgctgggccagggcctcccctcccccacctgtcttccccctcctccaaactcctccttggtcccctgcagattcggggttgctgaatggcccaatggggaggttggggagccctggtctcccagtgtggattctgctctgccctcatggtgggcattgggattggctgtttgtctacatcttgtctttttaacttggctgggggctccctggggatttggactctggacttcaaggggccaaaccagtgctcctgccacctctctggctgccccctagagcctgcccatcccagcctgaccaatgtccacagccagggagcagccaatcttcagcacacgggcgcacgtgttccaaattgacccagccaccaagcgaaactggatcccagcgggcaagcacgcactcactgtctcctatttctacgatgccacccgcaatgtgtaccgcatcatcagcatcggaggcgccaaggccatcatcaacagcactgtcactcccaacatgaccttcaccaaaacttcccagaagttcgggcagtgggccgacagtcgcgccaacacagtctacggcctgggctttgcctctgaacagcatctgacacagtttgccgagaagttccaggaagtgaaggaagcagccaggctggccagggagaaatctcaggatggcggggagctcaccagtccagccctggggctcgcctcccaccaggtgcccccgagccctctcgtcagtgccaacggccccggcgaggaaaaactgttccgcagccagagcgctgatgcccccggccccacagagcgcgagcggctaaagaagatgttgtctgagggctccgtgggcgaggtacagtgggaggccgagtttttcgcactgcaggacagcaacaacaagctggcaggcgccctgcgagaggccaacgccgccgcagcccagtggaggcagcagctggaggctcagcgtgcagaggccgagcggctgcggcagcgggtggctgagctggaggctcaggcagcttcagaggtgacccccaccggtgagaaggaggggctgggccagggccagtcgctggaacagctggaagctctggtgcaaaccaaggaccaggagattcagaccctgaagagtcagactggggggccccgcgaggccctggaggctgccgagcgtgaggagactcagcagaaggtgcaggacctggagacccgcaatgcggagttggagcaccagctgcgggcgatggagcgcagcctggaggaggcacgggcagagcgggagcgggcgcgggctgaggtgggccgggcagcgcagctgctggacgtcagcctgtttgagctgagtgagctgcgtgagggcctggcccgcctggctgaggctgcgccctgagccggggctggttttctatgaacgattccggcctgggatgcgggccaggctgcaggcggcatagttgggcccattcgtcctggaaagggactggggggtcccaacttagccctgggtgggccgggccgggctgggctggggtgggccccagtcggctctggttgttggcagctttggggctgtttttgagcttctcattgtgtagaatttctagatcccccgattacatttctaagcgtggc

SEQ ID NO: 294972 - DNA, 1086 bp, Artificial Sequence
  derived and/or modified sequence
atgagcacagcccgggagcagcccatcttcagcacccgggcccacgtgttccagattgatcctgccaccaagaggaactggatcccagctgggaagcacgccctgactgtgtcctacttctatgatgccaccagaaatgtgtaccgcatcatcagcattggaggagccaaggccatcatcaacagcacagtgacccccaacatgaccttcaccaagaccagccagaagtttggccagtgggccgacagccgggccaacacagtgtatggcctgggctttgccagcgagcagcacctgacccagtttgctgagaagttccaggaggtgaaggaggccgcccggctggcccgggagaagagccaggacggcggggagctgaccagccctgccctgggcctggccagccaccaggtgccccccagccccctggtgtctgccaatggacctggagaggagaagctgttccgcagccagagcgcagatgcccctggccccacagagcgggagcggctgaagaagatgctgtctgagggctctgtgggggaggtgcagtgggaggccgagttctttgccctgcaggacagcaacaacaagctggccggggccctgcgggaggccaatgctgctgctgcccagtggaggcagcagctggaggcccagagagctgaggccgagcggctgcggcagagggtggccgagctggaggcccaggccgccagcgaggtgacccccactggagagaaggagggcctgggccagggccagagcctggagcagctggaggccctggtgcagaccaaggaccaggagatccagaccctgaagagccagacaggaggcccccgggaggccctggaggccgctgagcgggaggagacccagcagaaggtgcaggacctggagaccagaaatgctgagctggagcaccagctgcgggccatggagaggagcctggaggaggcccgggcagagcgggagcgggcccgggcagaggtgggccgggccgcccagctgctggatgtgtccctgtttgagctgtctgagctgcgggagggcctggcccggctggccgaggccgccccctag

SEQ ID NO: 294973 - DNA, 1086 bp, Artificial Sequence
  derived and/or modified sequence
atgagcaccgcccgggagcagcccatcttcagcacccgggcccacgtctttcagatcgatccagccactaagagaaactggattccagccggcaagcacgcactcacggtttcctacttttacgatgccacacgtaacgtgtacagaatcatctccatcggaggggcaaaagctatcattaacagtacagtgacccccaacatgacatttacaaagacctctcagaagttcggccagtgggctgactctcgagccaatactgtctacgggctaggatttgcttcagaacagcacctcacccagtttgctgagaagtttcaggaggtcaaggaagccgcccgattagcaagagaaaaatcccaggatggaggtgagctgactagccccgcccttggactagcttctcaccaggtgcctccttccccgcttgtgtccgctaatggtcctggggaagaaaaactctttaggtctcagtcagcagacgccccaggtccaacagagcgggaaaggctgaagaagatgctgtcagaaggttcagtcggagaggtgcaatgggaagctgagttctttgctctgcaagactccaacaacaagctagctggagctctgagagaggcaaatgcagccgcggcccagtggaggcagcagctcgaagctcaaagagccgaagccgagaggctccgccagcgcgttgctgagctcgaggcccaggcagcctcagaagttacaccaaccggggaaaaggaggggctgggccagggccagtcacttgagcaactggaggccctcgttcagactaaagatcaggagatacaaaccctcaagtcccaaaccggcgggccacgcgaggcacttgaggcagccgagcgtgaggagacccagcaaaaggtgcaggacttggagacacgtaacgccgaactggagcatcaactccgggccatggaacggtccctggaggaagcccgcgctgagcgggagagagcgagggcggaggtgggcagagctgcccagctgttggacgtcagtctcttcgagctgtctgagctccgcgaaggcctggcgagactcgcagaagcagctccctag

SEQ ID NO: 294974 - DNA, 1086 bp, Artificial Sequence
  derived and/or modified sequence
atgagcaccgcccgggagcagcccatcttcagcacccgggcccacgtgttccagattgaccccgcaacaaagcgcaattggatccccgcaggcaaacatgcgctcacggtatcgtatttttacgatgcaacacggaacgtctatcgcataatcagtatcggcggtgctaaggccataatcaactcaacagttaccccgaacatgacattcaccaagacttcccagaagtttggccagtgggcggactccagagccaataccgtgtatggcctgggctttgcgagcgagcagcatttaacacaatttgctgagaagtttcaggaggtgaaggaggccgctcggctcgctcgcgaaaagtcccaagacggaggcgagctcacatcgccagctctgggactcgcctctcaccaggtgccgccctcccccttggtgtccgctaacggacccggggaggagaaattatttagaagccagtctgccgatgcccctggtcccactgaaagggagcgtcttaaaaaaatgctttccgaggggagtgtcggggaagtgcagtgggaggctgagttcttcgctctccaggacagcaacaacaagctggctggagcgcttcgggaagccaacgccgcggctgctcagtggcgccaacagctggaggcacagcgagcagaggctgagaggctgcggcaaagagtcgcagagctagaggcccaggcggcttctgaggtaacacccacgggagaaaaagagggtctgggccagggtcagtcccttgaacaactagaggctctcgtgcagacgaaggatcaagaaatacaaacactgaagagccaaacaggcggtccgagagaggcgttggaggccgcggagcgcgaagaaacacagcagaaagtccaagaccttgaaaccaggaatgcagaactggaacaccaactccgggcgatggaaagatccctggaagaagccagagccgagcgggagagagcccgagcagaagtggggagggcagcgcagctccttgatgtgagtcttttcgaactgagtgaactgagggagggcttggcgaggctcgctgaggctgctccatag

SEQ ID NO: 294975 - DNA, 1086 bp, Artificial Sequence
  derived and/or modified sequence
atgagcaccgcccgggagcagcccatcttcagcacccgggcccacgtgtttcagatcgaccccgctaccaaacgcaactggattccagcgggtaaacatgctctgaccgttagttacttttacgacgccaccaggaatgtgtacagaatcattagcatcggcggcgccaaggctatcataaattctacggtcacacctaacatgacgtttaccaagacctcacaaaagtttggacagtgggcagattcacgagcaaatacagtgtatggactgggtttcgcaagtgagcagcatctcacccagtttgccgagaaattccaagaggtcaaggaggctgctcgcttggcccgagagaagagccaggacggtggcgaactcacaagccctgcactcggtctggcctcccaccaagtgcccccatccccattagttagcgctaacggaccgggagaagaaaagttattccgatcccagagcgcagacgcccctgggcccactgagagagaacgtctcaaaaaaatgctttcggagggcagtgtgggcgaggtccagtgggaagctgagttctttgcacttcaggattcaaataataagctggctggcgccctccgagaagctaatgctgccgctgcacagtggcggcagcagctggaggcacagagagccgaagccgagagacttcggcaacgtgttgccgagttggaagctcaggcagcatcagaggttacccctacaggagagaaagagggattaggccagggacaaagcctggagcagctggaagcgttggtccagaccaaggatcaagagattcagaccttgaaaagtcagaccggtggtccacgggaggcccttgaggcagccgaaagggaagaaacacagcagaaagtccaagatcttgaaacccggaatgccgaactggagcaccagttgagagccatggagcgtagccttgaagaagccagagccgagcgggaacgcgctcgcgccgaggttggccgagccgcccaactgctcgacgtgtcactctttgaactgagcgagcttagggagggcctggctaggctggctgaggccgctccctag

SEQ ID NO: 294976 - DNA, 1086 bp, Artificial Sequence
  derived and/or modified sequence
atgtctacagccagggaacagccgatcttctcaacccgggctcatgtcttccagattgaccccgctactaaaagaaactggattccggcagggaagcacgctctgactgtcagctacttttacgatgctacgcgcaatgtgtacagaataatttcaatcggcggagctaaagctattatcaactccacagtgacacccaacatgaccttcacgaagacatcgcagaagttcgggcagtgggccgatagtcgcgctaacacagtgtacggcttgggctttgctagtgagcagcatctgactcagttcgccgaaaaatttcaagaggtaaaggaggcggcacggcttgcccgtgagaagtctcaggatggaggagagcttacctctccagcattaggcctcgcatcccatcaggtgcctccgtctccccttgtctcagcaaacggtccaggagaagagaagttattcagatcccagtccgcagatgctccgggacctaccgaaagagaacggctgaagaagatgctttccgaaggctctgttggagaagttcaatgggaggcagagtttttcgccttgcaagacagcaataacaagttggccggagctctgagggaggcaaacgcagcggcagctcaatggagacagcaactcgaggcccaaagggcggaggcagaaagactgcgacaacgcgtcgcggaactcgaggcacaggcagcatccgaggtgacccctactggcgaaaaggagggcctgggccagggtcagtcactggaacagctggaagctctagtacagacaaaagatcaagaaatccagaccttaaaaagccaaacagggggtccaagagaggcccttgaggccgcagaacgcgaggaaactcagcaaaaggtgcaggacctggaaacccggaatgccgaactggagcatcagttacgagcaatggagagatccctggaggaagctcgagccgaaagggagcgcgcaagggcagaggtgggacgcgctgcccagctcctcgatgtgagcctctttgaactaagtgaattgcgcgaaggcctggcccgtctagcggaggcggctccctag

SEQ ID NO: 294977 - DNA, 1086 bp, Artificial Sequence
  derived and/or modified sequence
atgagcacagccagggagcaacctatcttttcaacacgcgctcatgtctttcagattgatccggcaaccaagcggaattggattccagccggaaagcatgcactaacagtgtcctatttttatgatgcaacccgcaacgtttaccgtattatctctattggaggcgcaaaggcgattatcaatagcacagtcactccgaatatgactttcacgaaaacctcccagaagtttggacagtgggctgatagccgagccaatactgtttacggcctgggattcgcctctgaacagcatctgactcagtttgccgagaaattccaggaggttaaggaagccgcacgccttgctagagaaaaatctcaggacggcggagaactgacatcacccgcattgggcctggcctcccaccaggtgccaccatcgccattggtgtccgccaatggaccaggtgaggagaagttgtttcgcagccagagcgccgacgctccgggacctaccgagagggagcggttaaaaaaaatgctgtcggagggttcggtgggcgaggttcagtgggaagccgaatttttcgctctgcaggattccaacaacaagctcgcgggtgcgctgagggaagctaacgccgctgcggcacaatggcggcagcagctggaggcccagcgcgctgaggcggagcgacttcgccaacgagtggcagagctcgaagcacaggcagcaagtgaagtgacgccaacaggcgagaaggaggggttaggacaaggccagagcctggaacaattggaagccttggtgcagacaaaggatcaggagatccagacacttaagagtcagacaggcggtccacgagaagccttagaagccgcagaacgagaggagacccagcagaaggtgcaagatctggagacgaggaacgccgaactggaacaccagcttcgggctatggagcggtccctggaagaagccagggccgagagggagcgagccagagcagaagtcggcagggcagcacagttgctcgatgtcagtttgttcgagttatctgaactccgggaaggtttggcaagattagctgaagccgctccttag

SEQ ID NO: 294978 - DNA, 1086 bp, Artificial Sequence
  derived and/or modified sequence
atgagcacagcacgagagcagccaatcttttcgaccagggcccatgtgtttcagatcgatccagcaaccaaacgcaactggattccagccggaaagcatgcactcaccgtttcatatttttacgatgccactaggaacgtgtataggatcattagcatcggtggcgcaaaggctataatcaatagcacagtgacccccaacatgacgttcaccaagacctcccagaaattcggccaatgggccgatagccgagcgaatacggtttacgggctaggatttgcatcggagcagcacttgacacaattcgctgaaaaatttcaggaggtgaaggaagcggcaaggctggcccgagaaaagagtcaggatgggggtgaactcactagtcctgctctcggcttagcctcacaccaggtgccaccgagtcctttggtcagcgctaacgggccaggggaagagaaactcttccgttcccagagcgccgacgcccctggtccaaccgagcgtgaaaggctcaaaaagatgctgtccgagggttccgtaggtgaagttcagtgggaggcagagttttttgccctgcaggactccaataataagcttgccggagcccttagggaggctaacgccgcagctgcccagtggcgccagcagcttgaggcccaaagggccgaggctgagcgtctcaggcaacgggtcgcggagctggaggcccaggcagcctctgaagtgacacccactggcgaaaaggagggactcggacagggccagtcgctggaacagctggaagccttggtgcagactaaggatcaggaaatccagactctcaagtcccagaccggtggtcctcgggaagccctggaggcagctgaaagagaagagacacaacagaaggtgcaggacttggagacccggaacgcagagctggagcaccagttacgcgcaatggaaaggtccctggaagaagcaagagccgagcgcgaaagagcccgtgctgaggttggacgagccgctcagctcctagacgtgtctctgtttgaactgtccgagttgcgtgagggcctggcgagattggctgaagctgcaccgtag

SEQ ID NO: 294979 - DNA, 1086 bp, Artificial Sequence
  derived and/or modified sequence
atgagcaccgccagagagcagcccatcttcagcaccagagcccacgtgttccagatcgaccccgccaccaagagaaactggatccccgccggcaagcacgccctgaccgtgagctacttctacgacgccaccagaaacgtgtacagaatcatcagcatcggcggcgccaaggccatcatcaacagcaccgtgacccccaacatgaccttcaccaagaccagccagaagttcggccagtgggccgacagcagagccaacaccgtgtacggcctgggcttcgccagcgagcagcacctgacccagttcgccgagaagttccaggaggtgaaggaggccgccagactggccagagagaagagccaggacggcggcgagctgaccagccccgccctgggcctggccagccaccaggtgccccccagccccctggtgagcgccaacggccccggcgaggagaagctgttcagaagccagagcgccgacgcccccggccccaccgagagagagagactgaagaagatgctgagcgagggcagcgtgggcgaggtgcagtgggaggccgagttcttcgccctgcaggacagcaacaacaagctggccggcgccctgagagaggccaacgccgccgccgcccagtggagacagcagctggaggcccagagagccgaggccgagagactgagacagagagtggccgagctggaggcccaggccgccagcgaggtgacccccaccggcgagaaggagggcctgggccagggccagagcctggagcagctggaggccctggtgcagaccaaggaccaggagatccagaccctgaagagccagaccggcggccccagagaggccctggaggccgccgagagagaggagacccagcagaaggtgcaggacctggagaccagaaacgccgagctggagcaccagctgagagccatggagagaagcctggaggaggccagagccgagagagagagagccagagccgaggtgggcagagccgcccagctgctggacgtgagcctgttcgagctgagcgagctgagagagggcctggccagactggccgaggccgccccctag

SEQ ID NO: 294980 - protein, 323 aa, Artificial Sequence
  derived and/or modified sequence
MILQETKAACGIPAIPHCSRVEILDAKTREKLCFLDKVEPHATIAEIKNLFTKTHPQWYPARQSLRLDPKGKSLKDEDVLQKLPVGTTATLYFRDLGAQISWVTVFLTEYAGPLFIYLLFYFRVPFIYGHKYDFTSSRHTVVHLACICHSFHYIKRLLETLFVHRFSHGTMPLRNIFKNCTYYWGFAAWMAYYINHPLYTPPTYGAQQVKLALAIFVICQLGNFSIHMALRDLRPAGSKTRKIPYPTKNPFTWLFLLVSCPNYTYEVGSWIGFAIMTQCLPVALFSLVGFTQMTIWAKGKHRSYLKEFRDYPPLRMPIIPFLL

SEQ ID NO: 294981 - DNA, 972 bp, Artificial Sequence
  derived and/or modified sequence
atgatcctgcaggagaccaaggccgcctgcggcatccccgccatcccccactgcagcagagtggagatcctggacgccaagaccagagagaagctgtgcttcctggacaaggtggagccccacgccaccatcgccgagatcaagaacctgttcaccaagacccacccccagtggtaccccgccagacagagcctgagactggaccccaagggcaagagcctgaaggacgaggacgtgctgcagaagctgcccgtgggcaccaccgccaccctgtacttcagagacctgggcgcccagatcagctgggtgaccgtgttcctgaccgagtacgccggccccctgttcatctacctgctgttctacttcagagtgcccttcatctacggccacaagtacgacttcaccagcagcagacacaccgtggtgcacctggcctgcatctgccacagcttccactacatcaagagactgctggagaccctgttcgtgcacagattcagccacggcaccatgcccctgagaaacatcttcaagaactgcacctactactggggcttcgccgcctggatggcctactacatcaaccaccccctgtacaccccccccacctacggcgcccagcaggtgaagctggccctggccatcttcgtgatctgccagctgggcaacttcagcatccacatggccctgagagacctgagacccgccggcagcaagaccagaaagatcccctaccccaccaagaaccccttcacctggctgttcctgctggtgagctgccccaactacacctacgaggtgggcagctggatcggcttcgccatcatgacccagtgcctgcccgtggccctgttcagcctggtgggcttcacccagatgaccatctgggccaagggcaagcacagaagctacctgaaggagttcagagactacccccccctgagaatgcccatcatccccttcctgctgtag

SEQ ID NO: 294982 - DNA, 972 bp, Artificial Sequence
  derived and/or modified sequence
atgatcctgcaggagacaaaggcagcatgcgggataccagctattccacattgttcccgagtcgagatacttgatgccaagacacgtgaaaagctgtgcttcctggataaagtggagccacacgcgacaattgctgagataaagaatttgttcacaaaaacgcatcctcaatggtaccccgctcgccagtcgctcagactagacccgaaaggaaagtccctgaaagatgaggatgtgctgcagaagctcccggtcggcaccacagcaacactgtattttagagatttgggcgctcagatctcatgggtaactgtcttcttgacggagtatgcaggcccattgttcatttatctgctgttttacttcagggtccctttcatatatggccataaatatgactttactagcagcagacacactgtcgtgcatctagcgtgtatctgtcacagtttccattacatcaagcgcctgctggagaccctattcgtgcacaggttctcccacggcaccatgcctctgagaaatatctttaagaactgcacttactactgggggtttgccgcctggatggcctactatattaaccatccgttatacactcctcctacttacggcgcccagcaggtcaagctggcactggccatcttcgtcatttgccagctcggtaatttcagtattcacatggctctacgcgacctgagaccggctgggtccaagactaggaagatcccttatccaactaaaaacccgtttacgtggctgtttctgctcgtaagctgtccaaactacacgtacgaggtgggctcctggatcgggttcgcaattatgacccagtgtctgcccgtggcacttttctctctggtaggtttcacacaaatgactatatgggccaaaggaaagcacagaagttatctgaaggagttccgggactaccccccccttcggatgcccataataccttttctcctgtag

SEQ ID NO: 294983 - DNA, 972 bp, Artificial Sequence
  derived and/or modified sequence
atgatcctgcaggagaccaaggccgcctgtggcatcccagccatcccccactgcagccgggtggagatcctggatgccaagacccgggagaagctgtgcttcctggacaaggtggagccccacgccaccatcgccgagatcaagaacctcttcaccaagacccacccccagtggtacccagcccggcagagcctgcggctggaccccaagggcaagagcctgaaggatgaagatgtgctgcagaagctgcctgtgggcaccacagccaccctgtacttccgggacctgggcgcccagatctcctgggtgaccgtcttcctgacagaatatgccggccccctcttcatctacctgctcttctacttccgggtgcccttcatctacggccacaagtatgacttcaccagcagccgccacacagtggtgcacctggcctgcatctgccacagcttccactacatcaagaggctgctggagaccctgtttgtgcaccgcttcagccacggcaccatgcccctgaggaacatcttcaagaactgcacctactactggggctttgctgcctggatggcctactacatcaaccaccccctgtacaccccacccacctacggggcccagcaggtgaagctggccctggccatcttcgtcatctgccagctgggcaacttcagcatccacatggccctgcgggacctgcggcctgctggcagcaagaccaggaagatcccctaccccaccaagaaccccttcacctggctgttcctgctggtgtcctgccccaactacacctatgaggtgggctcctggattggatttgccatcatgacccagtgcctgcctgtggccctcttcagcctggtgggcttcacccagatgaccatctgggccaagggcaagcacaggagctacctgaaggagttccgggactacccacccctgaggatgcccatcatccccttcctgctgtag

SEQ ID NO: 294984 - DNA, 972 bp, Artificial Sequence
  derived and/or modified sequence
atgatcctgcaggagaccaaggccgcctgcggcatccccgccatcccacattgttcccgggtggagatcctggatgctaagaccagggagaaattgtgctttctggacaaagtggagccgcacgcaactatcgctgaaattaagaacctattcacaaaaacacacccacagtggtaccccgccagacaaagcctgagattggaccccaaaggcaaaagcttgaaagacgaggacgttctgcagaaactccccgtcggcactaccgcaacactatacttccgcgatctgggggcccagataagttgggttacagtctttctaaccgagtacgcgggccctctctttatttatctgctcttctatttcagagtgcctttcatttatggacacaaatacgacttcacctcaagtaggcatacagtggtgcacctggcctgtatctgccactcctttcattacattaagaggctgctggaaacgctgtttgtgcaccggttctcccacggtacgatgcccttacgcaacatcttcaagaactgtacatattactggggcttcgcagcatggatggcctactacatcaatcaccccctttatacccctcctacttacggcgcccagcaggtaaagctcgctctggcaatttttgtcatttgccagttaggcaactttagcatccatatggccctgagagacctacgccctgccggcagcaaaacaagaaagatcccataccctacgaagaaccctttcacctggctcttcctgctagtcagttgccctaactacacctatgaagtaggttcatggattggcttcgctatcatgacccagtgcctaccagtggccttgttttctctggttggcttcacccaaatgacgatctgggccaagggcaagcatagaagctacctgaaagagttccgcgactatccaccactcagaatgcctatcattccttttttactctag

SEQ ID NO: 294985 - DNA, 972 bp, Artificial Sequence
  derived and/or modified sequence
atgattcttcaggaaactaaggctgcttgtggcatccctgccatcccgcactgcagtagggttgagatcctggatgctaagactcgcgagaagctttgtttcttggacaaagtcgaaccacatgctactatcgcagagataaagaacttgtttacaaaaacccacccccagtggtaccccgcacgtcaatcactgagactggaccctaaggggaagtctctgaaagatgaagacgtgctgcaaaaactacctgttggtactactgctactttatactttcgagacctcggggcacagataagctgggttacagtgttcttgaccgaatacgccggacctctgttcatttatctgctgttctatttcagagtgccatttatctatggccacaaatacgattttactagctcccgccatactgtggtccatctggcttgtatatgccattctttccattacatcaaaagactcctggagactctattcgtccaccgtttcagtcatggcaccatgccactcagaaatatcttcaaaaactgcacctactactggggttttgctgcctggatggcttactacatcaatcatccactgtacacaccacctacctatggagcccagcaggtcaaactggccctggctatctttgtaatatgccagctgggcaatttttctatccacatggctcttcgggatcttcgccctgcagggtccaagacacggaaaattccatacccaaccaaaaaccccttcacgtggctatttctgctggtcagttgcccgaattatacctacgaagtaggctcatggattgggttcgcaatcatgacacagtgtctacccgttgcactgtttagtctggtggggttcacacagatgacaatttgggccaagggtaagcaccggtcctacctgaaggagtttcgcgattaccccccactccgaatgccaataattcccttcctgctatag

SEQ ID NO: 294986 - DNA, 1202 bp, Artificial Sequence
  derived and/or modified sequence
tttagtctatcgctgcggttgcgagcgctgtagggagcctgtgctgtgccgcgcagttaggcagcagcagccgcggagcagtagccgccgtgggagggagccatgaagcattacgagcagagagatgattcttcaagaaaccaaagcagcctgtggcattccagcgattcctcattgctcaagggtggagattctggacgcaaagacaagggagaagctgtgtttcttggacaaggtggagccccacgccaccattgcggagatcaagaacctcttcactaagacccatccgcagtggtaccccgcccgccagtccctccgcctggaccccaagggcaagtccctgaaggatgaggatgttctgcagaagctgcccgtgggcaccacggccacactgtacttccgggacctgggggcccagatcagctgggtgacggtcttcctaacagagtacgcggggccccttttcatctacctgctcttctacttccgagtgcccttcatctatggccacaaatatgactttacgtccagtcggcatacagtggtgcacctcgcctgcatctgtcactcattccactacatcaagcgcctgctggagacgctcttcgtgcaccgcttctcccatggcactatgcctttgcgcaacatcttcaagaactgcacctactactggggcttcgccgcgtggatggcctattacatcaatcaccctctctacactccccctacctacggagctcagcaggtgaaactggcgctcgccatctttgtgatctgccagctcggcaacttctccatccacatggccctgcgggacctgcggcccgctgggtccaagacgcggaagatcccataccccaccaagaaccccttcacgtggctcttcctgctggtgtcctgccccaactacacctacgaggtggggtcctggatcggtttcgccatcatgacgcagtgtctcccagtggccctgttctccctggtgggcttcacccagatgaccatctgggccaagggcaagcaccgcagctacctgaaggagttccgggactacccgcccctgcgcatgcccatcatccccttcctgctctgagcgctcacccctgctgaggctcagcccctcaacccggtggcattctgggggaggagtggggcccacagctctccagcacccggaataaagcccgcctgccccagtc

SEQ ID NO: 294987 - protein, 544 aa, Artificial Sequence
  derived and/or modified sequence
MNPDYNVEFFRQFILVMNALDNRAARNHVNRMCLAADVPLIESGTAGYLGQVTTIKKGVTECYECHPKPTQRTFPGCTIRNTPSEPIHCIVWAKYLFNQLFGEEDADQEVSPDRADPEAAWEPTEAEARARASNEDGDIKRISTKEWAKSTGYDPVKLFTKLFKDDIRYLLTMDKLWRKRKPPVPLDWAEVQSQGEETNASDQQNEPQLGLKDQQVLDVKSYARLFSKSIETLRVHLAEKGDGAELIWDKDDPSAMDFVTSAANLRMHIFSMNMKSRFDIKSMAGNIIPAIATTNAVIAGLIVLEGLKILSGKIDQCRTIFLNKQPNPRKKLLVPCALDPPNPNCYVCASKPEVTVRLNVHKVTVLTLQDKIVKEKFAMVAPDVQIEDGKGTILISSEEGETEANNHKKLSEFGIRNGSRLQADDFLQDYTLLINILHSEDLGKDVEFEVVGDAPEKVGPKQAEDAAKSITNGSDDGAQPSTSTAQEQDDVLIVDSDEEDSSNNADVSEEERSRKRKLDEKENLSAKRSRIEQKEELDDVIALD

SEQ ID NO: 294988 - protein, 292 aa, Artificial Sequence
  derived and/or modified sequence
MCLAADVPLIESGTAGYLGQVTTIKKGVTECYECHPKPTQRTFPGCTIRNTPSEPIHCIVWAKYLFNQLFGEEDADQEVSPDRADPEAAWEPTEAEARARASNEDGDIKRISTKEWAKSTGYDPVKLFTKLFKDDIRYLLTMDKLWRKRKPPVPLDWAEVQSQGEETNASDQQNEPQLGLKDQQVLDVKSYARLFSKSIETLRVHLAEKGDGAELIWDKDDPSAMDFVTSAANLRMHIFSMNMKSRFDIKSMAGNIIPAIATTNAVIAGLIVLEGLKILSGKIDQCRTDFFE

SEQ ID NO: 294989 - DNA, 1635 bp, Artificial Sequence
  derived and/or modified sequence
atgaaccccgactacaacgtggagttcttcagacagttcatcctggtgatgaacgccctggacaacagagccgccagaaaccacgtgaacagaatgtgcctggccgccgacgtgcccctgatcgagagcggcaccgccggctacctgggccaggtgaccaccatcaagaagggcgtgaccgagtgctacgagtgccaccccaagcccacccagagaaccttccccggctgcaccatcagaaacacccccagcgagcccatccactgcatcgtgtgggccaagtacctgttcaaccagctgttcggcgaggaggacgccgaccaggaggtgagccccgacagagccgaccccgaggccgcctgggagcccaccgaggccgaggccagagccagagccagcaacgaggacggcgacatcaagagaatcagcaccaaggagtgggccaagagcaccggctacgaccccgtgaagctgttcaccaagctgttcaaggacgacatcagatacctgctgaccatggacaagctgtggagaaagagaaagccccccgtgcccctggactgggccgaggtgcagagccagggcgaggagaccaacgccagcgaccagcagaacgagccccagctgggcctgaaggaccagcaggtgctggacgtgaagagctacgccagactgttcagcaagagcatcgagaccctgagagtgcacctggccgagaagggcgacggcgccgagctgatctgggacaaggacgaccccagcgccatggacttcgtgaccagcgccgccaacctgagaatgcacatcttcagcatgaacatgaagagcagattcgacatcaagagcatggccggcaacatcatccccgccatcgccaccaccaacgccgtgatcgccggcctgatcgtgctggagggcctgaagatcctgagcggcaagatcgaccagtgcagaaccatcttcctgaacaagcagcccaaccccagaaagaagctgctggtgccctgcgccctggacccccccaaccccaactgctacgtgtgcgccagcaagcccgaggtgaccgtgagactgaacgtgcacaaggtgaccgtgctgaccctgcaggacaagatcgtgaaggagaagttcgccatggtggcccccgacgtgcagatcgaggacggcaagggcaccatcctgatcagcagcgaggagggcgagaccgaggccaacaaccacaagaagctgagcgagttcggcatcagaaacggcagcagactgcaggccgacgacttcctgcaggactacaccctgctgatcaacatcctgcacagcgaggacctgggcaaggacgtggagttcgaggtggtgggcgacgcccccgagaaggtgggccccaagcaggccgaggacgccgccaagagcatcaccaacggcagcgacgacggcgcccagcccagcaccagcaccgcccaggagcaggacgacgtgctgatcgtggacagcgacgaggaggacagcagcaacaacgccgacgtgagcgaggaggagagaagcagaaagagaaagctggacgagaaggagaacctgagcgccaagagaagcagaatcgagcagaaggaggagctggacgacgtgatcgccctggactag

SEQ ID NO: 294990 - DNA, 879 bp, Artificial Sequence
  derived and/or modified sequence
atgtgcctggccgccgacgtgcccctgatcgagagcggcaccgccggctacctgggccaggtgaccaccatcaagaagggcgtgaccgagtgctacgagtgccaccccaagcccacccagagaaccttccccggctgcaccatcagaaacacccccagcgagcccatccactgcatcgtgtgggccaagtacctgttcaaccagctgttcggcgaggaggacgccgaccaggaggtgagccccgacagagccgaccccgaggccgcctgggagcccaccgaggccgaggccagagccagagccagcaacgaggacggcgacatcaagagaatcagcaccaaggagtgggccaagagcaccggctacgaccccgtgaagctgttcaccaagctgttcaaggacgacatcagatacctgctgaccatggacaagctgtggagaaagagaaagccccccgtgcccctggactgggccgaggtgcagagccagggcgaggagaccaacgccagcgaccagcagaacgagccccagctgggcctgaaggaccagcaggtgctggacgtgaagagctacgccagactgttcagcaagagcatcgagaccctgagagtgcacctggccgagaagggcgacggcgccgagctgatctgggacaaggacgaccccagcgccatggacttcgtgaccagcgccgccaacctgagaatgcacatcttcagcatgaacatgaagagcagattcgacatcaagagcatggccggcaacatcatccccgccatcgccaccaccaacgccgtgatcgccggcctgatcgtgctggagggcctgaagatcctgagcggcaagatcgaccagtgcagaaccgacttcttcgagtag

SEQ ID NO: 294991 - DNA, 1635 bp, Artificial Sequence
  derived and/or modified sequence
atgaacccagattacaatgtggagttcttcagacagttcatcttggtcatgaacgctcttgataatagggctgcgcgaaatcatgtgaataggatgtgtctcgcagcagatgtgccactgattgaatccggaacagcaggctacttgggccaagtgactaccattaagaaaggtgtcacagagtgctacgagtgccaccccaagcccacccagcgaacctttccgggatgtaccatccggaatactcctagcgaaccgatccattgtatcgtgtgggcaaagtacctgttcaaccaattgtttggcgaggaggatgccgatcaggaagtgtcccctgaccgtgcggacccagaagcagcatgggagcctacagaggccgaagcccgagcaagggcaagcaatgaggatggcgacataaaaagaatcagcaccaaggagtgggccaaatccacagggtacgatcccgtgaaactgtttacaaaactctttaaggatgacatccgatacttgttaacgatggacaagttatggagaaaacgcaagccacctgttcccctggattgggctgaggtccaatctcagggtgaagaaactaatgcatcagaccaacaaaatgaaccacaactggggttaaaggaccagcaggtgctcgacgtcaagagctacgcacggcttttctcgaaatctatagaaactctgagggtgcaccttgctgagaaaggtgacggcgccgagctgatctgggataaggatgatccctctgcaatggattttgtgaccagtgcggctaatctccgaatgcacatctttagcatgaatatgaaatctagatttgatattaagtctatggccggaaatataatacccgctatcgccacaaccaatgcggtcattgcaggcctgattgtcctagagggactgaagattcttagcggtaagatagaccaatgtcggactatatttctgaacaaacaacccaatccacgaaagaaactgctagtgccgtgtgccctcgacccccctaacccgaattgctacgtatgcgcaagcaaacctgaggtcaccgtgcgattgaatgttcataaggtgactgtgctgacactgcaggacaagattgtgaaagaaaaatttgccatggttgctcccgacgtgcagatagaggacggtaagggaactatattaattagcagtgaagaaggcgaaacagaagcaaataaccataagaaactctccgaattcggtatcaggaatggctcccgacttcaggccgacgactttcttcaagactacacgctgctgattaacattctgcacagcgaagatctgggaaaggatgtggaattcgaagtggtcggcgatgctcctgagaaagtgggaccaaagcaggccgaggatgctgccaaaagtatcacaaatggtagcgatgatggtgctcagccatccacaagtaccgctcaggagcaggacgatgtgttgattgtggactcagacgaagaagatagctcgaacaacgccgacgtgtcggaggaggagcgctcgcggaaaaggaagctcgacgaaaaggagaacctgagtgccaagagatctagaatcgagcagaaggaggaattggacgacgtcatcgctctggactag

SEQ ID NO: 294992 - DNA, 879 bp, Artificial Sequence
  derived and/or modified sequence
atgtgtctcgcagcagatgtgccactcattgaaagtggcacagctggctacctgggtcaggttaccacaattaagaagggggttaccgagtgttacgagtgccacccaaagcctacccagagaaccttccctggatgtactataaggaacacacccagtgagccaatacattgtattgtgtgggctaaataccttttcaaccagctttttggagaggaggatgcggatcaggaagtatcacccgaccgcgctgaccccgaggcggcgtgggagccgacggaggctgaggccagagccagagcctctaacgaagatggagacattaagcgaatcagcacaaaggagtgggctaagagcactggttacgaccctgttaagctcttcacaaaactgtttaaggatgatattaggtacttacttacgatggacaagctgtggaggaagcggaagccgccagtccctctggattgggccgaagtgcaaagccagggtgaagagacaaatgccagtgatcagcagaacgagccccagctaggccttaaggaccaacaagtcttggacgttaaatcctacgctaggttattctctaagagcatcgagacgctgcgagtgcacctcgctgagaaaggggacggagccgagcttatttgggataaggatgatccctccgctatggactttgtgacaagcgccgccaacttacgaatgcacatatttagcatgaacatgaaatccaggtttgatattaaaagcatggccggaaacataatccccgctattgcgactaccaatgcagtgattgccggtctgatagtgctcgagggtctgaaaattctatccggcaaaatcgaccagtgtcgcacagatttcttcgagtag

SEQ ID NO: 294993 - DNA, 1635 bp, Artificial Sequence
  derived and/or modified sequence
atgaacccagactacaacgtggagttcttccggcagttcatcctggtgatgaatgccctggacaacagagctgccaggaaccacgtgaacaggatgtgcctggccgcagatgtgcccctgattgaaagtggcacagctggctacctgggccaggtgaccaccatcaagaagggcgtgacagaatgttatgagtgccaccccaagcccacccagaggaccttccctggctgcaccatccggaacacccccagcgagcccatccactgcatcgtgtgggccaagtacctgttcaaccagctgtttggagaggaggatgctgaccaggaggtgtccccagacagagctgaccctgaggccgcctgggagcccacagaggccgaggcccgggcccgggccagcaatgaagatggagacatcaagaggatcagcaccaaggagtgggccaagagcacaggctatgaccctgtgaagctgttcaccaagctgttcaaggatgacatccgctacctgctgaccatggacaagctgtggaggaagaggaagccccctgtgcccctggactgggccgaggtgcagagccagggcgaggagaccaatgccagtgaccagcagaatgagccccagctgggcctgaaggaccagcaggtgctggatgtgaagagctatgcccggctcttcagcaagagcattgagaccctgcgggtgcacctggccgagaagggagatggagctgagctgatctgggacaaggatgaccccagcgccatggactttgtgaccagcgctgccaacctgaggatgcacatcttctccatgaacatgaagagcagatttgacatcaagtccatggccggcaacatcatcccagccatcgccaccaccaatgctgtgattgctggcctcatcgtgctggagggcctgaagatcctgagcggcaagattgaccagtgcaggaccatcttcctgaacaagcagcccaaccccaggaagaagctgctggtgccctgtgccctggacccccccaaccccaactgctacgtgtgtgccagcaagccagaggtgacagtgcggctgaatgtgcacaaggtgacagtgctgaccctgcaggacaagatcgtgaaggagaagtttgccatggtggccccagatgtgcagattgaagatggcaagggcaccatcctgatcagcagcgaggagggggagacagaggccaacaaccacaagaagctgtctgaatttggcatcagaaatggcagccggctgcaggctgatgacttcctgcaggactacaccctgctgatcaacatcctgcacagcgaggacctgggcaaggatgtggagtttgaggtggtgggagatgcccctgagaaggtgggccccaagcaggccgaggatgctgccaagagcatcaccaacggcagtgatgatggagcccagcccagcaccagcacagcccaggagcaggatgatgtgctgattgtggacagtgatgaggaggacagcagcaacaatgctgatgtgtctgaggaggagaggagcaggaagaggaagctggatgagaaggagaacctgagcgccaagaggagcagaattgagcagaaggaggagctggatgatgtgattgccctggactag

SEQ ID NO: 294994 - DNA, 879 bp, Artificial Sequence
  derived and/or modified sequence
atgtgcctggccgcagatgtgcccctcatcgagagcggcacagctggctacctgggccaggtgaccaccatcaagaagggcgtgacagagtgctatgagtgccaccccaagcccacccagaggaccttccctggctgcaccatccggaacaccccatctgagcccatccactgcatcgtgtgggccaagtacctgttcaaccagctgtttggagaagaagatgctgaccaggaggtgtccccagacagagctgaccctgaggccgcctgggagcccacagaagctgaggcccgggcccgggccagcaatgaagatggagacatcaagaggatcagcaccaaggagtgggccaagagcacaggctatgaccctgtgaagctgttcaccaagctgttcaaggatgacatccgctacctgctgaccatggacaagctgtggaggaagaggaagccccctgtgcccctggactgggccgaggtgcagagccagggcgaggagaccaatgccagtgaccagcagaatgagccccagctgggcctgaaggaccagcaggtgctggatgtgaagagctatgcccggctcttcagcaagagcattgagaccctgcgggtgcacctggccgagaagggagatggagctgagctgatctgggacaaggatgaccccagcgccatggactttgtgaccagcgctgccaacctgaggatgcacatcttctccatgaacatgaagagcagatttgacatcaagtccatggccggcaacatcatcccagccatcgccaccaccaatgctgtgattgctggcctgattgtgctggagggcctgaagatcctgagcggcaagattgaccagtgcaggacagacttctttgaatag

SEQ ID NO: 294995 - DNA, 1635 bp, Artificial Sequence
  derived and/or modified sequence
atgaaccccgactacaacgtggagttcttccggcagttcatcctggtgatgaacgccctggataatagggccgcgcgaaatcatgtgaatagaatgtgtctagctgccgacgtcccgctcatcgagtcaggaacagctggttatctggggcaggtaaccaccattaaaaagggagtgaccgagtgctacgagtgtcatccgaaacctactcagcgcactttccctggatgtaccatccgaaacaccccatccgagccaatccattgcatagtgtgggccaaataccttttcaaccagctgttcggcgaagaggacgccgatcaagaggtgtccccagacagagcagatcctgaagctgcgtgggagccgactgaggcagaagctagagcgcgagcctcgaacgaagacggtgacatcaagagaatctctacgaaggagtgggccaagagcactggatacgatcccgtgaaattattcactaaattattcaaggacgacatacgctacctactgaccatggacaaattatggaggaagcgaaagccccccgtgcctctggactgggcagaggtgcaaagccagggggaagaaacaaatgcgtctgatcagcaaaacgaaccccagctcggtctgaaggatcagcaggttctcgacgtaaaatcatacgctcgtctcttctcaaagtccatcgagactctccgcgttcatttagcagaaaagggtgatggcgccgagctcatctgggataaggatgacccgtctgcgatggacttcgtgacatccgccgcaaacctccgcatgcacatctttagcatgaacatgaaaagccggttcgatataaagtccatggctggaaacataatccctgcaatcgccacaacaaacgccgtcattgcagggctgattgtgctggaagggctcaagatcctttctgggaaaattgatcaatgccgaacgattttcctgaataaacagcccaatccacgaaaaaagctcctggtgccttgtgcgctggacccacccaaccccaattgttacgtctgcgcctctaaaccggaggtgactgttcggttgaatgtgcataaggtcactgttttaactctgcaagacaagattgtgaaagagaaattcgctatggtagcccccgatgttcagatcgaagacgggaagggcaccatccttatctcaagtgaggaaggggagaccgaggcaaacaatcacaagaaactctctgagtttggtattaggaacgggtcaagattacaggccgatgactttctgcaggactatacactcctgattaatatcttgcattctgaggatctgggtaaggacgtcgagttcgaggtcgttggggacgccccagagaaggtggggcctaagcaggcagaagatgcagcaaagtcgataacaaacggcagcgacgacggcgcccagccatcaacaagcactgctcaggaacaggacgacgtacttatcgtagactctgacgaggaggacagctctaataatgcggatgttagtgaagaggaacgaagtcgaaagcggaaactagatgaaaaggagaacctcagtgctaaacggtcgaggattgaacagaaagaggagctggacgacgtgatcgccctcgactag

SEQ ID NO: 294996 - DNA, 879 bp, Artificial Sequence
  derived and/or modified sequence
atgtgcctggccgccgacgtgcccctgatcgagagcggcaccgccggctatctggggcaggtaactaccatcaagaagggagtcactgaatgttatgagtgccacccgaagccaacccagaggaccttccctggctgcaccattcgcaatacaccaagcgagccgatccattgtatcgtgtgggcaaaatatttgtttaatcaattgtttggagaggaagacgccgaccaggaggtatctccggaccgggctgaccccgaggccgcctgggagcctacagaggcagaagcccgtgctcgggcaagcaacgaggatggggacatcaagcgaatttctaccaaagagtgggcaaagtcaactggatatgaccctgtaaagctgttcactaaactgtttaaggatgatattagatacctcctcactatggacaaattatggaggaagcgcaagccccccgtgccactggactgggccgaggtgcagagccagggcgaggagaccaatgcttctgaccagcagaatgagccccagttgggcctcaaggatcagcaagtcctcgacgttaagagctacgcccgcctgttctctaagtccatagaaactctgcgggttcacctggccgagaagggtgatggagccgagctaatctgggacaaggacgacccctctgccatggatttcgtgacctccgctgcaaacttgagaatgcatattttcagcatgaacatgaagagccgcttcgacatcaagtctatggccgggaatattatccccgccattgccactaccaacgctgtcatcgcaggcttgatcgtgcttgaggggttaaaaattctctccggcaagattgatcagtgtagaactgatttctttgaatag

SEQ ID NO: 294997 - DNA, 1635 bp, Artificial Sequence
  derived and/or modified sequence
atgaaccctgattataatgtcgaattcttcaggcaattcatcttggtaatgaacgccttagataaccgcgctgcgcgaaaccacgttaatcgcatgtgcttagccgctgacgtcccgctgattgagtcagggacagctggatatctcggtcaggtcaccacgataaaaaaaggcgtgacagagtgttacgagtgtcacccaaagcccacccagagaactttccccggatgtaccatacgtaacaccccttcagaaccaattcattgtattgtgtgggcaaaatacctgtttaatcagctttttggtgaggaagatgccgaccaggaagtttcaccagatcgcgctgatcccgaagcagcgtgggagcctactgaagcggaggcgcgtgccagggctagtaacgaggacggagacattaagcgtatctccacaaaggagtgggcaaaatccacaggttatgacccagtcaagctgtttaccaagctcttcaaagacgacattaggtacctgctgactatggacaagctgtggaggaagcgaaagcctcccgtgcctctagattgggctgaggttcagtcacaaggcgaagaaacaaacgcttcggatcagcaaaacgaacctcagctgggtctgaaggatcagcaggttctggatgtaaagtcttatgctaggctgttttctaagtccatcgaaacactgcgggtgcatcttgccgagaagggtgatggcgctgaactgatttgggataaggacgacccatccgcaatggatttcgtgaccagcgccgcaaacctgcgcatgcatatcttttctatgaatatgaagagccggttcgacatcaagtctatggctggtaacatcatacccgctatcgctactactaacgccgttattgccggattaattgtgttagagggactaaaaattttaagcggtaagattgatcaatgtagaacaatcttcctcaacaagcaaccaaacccaaggaagaaactgttagtaccttgtgccctcgatcctccaaatccaaactgctacgtgtgcgcaagcaaacccgaagttaccgttaggttgaacgtgcataaggtgaccgtgcttactctccaggacaagatcgtgaaggagaaatttgctatggttgcccctgacgtccaaatagaagatgggaaagggaccatcctcatcagcagtgaggagggcgagaccgaggccaataaccacaagaagctctccgaatttggaatacggaacggatcacgattacaagccgatgactttctgcaagattacacgctccttatcaacatcctgcactccgaagatctgggtaaggatgttgagtttgaagtggtaggcgatgcaccggagaaggtcggcccaaagcaagcagaagacgccgcaaagtccattacaaatgggagtgacgacggggctcaacctagcacttctacagcacaggaacaggatgacgtgctcattgtcgactctgatgaggaggacagttctaataacgcggacgtgagtgaagaggaaagatcacggaaacgtaaacttgacgagaaagagaaccttagtgccaaacgctcaagaatcgaacagaaggaagaactggacgacgttatagccctggattag

SEQ ID NO: 294998 - DNA, 879 bp, Artificial Sequence
  derived and/or modified sequence
atgtgtctggcggcagacgtgcccctaattgagtctggcactgctggatatctaggccaagtgacgacaataaagaagggggttacggaatgctatgagtgccatccgaagcctacccaacggacgttcccaggatgtacaatccggaataccccctcggagcctattcactgcatagtttgggccaaatacctatttaaccagttgtttggtgaagaagatgcagatcaggaagtgtcccctgaccgggctgaccccgaggcagcgtgggagcccacggaagcggaggctcgcgcaagagcatctaatgaggacggagatattaaacgtattagcacaaaggagtgggctaaatccacgggttatgacccggttaagctctttaccaaactgtttaaagatgacattaggtacctcttaacgatggacaaactgtggcggaaaagaaaacccccagtcccactagattgggccgaggtacaatcgcagggggaggagacaaatgcttctgaccagcagaacgaaccccaacttggactgaaggaccagcaagttcttgacgtgaagtcctacgctcgactgttctcaaagtcgattgagactctgcgcgtccatctcgccgaaaagggcgatggcgctgagctaatttgggataaggacgatccctcagcaatggactttgtcacatcagctgcgaatctccgcatgcacatcttctcaatgaacatgaaatcccgatttgatattaagtctatggcagggaatattattcccgctattgccaccacaaatgccgtgattgccggtctgatcgtcctggagggccttaagatcttgtccggcaagatagaccagtgcagaacggacttttttgagtag

SEQ ID NO: 294999 - DNA, 1459 bp, Artificial Sequence
  derived and/or modified sequence
cttcccccacccgcttccggccgcggctcggttctcccgcctccgcctccgccgcggctcgtggttgtcccgccatggcactgtcgcgggggctgccccgggagctggctgaggcggtggccgggggccgggtgctggtggtgggggcgggcggcatcggctgcgagctcctcaagaatctcgtgctcaccggtttctcccacatcgacctgctgcccgaaaccatgttaatagaatgtgcctggcagctgatgttcctcttattgaaagtggaacagctgggtatcttggacaagtaactactatcaaaaagggtgtgaccgagtgttatgagtgtcatcctaagccgacccagagaacctttcctggctgtacaattcgtaacacaccttcagaacctatacattgcatcgtttgggcaaagtacttgttcaaccagttgtttggggaagaagatgctgatcaagaagtatctcctgacagagctgaccctgaagctgcctgggaaccaacggaagccgaagccagagctagagcatctaatgaagatggtgacattaaacgtatttctactaaggaatgggctaaatcaactggatatgatccagttaaactttttaccaagctttttaaagatgacatcaggtatctgttgacaatggacaaactatggcggaaaaggaaacctccagttccgttggactgggctgaagtacaaagtcaaggagaagaaacgaatgcatcagatcaacagaatgaaccccagttaggcctgaaagaccagcaggttctagatgtaaagagctatgcacgtcttttttcaaagagcatcgagactttgagagttcatttagcagaaaagggggatggagctgagctcatatgggataaggatgacccatctgcaatggattttgtcacctctgctgcaaacctcaggatgcatattttcagtatgaatatgaagagtagatttgatatcaaatcaatggcagggaacattattcctgctattgctactactaatgcagtaattgctgggttgatagtattggaaggattgaagattttatcaggaaaaatagaccagtgcagaacagatttttttgaataaacaaccaaacccaagaaagaagcttcttgtgccttgtgcactggatcctcccaaccccaattgttatgtatgtgccagcaagccagaggtgactgtgcggctgaatgtccataaagtgactgttctcaccttacaagacaagatagtgaaagaaaaatttgctatggtagcaccagatgtccaaattgaagatgggaaaggaacaatcctaatatcttccgaagagggagagacggaagctaataatcacaagaagttgtcagaatttggaattagaaatggcagccggcttcaagcagatgacttcctccaggactatactttattgatcaacatccttcatag

SEQ ID NO: 295000 - protein, 485 aa, Artificial Sequence
  derived and/or modified sequence
MLFSYQRSLPRQPVPSVQDTVRKYLESVRPILSDEDFDWTAVLAQEFLRLQASLLQWYLRLKSWWASNYVSDWWEEFVYLRSRNPLMVNSNYYMMDFLYVTPTPLQAARAGNAVHALLLYRHRLNRQEIPPVRGPQWVRDGGVVLWPLGHVGPGRQLTAHGFLQTLLMGMRPLCSAQYEKIFNTTRIPGVQKDYIRHLHDSQHVAVFHRGRFFRMGTHSRNSLLSPRALEQQFQRILDDPSPACPHEEHLAALTAAPRGTWAQVRTSLKTQAAEALEAVEGAAFFVSLDAEPAGLTREDPAASLDAYAHALLAGRGHDRWFDKSFTLIVFSNGKLGLSVEHSWADCPISGHMWEFTLATECFQLGYSTDGHCKGHPDPTLPQPQRLQWDLPDQIHSSISLALRGAKILSENVDCHVVPFSLFGKSFIRRCHLSSDSFIQIALQLAHFRVSWVPHPQPPQGLSPPEPPRPAPPRFLVVAAIVGRPS

SEQ ID NO: 295001 - DNA, 1458 bp, Artificial Sequence
  derived and/or modified sequence
atgttatttagctaccagcgatcgctgccaagacaacccgtaccgagcgtgcaggataccgtgcggaaataccttgaatctgtacgccccattctgtccgacgaggacttcgattggacagctgttcttgcccaagaatttctgagattgcaggcaagtctgctgcaatggtatcttcggctgaaatcttggtgggctagcaactatgtgtccgattggtgggaggagtttgtttatctccgatccagaaatcctctgatggtcaactcgaactactacatgatggactttttgtacgtgaccccaacccctctccaggccgcgcgcgcgggtaatgccgtccacgccctcttactctatcgtcacaggcttaatcgccaggaaatcccaccagtgagaggaccccaatgggtacgggacggcggagttgtcttatggccattaggccatgtgggtccgggaaggcagctgacagctcatggcttcctccagacacttctcatgggcatgcgacctctctgttccgcacagtatgagaaaatttttaatactacaaggattcctggcgttcagaaggactatatccgccacttgcatgattcacagcatgtggctgtcttccacaggggccgcttttttagaatgggaactcattcaaggaactctttgttgtccccccgcgccctcgaacagcagtttcagagaattttagatgatccaagccctgcttgcccacacgaagagcatttggctgctctcaccgcagcccctcggggcacctgggcccaagtgcgcacatcactgaaaacccaggccgcagaggccttagaggcagtggaaggagccgcgttttttgtcagcttggacgcagagcctgccggtcttacccgggaggacccagccgcctcattggacgcatacgctcatgcactcctggccggccgcggccacgacagatggtttgataaaagcttcactctcatcgtcttcagtaatgggaaattgggcttatctgtggaacatagctgggccgattgccccatttctgggcacatgtgggaatttacgcttgcgaccgaatgcttccagctcggctatagtactgatggacactgtaaaggacatcctgacccaaccctgccgcaacctcaaagacttcagtgggaccttccggatcagatccacagctccatctcgctggcccttcgaggggctaaaatcctttccgaaaacgtggattgtcacgtggtgcccttctccttgttcggtaagtccttcatccggcggtgccatcttagctccgacagctttatacagatcgcacttcagctggcccatttcagagtgagctgggtgccccatcctcaacctccccagggtctcagcccacctgaaccccctcgacccgccccgccacgcttcctggtggtggcagccatagtagggcgcccctcttag

SEQ ID NO: 295002 - DNA, 1458 bp, Artificial Sequence
  derived and/or modified sequence
atgctgttctcctaccagaggagcctgccccggcagcctgtgcccagcgtgcaggacacagtgaggaagtacctggagagcgtgcggcccatcctgagtgatgaagattttgactggacagctgtgctggcccaggagttcctgcggctgcaggccagcctgctgcagtggtacctgcggctgaagtcctggtgggccagcaactacgtgtctgactggtgggaggagtttgtgtacctgcggagcaggaaccccctgatggtgaacagcaactactacatgatggacttcctgtatgtgacccccacccccctgcaggccgcccgggctggaaatgctgtgcacgccctgctgctgtaccgccaccggctgaaccggcaggagatcccccctgtgcggggcccccagtgggtgagagatggcggcgtggtgctgtggcccctgggccacgtgggccctggccggcagctgacagcccacggcttcctgcagaccctgctgatgggcatgaggcccctgtgcagcgcccagtatgagaagatcttcaacaccacccgcatccctggggtgcagaaggactacatccgccacctgcatgacagccagcacgtggccgtgttccaccggggccgcttcttcaggatgggcacccacagcaggaacagcctgctgagcccccgggccctggagcagcagttccagaggatcctggatgaccccagccctgcctgcccccatgaggagcacctggccgccctgacagctgccccccggggcacctgggcccaggtgaggaccagcctgaagacccaggccgctgaggccctggaggccgtggagggcgccgccttctttgtgtccctggatgctgagcctgctggcctgacccgggaggaccctgctgccagcctggatgcctatgcccacgccctgctggccggccggggccatgaccgctggtttgacaagagcttcaccctcatcgtgttcagcaatggcaagctgggcctgtctgtggagcacagctgggccgactgccccatcagcggccacatgtgggagttcaccctggccacagagtgcttccagctgggctacagcacagatggccactgcaagggccacccagaccccaccctgccccagccccagaggctgcagtgggacctgcctgaccagatccacagcagcatcagcctggccctgcggggggccaagatcctgtctgaaaatgtggactgccacgtggtgcccttcagcctgtttgggaagagcttcatccgccgctgccacctgagcagtgacagcttcatccagatcgccctgcagctggcccacttccgggtgtcctgggtgccccacccccagcccccccagggcctgagccccccagagccccccaggcctgccccaccccgcttcctggtggtggccgccatcgtgggccggcccagctag

SEQ ID NO: 295003 - DNA, 1458 bp, Artificial Sequence
  derived and/or modified sequence
atgctgttcagctaccagcggagcctgccccggcagcccgtgcccagcgttcaggataccgtgagaaagtatttggagagcgtaaggccaattctgagcgatgaggattttgactggaccgccgtgctcgcccaggagtttctaaggttacaggcctccctcctgcagtggtacctccgactgaagagttggtgggccagtaactatgtttccgactggtgggaggagttcgtctatttgcggagtagaaacccacttatggtaaatagcaattattatatgatggatttcctgtatgtgacccctacaccactgcaagccgcccgcgccggcaacgcagttcatgccctgctactgtatcggcatcgcctgaacaggcaggaaattcccccagtgcgcggcccacagtgggtccgcgacggcggtgttgtattatggcccttagggcacgtagggcccggtagacagctcactgcccacggtttcctccagacactcctcatggggatgcgtccattgtgctccgcccaatatgaaaagatcttcaacacaacccgcatccccggggtgcagaaagactacattaggcacctgcatgactctcaacacgtagctgtgttccaccgagggcgattctttcgtatgggcacccattcccggaatagcctgttgtcccctcgtgctctggaacagcagtttcagcgcattcttgacgatccaagtcctgcatgcccacacgaggaacacctggcagcacttacggccgcccctaggggcacctgggcgcaggtgcggacatcactgaaaacgcaggcagccgaggcacttgaggctgtggagggcgctgccttcttcgttagtttagacgccgaacctgccggtctcaccagagaagaccccgccgctagcctcgacgcctatgctcacgcccttcttgctggaaggggccacgacaggtggtttgataagtcttttacattaattgtattctccaacggaaagttgggactcagtgtagagcatagctgggccgattgtccaattagcggccatatgtgggaattcactctggccacagaatgcttccagcttggctattctaccgatggacattgcaaggggcatccagatcccactctgccccaaccacagcgactgcaatgggacctgcctgatcagatccatagttctattagtctggcgctgagaggagccaaaattctcagcgagaatgttgactgtcatgtggtgcctttcagcctgtttgggaagagttttattcgaaggtgccacctgtcatctgacagctttattcagattgcacttcaactcgcccactttagagtcagctgggtgccgcacccccagccaccgcaggggctatcccctcctgaaccaccccgccccgcccctccccgcttcctagttgtcgccgccatcgttggccggccctcctag

SEQ ID NO: 295004 - DNA, 1458 bp, Artificial Sequence
  derived and/or modified sequence
atgctgtttagctatcagaggagtttacctagacagccggtaccatccgtgcaggacactgtacgcaagtatctagagtccgttcgaccgatcctgtctgatgaggatttcgactggaccgcggtgctagcacaagagttccttcgactgcaggcctctctgctgcagtggtatttgcggctgaaatcatggtgggcctctaattacgtatctgactggtgggaggagttcgtttacttgcgctcccgtaatcccctcatggtcaattctaactattatatgatggacttcctatatgtaacgccaactccgctccaggccgcacgggctgggaatgcagttcacgcactcctgctatacaggcatagattaaaccgccaggagattccccctgtgaggggacctcaatgggttcgtgatggcggagtcgttctctggcctctgggacacgtgggccctgggcgtcagctaaccgctcacggatttctgcagacattgctaatgggtatgcgtcccctgtgctctgcacagtacgaaaagatctttaataccaccaggatccctggtgttcagaaagactacatccgccacctgcatgactcccagcacgtggccgtctttcacaggggtaggttttttaggatgggtacccactctcgtaattccctgctctctccccgagcgttggaacagcagttccagaggatccttgacgatccttcgcccgcatgtcctcatgaggagcacctggctgctctcactgcagcaccacgaggcacttgggcgcaagtgcgcacatcactgaagacacaggccgcagaagcgctcgaggcggtggagggtgccgcttttttcgtgagccttgatgcagaacctgctggattaacaagagaggatccagccgcaagtctggatgcatatgcgcacgctttactggccggacgcggacacgaccgatggttcgacaagagcttcaccctgatagtgttcagtaacggtaagctgggattgagcgtggaacactcatgggctgattgtcctatctctggccacatgtgggaatttactttggctacagaatgctttcagcttgggtactccacagatggccattgcaagggtcaccctgatccaaccttgccacagcctcagaggctgcagtgggacctcccggaccaaatccactcgagtatatcgctggcactgcggggagccaagatcttgtccgagaacgtggactgccacgtggtacctttttccctgtttggaaaaagcttcatacggcgatgtcatctcagttcggattcatttattcagatagcccttcagttggcccacttcagggttagctgggtgccgcatccacagcccccacagggcctgtcgccccctgaacctccaaggccagccccacctaggtttctggtggtcgccgctatcgtcggaaggccgagttag

SEQ ID NO: 295005 - DNA, 1952 bp, Artificial Sequence
  derived and/or modified sequence
ctaaaactaatgcttttctcaagaccccgcaactcagcctggaccagtttccctcctccacccacccccgaatcttgagaatcctgtactggggggagggcactgcccccgcaccatgttcttgggagagcagggctccagcgtgacatggctgaagcgcaccaggccgtgggcttccgaccctcgctgacctcggacggggctgaagtggaactcagtgcccctgtgctgcaggagatctacctctctggcctgcgctcctggaaaaggcatctctcacgtttctggaatgactttctcaccggtgtgtttcctgccagccccctcagttggcttttcctcttcagtgccatccagcttgcctggttcctccagctggatccttccttaggactgatggagaagatcaaagagttgctgcctgactggccctggtccgcatcttctctggccgccacccgatgctgttcagttaccagcgctccctgccacgccagcccgtgccctctgtgcaggacaccgtgcgcaagtacctggagtcggtccggcccatcctctccgacgaggacttcgactggaccgcggtcctggcgcaggaattcctgaggctgcaggcgtcgctgctgcagtggtacctgcggctcaagtcctggtgggcgtccaattatgtcagtgactggtgggaggaatttgtgtacctgcgctcccgaaatccgctgatggtgaacagcaactattacatgatggacttcctgtatgtcacacccacgcctctgcaggcagctcgcgctgggaatgccgtccatgccctcctcctgtaccgccaccgcctgaaccgccaggagatacccccggtgagagggccccagtgggttagggatggaggtgtggtcctgtggcctttgggccacgtgggtcctggaaggcagctcacagcccacggtttcctgcagactttgctgatgggaatgcgccccttatgctctgcccagtacgagaagatcttcaacaccacgcggattccaggggtccaaaaagactacatccgccacctccatgacagccaacacgtggctgtcttccaccggggccgattcttccgcatggggacccactcccgaaacagcctgctttccccgagagccctggagcagcagtttcagagaatcctggatgatccctcaccggcctgcccccacgaggaacatctggcagctctgacagctgctcccaggggcacgtgggcccaggtgcggacatccctgaagacccaggcagcggaggccctggaggcggtggaaggggccgctttctttgtgtcactggatgctgagcccgcggggctcaccagggaggacccggcagcgtcgttggatgcctacgcccatgctctgctggccggccggggccatgatcgctggtttgacaaatccttcaccctaatcgtcttctctaacgggaagctgggcctcagcgtggagcactcctgggccgactgccccatctcaggacacatgtgggagttcactctggctacagaatgctttcagctgggctactcaacagacggccactgcaaggggcacccggaccccacactaccccagccccagcggctgcaatgggaccttccagaccagatccactcctccatctctctagccctgaggggagccaagatcttgtctgaaaatgtcgactgccatgtcgttccattctccctatttggcaagagcttcatccgacgctgccacctctcttcagacagcttcatccagatcgccttgcaactggcccacttccgggtcagttgggttccccatccacagcccccgcagggtctcagtccacctgagcccccaagacctgcccctccacggttccttgtggtcgctgccattgtgggtcggccatcttgaattctctcttccaaccattcttgggctggctgg

SEQ ID NO: 295006 - DNA, 1458 bp, Artificial Sequence
  derived and/or modified sequence
atgctgttcagctaccagagaagcctgcccagacagcccgtgcccagcgtgcaggacaccgtgagaaagtacctggagagcgtgagacccatcctgagcgacgaggacttcgactggaccgccgtgctggcccaggagttcctgagactgcaggccagcctgctgcagtggtacctgagactgaagagctggtgggccagcaactacgtgagcgactggtgggaggagttcgtgtacctgagaagcagaaaccccctgatggtgaacagcaactactacatgatggacttcctgtacgtgacccccacccccctgcaggccgccagagccggcaacgccgtgcacgccctgctgctgtacagacacagactgaacagacaggagatcccccccgtgagaggcccccagtgggtgagagacggcggcgtggtgctgtggcccctgggccacgtgggccccggcagacagctgaccgcccacggcttcctgcagaccctgctgatgggcatgagacccctgtgcagcgcccagtacgagaagatcttcaacaccaccagaatccccggcgtgcagaaggactacatcagacacctgcacgacagccagcacgtggccgtgttccacagaggcagattcttcagaatgggcacccacagcagaaacagcctgctgagccccagagccctggagcagcagttccagagaatcctggacgaccccagccccgcctgcccccacgaggagcacctggccgccctgaccgccgcccccagaggcacctgggcccaggtgagaaccagcctgaagacccaggccgccgaggccctggaggccgtggagggcgccgccttcttcgtgagcctggacgccgagcccgccggcctgaccagagaggaccccgccgccagcctggacgcctacgcccacgccctgctggccggcagaggccacgacagatggttcgacaagagcttcaccctgatcgtgttcagcaacggcaagctgggcctgagcgtggagcacagctgggccgactgccccatcagcggccacatgtgggagttcaccctggccaccgagtgcttccagctgggctacagcaccgacggccactgcaagggccaccccgaccccaccctgccccagccccagagactgcagtgggacctgcccgaccagatccacagcagcatcagcctggccctgagaggcgccaagatcctgagcgagaacgtggactgccacgtggtgcccttcagcctgttcggcaagagcttcatcagaagatgccacctgagcagcgacagcttcatccagatcgccctgcagctggcccacttcagagtgagctgggtgccccacccccagcccccccagggcctgagcccccccgagccccccagacccgccccccccagattcctggtggtggccgccatcgtgggcagacccagctag

SEQ ID NO: 295007 - protein, 994 aa, Artificial Sequence
  derived and/or modified sequence
MAASFFSDFGLMWYLEELKKEEFRKFKEHLKQMTLQLELKQIPWTEVKKASREELANLLIKHYEEQQAWNITLRIFQKMDRKDLCMKVMRERTGYTKTYQAHAKQKFSRLWSSKSVTEIHLYFEEEVKQEECDHLDRLFAPKEAGKQPRTVIIQGPQGIGKTTLLMKLMMAWSDNKIFRDRFLYTFYFCCRELRELPPTSLADLISREWPDPAAPITEIVSQPERLLFVIDSFEELQGGLNEPDSDLCGDLMEKRPVQVLLSSLLRKKMLPEASLLIAIKPVCPKELRDQVTISEIYQPRGFNESDRLVYFCCFFKDPKRAMEAFNLVRESEQLFSICQIPLLCWILCTSLKQEMQKGKDLALTCQSTTSVYSSFVFNLFTPEGAEGPTPQTQHQLKALCSLAAEGMWTDTFEFCEDDLRRNGVVDADIPALLGTKILLKYGERESSYVFLHVCIQEFCAALFYLLKSHLDHPHPAVRCVQELLVANFEKARRAHWIFLGCFLTGLLNKKEQEKLDAFFGFQLSQEIKQQIHQCLKSLGERGNPQGQVDSLAIFYCLFEMQDPAFVKQAVNLLQEANFHIIDNVDLVVSAYCLKYCSSLRKLCFSVQNVFKKEDEHSSTSDYSLICWHHICSVLTTSGHLRELQVQDSTLSESTFVTWCNQLRHPSCRLQKLGINNVSFSGQSVLLFEVLFYQPDLKYLSFTLTKLSRDDIRSLCDALNYPAGNVKELALVNCHLSPIDCEVLAGLLTNNKKLTYLNVSCNQLDTGVPLLCEALCSPDTVLVYLMLAFCHLSEQCCEYISEMLLRNKSVRYLDLSANVLKDEGLKTLCEALKHPDCCLDSLCLVKCFITAAGCEDLASALISNQNLKILQIGCNEIGDVGVQLLCRALTHTDCRLEILGLEECGLTSTCCKDLASVLTCSKTLQQLNLTLNTLDHTGVVVLCEALRHPECALQVLGLRKTDFDEETQALLTAEEERNPNLTITDDCDTITRVEI

SEQ ID NO: 295008 - DNA, 3672 bp, Artificial Sequence
  derived and/or modified sequence
gtgctgggctgttcgtctcttctatgtgctgatttcctgggttactttgggtcttccttttctttctcccttttaccctgtctcctttcttgaggctgatcgatcacagccaggcctctccattctatttacccagcgttttccttctctccagttagtggggtagatgaacgccctgtgtttataaggtgcctcccaggagcctgagacctgtgagaagaatggggggtggaggtgggggagactcgtcacgaagggagaccttggagcttcgagggtgggaatgttcttattagattcttcatctctgttgacacaaacatgtaggagaagctggagaacatagacagggatgaggttttatttatttattgttcctggtcactgtctctttgaggattggtatctctgctccagaaaagatggcagcctctttcttctctgattttggtcttatgtggtatctggaggagctcaaaaaggaggagttcaggaaatttaaagaacatctcaagcaaatgactttgcagcttgaactcaagcagattccctggactgaggtcaaaaaagcatcccgggaagaacttgcaaacctcttgatcaagcactatgaagaacaacaagcttggaacataaccttaagaatctttcaaaagatggatagaaaggatctctgcatgaaggtcatgagggagagaacaggatacacaaagacctatcaagctcacgcaaagcagaaattcagccgcttatggtccagcaagtctgtcactgagattcacctatactttgaggaggaagtcaagcaagaagaatgtgaccatttggaccgcctttttgctcccaaggaagctgggaaacagccacgtacagtgatcattcaaggaccacaaggaattggaaaaacgacactcctgatgaagctgatgatggcctggtcggacaacaagatctttcgggataggttcctgtacacgttctatttctgctgcagagaactgagggagttgccgccaacgagtttggctgacttgatttccagagagtggcctgaccccgctgctcctataacagagatcgtgtctcaaccggagagactcttgttcgtcatcgacagcttcgaagagctgcagggcggcttgaacgaacccgattcggatctgtgtggtgacttgatggagaaacggccggtgcaggtgcttctgagcagtttgctgaggaagaagatgctcccggaggcctccctgctcatcgctatcaaacccgtgtgcccgaaggagctccgggatcaggtgacgatctcagaaatctaccagccccggggattcaacgagagtgataggttagtgtatttctgctgtttcttcaaagacccgaaaagagccatggaagccttcaatcttgtaagagaaagtgaacagctgttttccatatgccaaatcccgctcctctgctggatcctgtgtaccagtctgaagcaagagatgcagaaaggaaaagacctggccctgacctgccagagcactacctctgtgtactcctctttcgtctttaacctgttcacacctgagggtgccgagggcccgactccgcaaacccagcaccagctgaaggccctgtgctccctggctgcagagggtatgtggacagacacatttgagttttgtgaagacgacctccggagaaatggggttgttgacgctgacatccctgcgctgctgggcaccaagatacttctgaagtacggggagcgtgagagctcctacgtgttcctccacgtgtgtatccaggagttctgtgccgccttgttctatttgctcaagagccaccttgatcatcctcacccagctgtgagatgtgtacaggaattgctagttgccaattttgaaaaagcaaggagagcacattggatttttttggggtgttttctaactggccttttaaataaaaaggaacaagaaaaactggatgcgttttttggcttccaactgtcccaagagataaagcagcaaattcaccagtgcctgaagagcttaggggagcgtggcaatcctcagggacaggtggattccttggcgatattttactgtctctttgaaatgcaggatcctgcctttgtgaagcaggcagtgaacctcctccaagaagctaactttcatattattgacaacgtggacttggtggtttctgcctactgcttaaaatactgctccagcttgaggaaactctgtttttccgttcaaaatgtctttaagaaagaggatgaacacagctctacgtcggattacagcctcatctgttggcatcacatctgctctgtgctcaccaccagcgggcacctcagagagctccaggtgcaggacagcaccctcagcgagtcgacctttgtgacctggtgtaaccagctgaggcatcccagctgtcgccttcagaagcttggaataaataacgtttccttttctggccagagtgttctgctctttgaggtgctcttttatcagccagacttgaaatacctgagcttcaccctcacgaaactctctcgtgatgacatcaggtccctctgtgatgccttgaactacccagcaggcaacgtcaaagagctagcgctggtaaattgtcacctctcacccattgattgtgaagtccttgctggccttctaaccaacaacaagaagctgacgtatctgaatgtatcctgcaaccagttagacacaggcgtgccccttttgtgtgaagccctgtgcagcccagacacggtcctggtatacctgatgttggctttctgccacctcagcgagcagtgctgcgaatacatctctgaaatgcttctgcgtaacaagagcgtgcgctatctagacctcagtgccaatgtcctgaaggacgaaggactgaaaactctctgcgaggccttgaaacatccggactgctgcctggattcactgtgtttggtaaaatgttttatcactgctgctggctgtgaagacctcgcctctgctctcatcagcaatcaaaacctgaagattctgcaaattgggtgcaatgaaatcggagatgtgggtgtgcagctgttgtgtcgggctctgacgcatacggattgccgcttagagattcttgggttggaagaatgtgggttaacgagcacctgctgtaaggatctcgcgtctgttctcacctgcagtaagaccctgcagcagctcaacctgaccttgaacaccttggaccacacaggggtggttgtactctgtgaggccctgagacacccagagtgtgccctgcaggtgctcgggctgagaaaaactgattttgatgaggaaacccaggcacttctgacggctgaggaagagagaaatcctaacctgaccatcacagacgactgtgacacaatcacaagggtagagatctgattgcgaggaacctgggctctgactcgaacacctgcaaaggacagggactgggaccgttacttacatgacactgcacccaggagatacaaatcattgatactctgagttgtgagatttctggcaccccattcatagatttgatatgatacacgtggtttttatgtgctctgtggccttggatgagtcactgaaaggccttcatggtctctcggtctcacaaggacctcttaacccctcaataaagtgttacatttctaaacattgg

SEQ ID NO: 295009 - protein, 517 aa, Artificial Sequence
  derived and/or modified sequence
MSLGSELFRDVAIVFSQEEWQWLAPAQRDLYRDVMLETYSNLVSLGLAVSKPDVISFLEQGKEPWMVERVVSGGLCPVLESRYDTKELFPKQHVYEVESPQWEIMESLTSYGLECSSFQDDWECRNQFDRQQGNPDRHFHQMIIRHEEMPTFDQHASLTFYQKIHTREKPFGYNKCRKDFWQKELLINHQGIYTNEKPYKCKECGKAFKYGSRLIQHENIHSGKKPYECKECGKAFNSGSNFIQHQRVHTGEKPYECKDCEKAFSRSSQLIEHQRTHTGEKPYQCKECGKAFNRISHLKVHYRIHTGEKPYACKECGKTFSHRSQLIQHQTVHTGRKLYECKECGKAFNQGSTLIRHQRIHTGEKPYECKVCGKAFRVSSQLKQHQRIHTGEKPYQCKVCGRAFKRVSHLTVHYRIHTGEKPYECKECGKAFSHCSQLIHHQVIHTEKKPYEYKECEKTLSHDSTTVQPQRMHNRETHVNIINVEKPSISSYPLLIIREFMLASNHMNGSNGESPLA

SEQ ID NO: 295010 - DNA, 2297 bp, Artificial Sequence
  derived and/or modified sequence
caccggtaccgtggtggaagcgcgccctgggctgccgggggcgcggccgcggtggcacttggacccgaggaggcggcagctctaccgtcgcaggactctgcccttccccaagagaggaaccagaaggaggacctatcagcccttgaaattctaaaagtcatgtcccttgggtcagaattgttcagggatgtggccatagtcttctcccaagaagaatggcagtggttggcacctgctcagagggatttgtacagagacgtgatgttggagacctacagcaacctggtctcactgggtcttgccgtttccaaacctgatgtgatctccttcctagagcaaggcaaagagccctggatggtggagagagtggtgtctggaggcctgtgtccagtattggagtccagatatgataccaaggaattatttccaaagcagcatgtttatgaagtcgaatcaccccaatgggagataatggaaagccttacaagttatggtcttgagtgttcaagtttccaagatgattgggaatgcagaaaccagtttgacagacaacagggaaatccagacagacatttccatcagatgatcatcagacatgaagaaatgcccacttttgaccagcatgcatcccttactttttatcagaaaattcatactagagaaaaaccttttgggtataataaatgtagaaaagacttctggcaaaaggaactccttattaatcatcaaggaatttatactaatgagaaaccctataaatgtaaggaatgtgggaaggcctttaaatatggctcacgactaattcaacatgagaatattcattctggtaagaaaccatatgaatgtaaggaatgtggaaaggccttcaattctggttcaaattttatacaacatcagagagttcatactggtgagaaaccgtatgaatgtaaagattgtgagaaggcctttagtcgaagctcacagttgattgaacatcagcgaactcacacaggcgagaaaccctatcagtgtaaggaatgtggcaaggccttcaatcggatctcacatcttaaagtacattatagaattcatactggtgaaaaaccctatgcatgcaaggaatgtgggaaaacctttagtcatcgttctcagttgattcaacatcagactgttcatactggcaggaaactctatgaatgtaaggaatgtgggaaggcttttaatcaaggctcaactcttatacgacatcagagaattcataccggtgagaaaccctatgagtgcaaagtatgtggaaaggcctttagagtgagctcacaactcaagcaacatcagagaattcacactggagagaaaccctaccaatgtaaggtatgtggtagggccttcaaacgggtctcacatcttactgtacattacagaattcatacaggtgaaaagccatatgaatgtaaggaatgtgggaaggcttttagtcattgctcacaattgattcatcatcaggttattcacactgagaaaaagccctatgaatataaggaatgtgagaagaccttgagtcatgattcaactaccgttcaacctcagagaatgcataatagagaaacacatgtgaatataataaatgtagaaaagccttccatcagcagttaccccttactaatcatcagagaatttatgttggcaagcaaccatatgaatggaagtaatggggaaagcccattagcctaggctaattgtgactgtgacttacttctccctcttggagaaagacttgaagaatgtaatgccagtgacaatgccttcattcagaggtaagcctttatcctaagtctgaaaattcatatcaaagaaaattttatggatgtaaattgttcagatcataattgtcaaaaatgctgggaaaggttgggagaaattttatttctaacacattccagaaccacattttctaaccacagtgtagtaattttatcaagagcaaaagttatagttttcttacaagttaaaaaaacagccagattatcatttgcttaacaaagaaatcatgcaattaccataaatggtaatgaaaagaatgaattgagagtttaacatgccaagagatgtgaaatgtggccaaagagatgtgagggtaaggggaaagccaaagctacactggaggaatttttatagcctttgaatgcatgcatatacatgaaaatctgaaagataaactcatatgcactaaacatgctattcaagtctaccaaacatccaggcagtgaaagaagaaagtaacagaaaatgatgaaataaagagaccatcttacaat

SEQ ID NO: 295011 - protein, 686 aa, Artificial Sequence
  derived and/or modified sequence
MTESQGTVTFKDVAIDFTQEEWKRLDPAQRKLYRNVMLENYNNLITVGYPFTKPDVIFKLEQEEEPWVMEEEVLRRHWQGEIWGVDEHQKNQDRLLRQVEVKFQKTLTEEKGNECQKKFANVFPLNSDFFPSRHNLYEYDLFGKCLEHNFDCHNNVKCLMRKEHCEYNEPVKSYGNSSSHFVITPFKCNHCGKGFNQTLDLIRHLRIHTGEKPYECSNCRKAFSHKEKLIKHYKIHSREQSYKCNECGKAFIKMSNLIRHQRIHTGEKPYACKECEKSFSQKSNLIDHEKIHTGEKPYECNECGKAFSQKQSLIAHQKVHTGEKPYACNECGKAFPRIASLALHMRSHTGEKPYKCDKCGKAFSQFSMLIIHVRIHTGEKPYECNECGKAFSQSSALTVHMRSHTGEKPYECKECRKAFSHKKNFITHQKIHTREKPYECNECGKAFIQMSNLVRHQRIHTGEKPYICKECGKAFSQKSNLIAHEKIHSGEKPYECNECGKAFSQKQNFITHQKVHTGEKPYDCNECGKAFSQIASLTLHLRSHTGEKPYECDKCGKAFSQCSLLNLHMRSHTGEKPYVCNECGKAFSQRTSLIVHMRGHTGEKPYECNKCGKAFSQSSSLTIHIRGHTGEKPFDCSKCGKAFSQISSLTLHMRKHTGEKPYHCIECGKAFSQKSHLVRHQRIHTH

SEQ ID NO: 295012 - protein, 342 aa, Artificial Sequence
  derived and/or modified sequence
MRSHTGEKPYKCDKCGKAFSQFSMLIIHVRIHTGEKPYECNECGKAFSQSSALTVHMRSHTGEKPYECKECRKAFSHKKNFITHQKIHTREKPYECNECGKAFIQMSNLVRHQRIHTGEKPYICKECGKAFSQKSNLIAHEKIHSGEKPYECNECGKAFSQKQNFITHQKVHTGEKPYDCNECGKAFSQIASLTLHLRSHTGEKPYECDKCGKAFSQCSLLNLHMRSHTGEKPYVCNECGKAFSQRTSLIVHMRGHTGEKPYECNKCGKAFSQSSSLTIHIRGHTGEKPFDCSKCGKAFSQISSLTLHMRKHTGEKPYHCIECGKAFSQKSHLVRHQRIHTH

SEQ ID NO: 295013 - protein, 527 aa, Artificial Sequence
  derived and/or modified sequence
MRKEHCEYNEPVKSYGNSSSHFVITPFKCNHCGKGFNQTLDLIRHLRIHTGEKPYECSNCRKAFSHKEKLIKHYKIHSREQSYKCNECGKAFIKMSNLIRHQRIHTGEKPYACKECEKSFSQKSNLIDHEKIHTGEKPYECNECGKAFSQKQSLIAHQKVHTGEKPYACNECGKAFPRIASLALHMRSHTGEKPYKCDKCGKAFSQFSMLIIHVRIHTGEKPYECNECGKAFSQSSALTVHMRSHTGEKPYECKECRKAFSHKKNFITHQKIHTREKPYECNECGKAFIQMSNLVRHQRIHTGEKPYICKECGKAFSQKSNLIAHEKIHSGEKPYECNECGKAFSQKQNFITHQKVHTGEKPYDCNECGKAFSQIASLTLHLRSHTGEKPYECDKCGKAFSQCSLLNLHMRSHTGEKPYVCNECGKAFSQRTSLIVHMRGHTGEKPYECNKCGKAFSQSSSLTIHIRGHTGEKPFDCSKCGKAFSQISSLTLHMRKHTGEKPYHCIECGKAFSQKSHLVRHQRIHTH

SEQ ID NO: 295014 - DNA, 4056 bp, Artificial Sequence
  derived and/or modified sequence
gcagcggaacgattcgattcttctcagcaccaagttgcgctcccaatctctcagagctgggctcgcgggaggccgctcgtgcaaaacctaggctgagctcccctgcgcggagctgtgagccctggaacaccgtggtctgcttctcaggacgcgcaaacagtgaagccagtcccgcccgggtgagccgcgggggcctctgggaagcgtcgcccctggtgtaacggaccgagacttgtggcgctctcagccaccgacagcgccggcctcagtgccgcctctgtcccagcccgcgccggctctgccactttggcagcgttaagtgtggaatcggggcctgtgtccgcgggcttggtgagttcttcatatattaaggattcattcattcatagactcatttattgaaggctgtctgtgtaacaggcacaatcctaggtgcttgggatatagcagtgaacaagagacaaaccccctactatcatggtacttacatttttgtgggctggataataaacaagctctacttctgcaggccccatcccttcccagaaagaagaggaaatgactgagtcccagggaacagtaacattcaaagatgtggctatcgacttcactcaggaggagtggaagagattggatcctgctcagagaaaactgtaccggaatgtgatgctagaaaactataacaacttaatcacagtaggctatccgttcaccaaacctgatgtgattttcaaattggagcaagaagaagaaccatgggtgatggaggaagaagtattaaggagacactggcaaggagaaatatggggagttgatgagcatcagaaaaaccaggacagacttttgagacaagttgaagttaaattccagaaaacactgactgaagaaaaaggcaatgaatgtcaaaagaaatttgcaaatgtatttcctctgaactctgattttttcccttccagacacaatctctatgagtatgacttatttggaaagtgtttagaacataattttgactgtcataataatgtgaaatgccttatgagaaaggagcattgtgaatataatgaacctgtgaaatcatatggtaatagctcatcccattttgtcattaccccctttaagtgtaatcattgtggaaaaggcttcaatcagactttggacctcatcagacatctgagaattcatactggagagaagccctatgaatgtagtaactgtagaaaagccttcagtcacaaggaaaaacttattaaacattataaaattcacagtagggagcagtcttacaaatgtaatgaatgtggtaaagctttcattaaaatgtcaaatctcattagacatcaaagaattcatactggagagaagccctatgcatgtaaggaatgtgagaagtccttcagccagaaatcaaatcttattgatcatgaaaaaattcatactggagagaaaccttatgaatgtaatgagtgtggaaaagcattcagccagaagcaaagcctcattgcacatcagaaagttcatactggggagaaaccttatgcatgtaatgaatgtggtaaagccttccctcgaattgcatcccttgctcttcatatgagaagtcatacaggagaaaaaccttataaatgtgataaatgtggtaaagccttctctcagttttccatgcttattatacatgttagaattcatacaggtgaaaaaccctatgaatgtaatgagtgtggaaaagccttctctcaaagctcagcccttactgtacatatgagaagtcacactggtgagaaaccctatgaatgtaaggaatgcagaaaagccttcagccacaagaaaaacttcattacacaccagaaaattcatactagagagaaaccttatgagtgtaatgaatgtgggaaagcttttatacagatgtcaaatcttgttagacaccagagaattcatactggggaaaaaccctatatatgtaaggaatgtgggaaagcctttagccagaaatcaaatctcattgctcatgaaaaaattcattctggagagaaaccctatgaatgcaatgaatgtggtaaagccttcagccaaaagcaaaacttcattacacatcaaaaagttcatactggagagaaaccttatgattgtaatgaatgtggtaaagccttctctcaaattgcatcccttacccttcatttgagaagtcatacaggggaaaagccttatgaatgtgataaatgtggtaaagccttctctcagtgctcactgcttaatttacatatgagaagtcacacaggtgagaagccctatgtatgtaatgaatgtgggaaagccttctctcaaagaacttcccttattgtgcacatgagaggccatacaggtgaaaaaccctatgaatgtaataaatgtggaaaagccttctcccaaagctcatcccttactatacatatacgaggacatacaggtgagaaacccttcgactgtagtaaatgtggaaaagccttctctcaaatctcatctcttacccttcatatgagaaaacatacaggtgagaagccctatcactgtattgagtgtggcaaggctttcagccaaaagtcgcaccttgttagacaccagagaattcatactcattagaaaccctatgaatattgtgaatatggcaaggccatctgaaggaattaacacctcattgcacattacatgatcacttccagagtagaaaactatgaatgtgggatagccttctgaaaaagccacaaatttatgaaacattagagaattcttccaaggtgacaaattatataatgaaaaagctgttaccagaaactttcagcagacatcttattgataatatttaatcagcattctcattgaaatctgaaacaaggtatcttccatcagcataacaacacaacacttgagctcctagccaatgtattaagtaaggaaaacaagtatcaacgaagaactataaaaataacttttatacaagaaataattagaaaatgtgttgatagaaaacctaagaataaacacaacaatgagttaggtctttatcaagttataaaatatgttgaaaggcacaaaagaacacctgaaaaatgatattttgtctgaaaagacttgacattgtaaaaatataatttctctcccaaatcactaagtttaatatacttctgaagtttacatcagttttattttaaggaacttcacaaacttatccaaaaattttatgtggaaaagtaaagaaacacaaatagctgaaacaaacttgacaaagcaagtagagaagacacactctattattagatatatcatgtacttatttaaagctgctgtcatttaaacaatgtattaccaagtgaataaatcaagcagtagtaagatagtgagcattcatacaaaaatccaagaagatacaggaattctgtgtatgacagtgctattgaaatcactggggaatgaatggcttatttaataaatggaaggttcataggagaaaaattttagctttctactttatatcatatacaaaaataaaatccaactaaagaccagaatataaaaagcaaaattttaaaactatgatgaaagtagaatccgttactttagggtaacaagatttctttaaaaaacatgtaaacatggaatagtctgttgaattttggtgtattggcctcacaggcacccacaaatgtacacaaagagatatatatcactgtgttcctgaatcatggtttgtattgcccaaaattggatataacaaatttttatcaattgtggaatagatgaataagtgtgatcatttctgtgataaaatacagaatttagaaacaaaatctacctatagttatatggatagattacaatatataatattgagagaaaaaattaaaatgcacaaaggaacacagtataacatttgtataatttaataagatcttgcaaagaacagtactgtgtattggtcatggatccatatatgacttggttgccttttgggatgtgggaaaggtttggtgggagttgttatatttatctgtaatatttctttaataaaagagtgaaagc

SEQ ID NO: 295015 - protein, 431 aa, Artificial Sequence
  derived and/or modified sequence
MMRQRQSHYCSVLFLSVNYLGGTFPGDICSEENQIVSSYASKVCFEIEEDYKNRQFLGPEGNVDVELIDKSTNRYSVWFPTAGWYLWSATGLGFLVRDEVTVTIAFGSWSQHLALDLQHHEQWLVGGPLFDVTAEPEEAVAEIHLPHFISLQGEVDVSWFLVAHFKNEGMVLEHPARVEPFYAVLESPSFSLMGILLRIASGTRLSIPITSNTLIYYHPHPEDIKFHLYLVPSDALLTKAIDDEEDRFHGVRLQTSPPMEPLNFGSSYIVSNSANLKVMPKELKLSYRSPGEIQHFSKFYAGQMKEPIQLEITEKRHGTLVWDTEVKPVDLQLVAASAPPPFSGAAFVKENHRQLQARMGDLKGVLDDLQDNEVLTENEKELVEQEKTRQSKNEALLSMVEKKGDLALDVLFRSISERDPYLVSYLRQQNL

SEQ ID NO: 295016 - DNA, 1296 bp, Artificial Sequence
  derived and/or modified sequence
atgatgcggcagcgccagagtcactactgttcagtgctgttcctgtctgttaattatctgggaggcacctttcctggcgatatctgttccgaagaaaatcagatagtgagctcttatgcctctaaggtgtgtttcgaaattgaggaggattataagaatagacagtttctcggcccagagggaaacgtggatgtggaactgatcgataagagcacgaataggtactcagtatggtttcccactgccggctggtatttgtggtctgcaaccggattgggctttttggtgagagacgaggttacagtcaccatcgctttcggctcctggtcccagcatcttgcccttgatctgcagcatcatgaacagtggctggtgggggggcccttgtttgacgtgaccgccgaacccgaagaggccgtagctgaaattcacctgccacattttatttcgctgcagggagaagtcgacgtctcatggttcctcgttgcacactttaagaatgaggggatggtattagaacaccctgctcgtgtggaacctttctacgctgtgctggaatccccctccttctctctgatgggtatcctgctacggatagcctctggcacccggctgtcaattcccattactagcaataccctcatatactaccatcctcaccccgaggacattaaatttcacctgtaccttgtccctagtgatgcccttctgacgaaagccatcgacgatgaggaagaccgctttcacggcgtccgacttcagacatctccccccatggagccactgaacttcggatcttcctatatcgtcagcaacagcgcaaacctcaaagtcatgccgaaagaactcaaactatcctatcgctcacctggagaaatccagcacttctccaagttctatgcagggcagatgaaagaaccaattcaacttgagatcactgaaaagcggcatggcacgctcgtttgggatacagaggtgaagcccgtggacttacagctggtggctgctagcgcgccgccacctttcagcggcgcagctttcgttaaagagaatcacaggcaattgcaagcgaggatgggagatctgaaaggagttctggatgaccttcaagataatgaggtgctgaccgagaacgagaaggaactcgtggagcaggaaaaaacccgccaatccaaaaatgaagcactgctgagcatggttgagaagaagggcgacctggccctggacgtactattccggtccatctcagagcgagatccatatttggtgtcataccttaggcagcagaacctctag

SEQ ID NO: 295017 - DNA, 1296 bp, Artificial Sequence
  derived and/or modified sequence
atgatgaggcagaggcagagccactactgcagcgtgctcttcctgtctgtgaactacctgggcggcaccttccctggggacatctgcagcgaggagaaccagatcgtgagcagctatgccagcaaggtgtgctttgaaattgaggaggactacaagaaccggcagttcctgggccctgagggcaatgtggatgtggagctgattgacaagagcaccaaccgctacagcgtgtggttccccacagctggctggtacctgtggagcgccaccggcctgggcttcctggtgagagatgaggtgacagtgaccatcgccttcggctcctggagccagcacctggccctggacctgcagcaccacgagcagtggctggtgggcggccccctgtttgatgtgacagctgagcctgaggaggccgtggccgagatccacctgccccacttcatcagcctgcagggcgaggtggatgtgtcctggttcctggtggcccacttcaagaatgaaggcatggtgctggagcacccagcccgggtggagcccttctatgctgtgctggagagccccagcttcagcctgatgggcatcctgctgagaattgccagcggcacccggctgagcatccccatcaccagcaacaccctcatctactaccacccccaccctgaggacatcaagttccacctgtacctggtgcccagtgatgccctgctgaccaaggccattgatgatgaagaagatcgcttccatggagtgcggctgcagaccagcccccccatggagcccctgaactttggcagcagctacatcgtgagcaacagcgccaacctgaaggtgatgcccaaggagctgaagctgagctaccgcagccctggagagatccagcacttcagcaagttctacgccggccagatgaaggagcccatccagctggagatcacagagaagagacatggcaccctggtgtgggacacagaggtgaagcctgtggacctgcagctggtggccgccagcgcccccccacccttctctggagctgcctttgtgaaggagaaccaccggcagctgcaggccaggatgggagacctgaagggcgtgctggatgacctgcaggacaatgaggtgctgacagaaaatgagaaggagctggtggagcaggagaagacccggcagagcaagaatgaggccctgctgtccatggtggagaagaagggggacctggccctggatgtgctcttccgcagcatcagcgagcgggacccctacctggtgtcctacctgcggcagcagaacctgtag

SEQ ID NO: 295018 - DNA, 1296 bp, Artificial Sequence
  derived and/or modified sequence
atgatgcggcagcggcagagccactactgcagcgtgctgttcctgtctgtcaactatttaggcgggacattccccggagacatttgttcggaggaaaaccagattgtgagctcctatgctagcaaagtgtgcttcgagattgaagaagactacaaaaatcgacaattcctgggcccagagggcaatgttgatgtcgaactgattgacaagtccactaatcggtattccgtgtggttccctactgcagggtggtatctttggagcgccaccggtctgggctttctcgtgagggacgaagtgacggtgacgatcgcatttggaagctggtcccagcatctggccctcgacctgcagcaccatgaacaatggttagtagggggaccattattcgacgttactgctgagcccgaggaagctgttgcagaaatccatttgcctcacttcattagcctgcagggggaagtggacgtgtcatggttcctggttgcacacttcaagaacgagggtatggtactggagcaccctgctcgcgtggagcctttctacgcagtgctagaatcccccagctttagtctgatgggaattctgctgaggatagcctctgggacccggcttagtatacctataacttctaacactctcatttattatcacccacaccctgaagacattaagtttcatctctacctcgttccctcggatgcgttactcacgaaagctatcgacgacgaggaagataggtttcatggggtgagactgcagacaagccctccaatggaaccccttaatttcggctcctcatacatagttagtaattccgccaacctcaaggttatgccaaaggagctcaaactctcctaccggtcacctggcgagatacagcatttcagcaagttctatgccggacaaatgaaagagcccatccagctggaaattacggagaaaagacatgggacactggtttgggacactgaggtgaagcccgtagacctgcagctggttgctgcctctgccccccctcccttcagcggggccgccttcgtcaaggagaatcatagacagcttcaggcccgaatgggcgaccttaaaggggtcctggatgatctccaggacaacgaggtcctgaccgaaaacgagaaagagttggtggaacaggaaaaaaccagacagtctaagaatgaggccctgctatcaatggtcgaaaaaaagggggatctcgccctcgatgtgctgttcaggtccatttccgaacgagatccttatctggttagctatctgagacagcaaaatctgtag

SEQ ID NO: 295019 - DNA, 1296 bp, Artificial Sequence
  derived and/or modified sequence
atgatgaggcagagacagtcacactactgttccgtgttgttcttgtcggtgaactacctcggtggaacatttcctggcgatatttgctccgaggagaaccagattgttagctcctatgcatcaaaggtttgtttcgaaatcgaggaggattataaaaatagacaatttctcggtcccgagggaaatgtggatgtcgagctgatcgacaagagcacaaaccgatattcagtttggtttcccaccgcaggttggtatctgtggagtgccactggcctgggctttctggtgagggacgaggtgacagtaaccattgcttttggctcatggagccaacacctcgcattagatctgcaacaccatgagcagtggctagtcgggggtcctctcttcgacgtgactgctgaacctgaggaggccgtcgccgagattcacctcccgcactttatcagcttgcagggagaggtggacgtctcatggtttctggttgcccatttcaaaaacgagggcatggtcctggagcacccagctcgagttgagcctttttacgctgtcctggagtctcctagctttagcctcatgggcattcttctgaggattgcatctggcacacgactttccatacctattacctcaaacactttaatctattatcaccctcacccagaggacatcaaattccacctatatctcgttccaagtgatgctctgctcaccaaagctatcgacgatgaagaagaccgatttcacggggtcagacttcaaaccagtccgccaatggaacccctgaattttggctcatcctatattgtctcaaattctgccaatctgaaggtcatgccaaaagaattgaagctgtcataccgcagtccaggagagatccagcatttttcaaagttttacgcaggccagatgaaagagcctatacaactggagatcacagaaaagcgtcatggcactttggtttgggatacagaggtgaaacctgtagatctacagctcgttgccgctagcgctcccccaccgttctctggggcagccttcgtgaaggaaaatcataggcagctgcaggcgagaatgggggacctgaaaggcgttctggacgacctgcaagacaacgaagtgctgaccgaaaacgagaaagaactggtggagcaggaaaaaacgcgccaatctaagaacgaggctctcctgtccatggtcgagaagaaaggggatctggccctggatgtgctgtttaggtctatttctgagagagacccctatctagtttcgtacttgaggcagcagaatctgtag

SEQ ID NO: 295020 - DNA, 1296 bp, Artificial Sequence
  derived and/or modified sequence
atgatgagacagagacagagccactactgcagcgtgctgttcctgagcgtgaactacctgggcggcaccttccccggcgacatctgcagcgaggagaaccagatcgtgagcagctacgccagcaaggtgtgcttcgagatcgaggaggactacaagaacagacagttcctgggccccgagggcaacgtggacgtggagctgatcgacaagagcaccaacagatacagcgtgtggttccccaccgccggctggtacctgtggagcgccaccggcctgggcttcctggtgagagacgaggtgaccgtgaccatcgccttcggcagctggagccagcacctggccctggacctgcagcaccacgagcagtggctggtgggcggccccctgttcgacgtgaccgccgagcccgaggaggccgtggccgagatccacctgccccacttcatcagcctgcagggcgaggtggacgtgagctggttcctggtggcccacttcaagaacgagggcatggtgctggagcaccccgccagagtggagcccttctacgccgtgctggagagccccagcttcagcctgatgggcatcctgctgagaatcgccagcggcaccagactgagcatccccatcaccagcaacaccctgatctactaccacccccaccccgaggacatcaagttccacctgtacctggtgcccagcgacgccctgctgaccaaggccatcgacgacgaggaggacagattccacggcgtgagactgcagaccagcccccccatggagcccctgaacttcggcagcagctacatcgtgagcaacagcgccaacctgaaggtgatgcccaaggagctgaagctgagctacagaagccccggcgagatccagcacttcagcaagttctacgccggccagatgaaggagcccatccagctggagatcaccgagaagagacacggcaccctggtgtgggacaccgaggtgaagcccgtggacctgcagctggtggccgccagcgcccccccccccttcagcggcgccgccttcgtgaaggagaaccacagacagctgcaggccagaatgggcgacctgaagggcgtgctggacgacctgcaggacaacgaggtgctgaccgagaacgagaaggagctggtggagcaggagaagaccagacagagcaagaacgaggccctgctgagcatggtggagaagaagggcgacctggccctggacgtgctgttcagaagcatcagcgagagagacccctacctggtgagctacctgagacagcagaacctgtag

SEQ ID NO: 295021 - DNA, 480 bp, Artificial Sequence
  derived and/or modified sequence
atggagcaggactggcagcctggagaggaggtgaccccaggccctgagccctgcagcaagggccaggcccccctgtaccccatcgtgcacgtgacagagctgaagcacacagaccccaacttccccagcaacagcaatgctgtgggcaccagcagcggctggaacagaattggaacaggctgcagccacacctgggactggaggttcagctgcacccagcaggccctgctgcccctgctgggcgcctgggagtggagcattgacacagaagctgggggcggcagaagagagcagagccagaagccctgcagcaatggaggccctgctgctgctggggagggccgggtgctgcccagcccctgcttcccctggagcacctgccaggccgccatccacaaggtgtgccgctggcagggctgcaccaggcctgccctgctggcccccagcctggccaccctgaaggagcacagctacccctag

SEQ ID NO: 295022 - protein, 351 aa, Artificial Sequence
  derived and/or modified sequence
METNFSTPLNEYEEVSYESAGYTVLRILPLVVLGVTFVLGVLGNGLVIWVAGFRMTRTVTTICYLNLALADFSFTATLPFLIVSMAMGEKWPFGWFLCKLIHIVVDINLFGSVFLIGFIALDRCICVLHPVWAQNHRTVSLAMKVIVGPWILALVLTLPVFLFLTTVTIPNGDTYCTFNFASWGGTPEERLKVAITMLTARGIIRFVIGFSLPMSIVAICYGLIAAKIHKKGMIKSSRPLRVLTAVVASFFICWFPFQLVALLGTVWLKEMLFYGKYKIIDILVNPTSSLAFFNSCLNPMLYVFVGQDFRERLIHSLPTSLERALSEDSAPTNDTAANSASPPAETELQAM

SEQ ID NO: 295023 - DNA, 2164 bp, Artificial Sequence
  derived and/or modified sequence
gaaggaagggctggacattcagattccttgacccttgacatttggaagcatgaactccagtctctcacagaaggctagaggtgaaggaacattcagacacattggtttctaagaagagtccgctgacaacatacccaaggtgtcttctgaaaattataagaaatcctgagtttctgttaggggattggctccagctccattgtccctcccccatcattcagtagtctccgcgaaagcccttagagccggtgttgctccacaggaagccaagaagcacacaggaaaaggagcttagctgctggtgctgctggcaagatggaaaccaacttctccactcctctgaatgaatatgaagaagtgtcctatgagtctgctggctacactgttctgcggatcctcccattggtggtgcttggggtcacctttgtcctcggggtcctgggcaatgggcttgtgatctgggtggctggattccggatgacacgcacagtcaccaccatctgttacctgaacctggccctggctgacttttctttcacggccacattaccattcctcattgtctccatggccatgggagaaaaatggccttttggctggttcctgtgtaagttaattcacatcgtggtggacatcaacctctttggaagtgtcttcttgattggtttcattgcactggaccgctgcatttgtgtcctgcatccagtctgggcccagaaccaccgcactgtgagtctggccatgaaggtgatcgtcggaccttggattcttgctctagtccttaccttgccagttttcctctttttgactacagtaactattccaaatggggacacatactgtactttcaactttgcatcctggggtggcacccctgaggagaggctgaaggtggccattaccatgctgacagccagagggattatccggtttgtcattggctttagcttgccgatgtccattgttgccatctgctatgggctcattgcagccaagatccacaaaaagggcatgattaaatccagccgtcccttacgggtcctcactgctgtggtggcttctttcttcatctgttggtttccctttcaactggttgcccttctgggcaccgtctggctcaaagagatgttgttctatggcaagtacaaaatcattgacatcctggttaacccaacgagctccctggccttcttcaacagctgcctcaaccccatgctttacgtctttgtgggccaagacttccgagagagactgatccactccctgcccaccagtctggagagggccctgtctgaggactcagccccaactaatgacacggctgccaattctgcttcacctcctgcagagactgagttacaggcaatgtgaggatggggtcagggatattttgagttctgttcatcctaccctaatgccagttccagcttcatctacccttgagtcatattgaggcattcaaggatgcacagctcaagtatttattcaggaaaaatgcttttgtgtccctgatttggggctaagaaatagacagtcaggctactaaaatattagtgttattttttgttttttgacttctgcctataccctggggtaagtggagttgggaaatacaagaagagaaagaccagtggggatttgtaagacttagatgagatagcgcataataaggggaagactttaaagtataaagtaaaatgtttgctgtaggttttttatagctattaaaaaaaatcagattatggaagttttcttctatttttagtttgctaagagttttctgtttctttttcttacatcatgagtggactttgcattttatcaaatgcattttctacatgtattaagatggtcatattattcttcttcttttatgtaaatcattataaataatgttcattaagttctgaatgttaaactactcttgaattcctggaataaaccacacttagtcctgatgtactttaaatatttatatctcacaggagttggttagaatttctgtgtttatgtttatatactgttatttcactttttctactatccttgctaagttttcatagaaaataaggaacaaagagaaacttgtaatggtctctgaaaaggaattgagaagtaattcctctgattctgttttctggtgttatatctttattaaatattc

SEQ ID NO: 295024 - DNA, 2621 bp, Artificial Sequence
  derived and/or modified sequence
ggaccaggaacaacctatttgcaaagttggcgcaaacattcctgcctgacaggaccatggacacaggttgtagagatagagatggctctggctgtgcattcagcagattctgtagatagaattaataggacttggatgggattgtggtgagagaaagtgaaatgaaagataagttctagtttggaagttttaacaactgaatgtttaaactcaaatagacacaaaatattggaagagtggcaggtttgggaggatgagacaatcaactgtttggttgagccacgttaggtttgaaatgtctacgggactcccgtggggagaggttatatcagactggagcaccagagagaggccaaggctgatagtttagatgaaaagagagcatgatattttaagccctgagactggataatatcacctatagaaagactatatagagataagagaggtggggaacaagtaaaagctgcgggacactcctaaatttagagtcaaatttagagcagaaaatactagcaaaggggactgaaaagcggtggccaattgagcttcaaatgcaagtgaaagtgtgttgtgtgtacatttatcatctcatggcacaggaaaaacgtgatttaaggagaaggaagcgatccaatgggaagaagagatccaatggatcctctatcacgaagatattgagataagaaccaatatggatttgcacccactgcatttgcagccttgaggtcataagcatcctcaggaaaatgcaccaggtgctgctggcaagatggaaaccaacttctccactcctctgaatgaatatgaagaagtgtcctatgagtctgctggctacactgttctgcggatcctcccattggtggtgcttggggtcacctttgtcctcggggtcctgggcaatgggcttgtgatctgggtggctggattccggatgacacgcacagtcaccaccatctgttacctgaacctggccctggctgacttttctttcacggccacattaccattcctcattgtctccatggccatgggagaaaaatggccttttggctggttcctgtgtaagttaattcacatcgtggtggacatcaacctctttggaagtgtcttcttgattggtttcattgcactggaccgctgcatttgtgtcctgcatccagtctgggcccagaaccaccgcactgtgagtctggccatgaaggtgatcgtcggaccttggattcttgctctagtccttaccttgccagttttcctctttttgactacagtaactattccaaatggggacacatactgtactttcaactttgcatcctggggtggcacccctgaggagaggctgaaggtggccattaccatgctgacagccagagggattatccggtttgtcattggctttagcttgccgatgtccattgttgccatctgctatgggctcattgcagccaagatccacaaaaagggcatgattaaatccagccgtcccttacgggtcctcactgctgtggtggcttctttcttcatctgttggtttccctttcaactggttgcccttctgggcaccgtctggctcaaagagatgttgttctatggcaagtacaaaatcattgacatcctggttaacccaacgagctccctggccttcttcaacagctgcctcaaccccatgctttacgtctttgtgggccaagacttccgagagagactgatccactccctgcccaccagtctggagagggccctgtctgaggactcagccccaactaatgacacggctgccaattctgcttcacctcctgcagagactgagttacaggcaatgtgaggatggggtcagggatattttgagttctgttcatcctaccctaatgccagttccagcttcatctacccttgagtcatattgaggcattcaaggatgcacagctcaagtatttattcaggaaaaatgcttttgtgtccctgatttggggctaagaaatagacagtcaggctactaaaatattagtgttattttttgttttttgacttctgcctataccctggggtaagtggagttgggaaatacaagaagagaaagaccagtggggatttgtaagacttagatgagatagcgcataataaggggaagactttaaagtataaagtaaaatgtttgctgtaggttttttatagctattaaaaaaaatcagattatggaagttttcttctatttttagtttgctaagagttttctgtttctttttcttacatcatgagtggactttgcattttatcaaatgcattttctacatgtattaagatggtcatattattcttcttcttttatgtaaatcattataaataatgttcattaagttctgaatgttaaactactcttgaattcctggaataaaccacacttagtcctgatgtactttaaatatttatatctcacaggagttggttagaatttctgtgtttatgtttatatactgttatttcactttttctactatccttgctaagttttcatagaaaataaggaacaaagagaaacttgtaatggtctctgaaaaggaattgagaagtaattcctctgattctgttttctggtgttatatctttattaaatattc

SEQ ID NO: 295025 - DNA, 1056 bp, Artificial Sequence
  derived and/or modified sequence
atggaaacaaatttctccacacccctcaatgagtacgaggaggtgtcgtatgaaagtgctggctatacagtactgcgaattttacccctcgtagtgctgggtgtgacctttgtgctgggggtcctcggaaatggactagttatatgggtggcaggatttaggatgacaagaactgtgaccaccatctgctacttgaatctcgcgctcgccgacttttccttcacggccacattgccattcctgatcgtctctatggccatgggtgagaagtggccatttggctggttcctttgtaagctgattcatattgtcgtggacatcaatctgttcggctcagtgttcttgatcggattcatcgctttagaccgatgcatttgcgttctgcatcctgtctgggcacagaaccatcgcaccgtgagccttgctatgaaggtgatcgtgggtccatggatcctcgcacttgttctgactctgcctgttttcttgttcctgactacagtgaccatcccgaacggagacacttactgcacctttaattttgctagctggggcgggacccccgaagagcgccttaaggtcgcgattaccatgctcaccgcgcggggaataatccgtttcgttatcggattctctttaccaatgagcattgtggctatatgctacggcttaattgccgctaaaatccacaagaagggcatgatcaaaagttccaggcctctcagagtgttgaccgcagttgttgctagcttcttcatctgctggttccccttccagctcgtggccctattaggcaccgtgtggcttaaggagatgctattctacggaaagtataagattattgacatccttgtcaaccccacctccagtctagcattcttcaacagctgccttaaccctatgctgtacgtcttcgttggtcaggattttcgcgagcggttgattcactccctgcctacatcactggaacgagcgttgagcgaggactcagcacctacaaatgatacagccgcgaactctgccagtcccccggcggagactgagttacaggctatgtag

SEQ ID NO: 295026 - DNA, 1056 bp, Artificial Sequence
  derived and/or modified sequence
atggagacaaatttctcaaccccactcaatgaatatgaggaagtcagctacgagagcgcgggctacaccgtcctcagaatcctgccgctggtcgttctgggcgtgacattcgtgctcggggttttggggaacggtctggtaatctgggtggcaggttttcgcatgacccggacagtcactacaatttgttatctaaatcttgctctggctgacttttcatttacagcgacactgccttttctaattgtatccatggcgatgggcgaaaaatggcccttcggctggttcctgtgtaagctcattcacattgtggtcgatatcaatctgtttggatccgtcttcctgattggtttcatagccctggataggtgcatttgcgtgctacatcccgtttgggctcaaaaccaccgtaccgtgtccttggcaatgaaggtgatcgtcggcccatggatcctggctcttgtccttaccctgcccgtcttcctcttcctcaccaccgtcacaattcccaatggagacacctattgtacttttaactttgcatcctggggcggaacgccagaagaacggctgaaggtggccatcacaatgctcactgcgcggggaataatccggtttgtgattggcttctccctccccatgagtatcgtggccatctgttacggcttgattgccgccaagatccataagaaagggatgatcaaaagctcccgtcctctccgcgttctgaccgccgtggtcgccagtttttttatctgctggttccctttccagttggttgcactgctgggcactgtctggttgaaggaaatgttgttttacggcaaatacaaaatcatcgacatcctcgtcaacccaactagctctttagctttttttaacagctgcctgaaccccatgttgtacgtattcgtgggccaggacttcagggaaaggctgattcactcccttccaacctccctggaacgtgctcttagtgaggattctgcccctacgaatgataccgctgcaaattccgcctctcctcctgccgaaaccgaactccaggcaatgtag

SEQ ID NO: 295027 - DNA, 1056 bp, Artificial Sequence
  derived and/or modified sequence
atggagaccaacttcagcacccccctgaatgaatatgaggaggtgtcctatgaatctgctggctacacagtgctgcgcatcctgcccctggtggtgctgggcgtgacctttgtgctgggcgtgctgggcaatggcctggtgatctgggtggccggcttcaggatgaccaggacagtgaccaccatctgctacctgaacctggccctggccgacttctccttcaccgccaccctgcccttcctgattgtgtccatggccatgggagagaagtggcccttcggctggttcctgtgcaagctgatccacatcgtggtggacatcaacctgtttggcagcgtcttcctgattggcttcatcgccctggaccgctgcatctgtgtgctgcaccctgtgtgggcccagaaccacaggacagtgtccctggccatgaaggtgattgtgggcccctggatcctggccctggtgctgaccctgcctgtgttcctgttcctgaccaccgtgaccatccccaatggagacacctactgcaccttcaactttgcctcctggggcggcaccccagaggagcggctgaaggtggccatcaccatgctgacagcccggggcatcatccgcttcgtcatcggcttcagcctgcccatgagcatcgtggccatctgctacggcctgattgctgccaagatccacaagaagggcatgatcaagagcagccggcccctgcgggtgctgacagctgtggtggccagcttcttcatctgctggttccccttccagctggtggccctgctgggcaccgtgtggctgaaggagatgctgttctacggcaagtacaagatcatcgacatcctggtgaaccccaccagcagcctggccttcttcaacagctgcctgaaccccatgctgtatgtgtttgtgggccaggacttccgggagcggctcatccacagcctgcccaccagcctggagcgggccctgtctgaagattctgcccccaccaatgacacagctgccaacagcgccagccccccagctgagacagagctgcaggccatgtag

SEQ ID NO: 295028 - DNA, 1056 bp, Artificial Sequence
  derived and/or modified sequence
atggagaccaacttcagcacccccctgaacgagtacgaggaggtgagctacgagtccgcagggtacactgttctccgtatcctaccgttggttgtgttgggcgtgacttttgtgttgggtgtccttgggaatgggttagtgatttgggtcgctggctttcgaatgacaagaacagtcaccaccatctgctatctcaacctggccttagcagacttttcgtttaccgccactctgcctttcctcattgtgtccatggctatgggagaaaagtggccatttgggtggttcctttgtaagctgatccacattgtggtagacataaacttattcggtagtgtttttttaataggctttattgcactggacagatgcatttgcgtactgcaccccgtgtgggcccaaaatcaccggacagtgagcctggctatgaaggtaattgtgggcccctggatcttggccttggtccttacacttccagtgttcctgtttctcaccaccgtgaccatccctaacggagatacctactgcacttttaacttcgcctcatgggggggaacccccgaggaaagattaaaggtggcgattacgatgctgactgccagagggattattagattcgtgatagggtttagcttgcctatgtcaatagtggccatttgctatggattgattgcagctaagattcataagaaggggatgattaagtcaagccggcctttacgggtcctaactgccgtcgtagcctcttttttcatatgttggttcccattccaacttgtcgccctgttaggtaccgtttggctgaaggaaatgctgttctatgggaagtacaaaattatcgatatcttagttaatcctacgtcgagtttagcttttttcaattcttgcctcaaccctatgctgtatgttttcgtcggtcaggactttcgcgaacgtctcattcatagtctgcctacatctttggaacgggccttgtccgaggattctgccccaactaatgacactgcggccaatagcgccagcccacctgccgaaaccgaactgcaagctatgtag

SEQ ID NO: 295029 - DNA, 1056 bp, Artificial Sequence
  derived and/or modified sequence
atggagaccaacttcagcacccccctgaacgagtacgaggaggtgtcctatgaatctgccggatataccgtgttgcgaatcttgcctctggtggtgctgggagtcactttcgtcctgggcgtgctcggaaacggtttggtcatttgggtcgccgggttccgaatgactcgcactgtcacgacaatttgctatctcaacttggcactggcggacttcagcttcacagccacccttccctttttgatcgtgtccatggcgatgggcgaaaagtggcctttcggctggtttctttgtaaactaatacacatagtggtggatatcaacctgttcggatctgttttcctgattggatttatcgccctcgacagatgcatttgtgtgctgcacccagtgtgggcacagaatcacaggacagtgagtctggctatgaaggtcattgtgggaccatggattctggcactcgttctgaccctgcctgtgtttctctttcttactacagtgaccattccgaacggtgatacttactgcactttcaacttcgctagctggggcggaactccggaagagcggctgaaggttgctataaccatgcttactgccagggggataattaggttcgttattggattttctctgccaatgtctatcgttgcaatttgttacggcctgatcgccgctaagatccacaagaagggaatgattaaaagctcacgacctcttcgcgtactgaccgcagtagtggctagcttctttatttgttggttcccattccagctggtcgctctgctagggactgtgtggttgaaagagatgctgttctatgggaagtacaagattatcgatatcctggtcaatcccacatcaagtctggcattttttaactcatgtttaaaccccatgctgtatgtgttcgttggccaagatttccgcgagcgcttaattcattcccttcctacctcactggagagagcgctgagcgaggactctgcaccgaccaatgacaccgccgctaattctgcttctcccccggcagaaactgaacttcaggcaatgtag

SEQ ID NO: 295030 - DNA, 1056 bp, Artificial Sequence
  derived and/or modified sequence
atggagacaaactttagcacccccttaaatgaatatgaagaagtgagctacgagagtgcaggctatacagtgttgcgaatactgcccctggtagttctcggcgtgacttttgttttaggtgtgctgggaaatggactggtcatctgggtggccggtttcaggatgacaagaaccgttacaactatatgctacctcaatttggccctcgcagacttctccttcactgccacattgcccttcctaatcgtttcaatggccatgggggaaaaatggccttttggatggtttctgtgcaagctgatccatattgtcgtggacatcaatctgttcggatcagttttcctgataggctttatagctctggatagatgcatttgtgttctgcacccagtgtgggcacaaaatcatcgcaccgtttccctggcgatgaaagtgatcgttggtccatggattctcgctcttgtactcaccctgcctgtgttcctgtttttaacaacggtgaccatcccgaacggggacacctattgcaccttcaatttcgcctcttgggggggaacacctgaggaaagactgaaagtcgcgattacaatgttgactgccagggggattattcggtttgtgattggcttctcgcttccgatgtccatcgtcgcaatctgctacggcctcatcgccgctaagatccataaaaaagggatgataaagtcctctagaccgctgcgcgtactcacggctgtcgtggccagtttttttatctgctggtttccgttccaactagtggctttgctggggaccgtctggttaaaggagatgttattctacggaaagtataagatcatagacatcttggtgaacccgacaagtagcctcgccttttttaattcctgtctgaatcccatgctttatgtgttcgtgggtcaagactttcgggagcgactgattcattcacttcctaccagcttagagcgtgcgctcagtgaagactccgcgcctactaatgacacggccgctaacagtgcttccccacctgcagaaaccgagttacaggcaatgtag

SEQ ID NO: 295031 - DNA, 1056 bp, Artificial Sequence
  derived and/or modified sequence
atggaaactaacttctccacacctcttaacgagtacgaggaagtaagctacgagtccgccggatataccgtgcttcgtattctgcccctggtggtgttaggagtcacattcgtgcttggcgtcttgggaaatggcctggtcatctgggtcgctggattcagaatgacccggacagtcactaccatctgctatttaaatctggcgcttgccgacttttcttttaccgccacgcttccattcttaatagtgtcgatggccatgggggagaagtggccattcgggtggttcttgtgcaagctgattcatattgttgtagatattaaccttttcggttctgtgttcttaatcggattcatcgccctggatagatgcatttgtgtactacatccagtatgggctcagaatcacaggacagtgtcgctggctatgaaggttatagtgggcccttggattctcgcacttgttcttacgctacccgtgttcctcttcttaaccaccgtaacaattccgaatggtgatacatattgcacctttaactttgccagctggggcggtacccccgaggaacggctcaaggtggcaataactatgcttaccgcccgaggaatcattcggttcgtgattgggttcagtctgccaatgagtattgtggccatctgctatggcctgattgccgcaaaaatccacaagaagggaatgataaagtcatctagacccttgcgggtgctgaccgccgttgtagcaagctttttcatttgttggttcccatttcagcttgtagcactgctcgggactgtgtggctgaaagagatgttgttttatggcaaatacaagatcatagatattctcgtcaatccaacgagcagcctggcattctttaacagctgcctaaacccgatgttgtatgtcttcgtggggcaagacttcagggagcggctgatccactctctgcctacttctttggagagggcgctcagcgaagacagcgccccaaccaacgacacagcagctaactccgcctcaccaccggctgagacagagctccaagctatgtag

SEQ ID NO: 295032 - DNA, 1056 bp, Artificial Sequence
  derived and/or modified sequence
atggagaccaacttcagcacccccctgaacgagtacgaggaggtgagctacgagagcgccggctacaccgtgctgagaatcctgcccctggtggtgctgggcgtgaccttcgtgctgggcgtgctgggcaacggcctggtgatctgggtggccggcttcagaatgaccagaaccgtgaccaccatctgctacctgaacctggccctggccgacttcagcttcaccgccaccctgcccttcctgatcgtgagcatggccatgggcgagaagtggcccttcggctggttcctgtgcaagctgatccacatcgtggtggacatcaacctgttcggcagcgtgttcctgatcggcttcatcgccctggacagatgcatctgcgtgctgcaccccgtgtgggcccagaaccacagaaccgtgagcctggccatgaaggtgatcgtgggcccctggatcctggccctggtgctgaccctgcccgtgttcctgttcctgaccaccgtgaccatccccaacggcgacacctactgcaccttcaacttcgccagctggggcggcacccccgaggagagactgaaggtggccatcaccatgctgaccgccagaggcatcatcagattcgtgatcggcttcagcctgcccatgagcatcgtggccatctgctacggcctgatcgccgccaagatccacaagaagggcatgatcaagagcagcagacccctgagagtgctgaccgccgtggtggccagcttcttcatctgctggttccccttccagctggtggccctgctgggcaccgtgtggctgaaggagatgctgttctacggcaagtacaagatcatcgacatcctggtgaaccccaccagcagcctggccttcttcaacagctgcctgaaccccatgctgtacgtgttcgtgggccaggacttcagagagagactgatccacagcctgcccaccagcctggagagagccctgagcgaggacagcgcccccaccaacgacaccgccgccaacagcgccagcccccccgccgagaccgagctgcaggccatgtag

SEQ ID NO: 295033 - protein, 365 aa, Artificial Sequence
  derived and/or modified sequence
MWLRSHRQLCLAFLLVCVLSVIFFLHIHQDSFPHGLGLSILCPDRRLVTPPVAIFCLPGTAMGPNASSSCPQHPASLSGTWTVYPNGRFGNQMGQYATLLALAQLNGRRAFILPAMHAALAPVFRITLPVLAPEVDSRTPWRELQLHDWMSEEYADLRDPFLKLSGFPCSWTFFHHLREQIRREFTLHDHLREEAQSVLGQLRLGRTGDRPRTFVGVHVRRGDYLQVMPQRWKGVVGDSAYLRQAMDWFRARHEAPVFVVTSNGMEWCKENIDTSQGDVTFAGDGQEATPWKDFALLTQCNHTIMTIGTFGFWAAYLAGGDTVYLANFTLPDSEFLKIFKPEAAFLPEWVGINADLSPLWTLAKP

SEQ ID NO: 295034 - protein, 355 aa, Artificial Sequence
  derived and/or modified sequence
MWLRSHRQLCLAFLLVCVLSVIFFLHIHQDSFPHGLGLSILCPDRRLVTPPVAIFCLPGTAMGPNASSSCPQHPASLSGTWTVYPNGRFGNQMGQYATLLALAQLNGRRAFILPAMHAALAPPEVDSRTPWRELQLHDWMSEEYADLRDPFLKLSGFPCSWTFFHHLREQIRREFTLHDHLREEAQSVLGQLRLGRTGDRPRTFVGVHVRRGDYLQVMPQRWKGVVGDSAYLRQAMDWFRARHEAPVFVVTSNGMEWCKENIDTSQGDVTFAGDGQEATPWKDFALLTQCNHTIMTIGTFGFWAAYLAGGDTVYLANFTLPDSEFLKIFKPEAAFLPEWVGINADLSPLWTLAKP

SEQ ID NO: 295035 - DNA, 4246 bp, Artificial Sequence
  derived and/or modified sequence
gaaagtccctgactggagttggcagccaagccaggccctggagtgggcacccagagggaagacaggttggctaatttcctggagcccctaagggtgcaagggggaagaacacccacccgcaaagccccgtagggctggaccctacgttagcctgccctgctcggggttggcgatgctggaggtgggccttggaccagagaaaatgctttaattaggtgacaagcgggcagaggcctttgtctctggcgccggcagccacggcccccgctgacggcgtgggaaacagaccctgttccactccggtctccagccttggaatggttgccttcgtgcagtgcaggaggacgcggcagagggcggacgatcgctccactcgccgggaccaggtgcgggggccctgcccagccgctggggcgtggccaggctcgaagcacccaggtgtcgggggccgactctaagccctggcaccggaagagagagggcggcggattggacctcccggctccagcattgcaactgggcgctccgtctcctggtccacgcaatgatgctgcggctgctcagaagccaggtagcctgccctgggtgaagccttcgcgcaggtcaatgacggggcggaggggcagggcgcggtcccctgcatccccgatctggggagcggtgggcccaggggccatcgccttagcccctggcgctggggctcggcgccaagtgacgggcggggctccaccttccagccatccgcccggcccgggagggcggacgctgcgagactcccggccgcgccctctccttcctctcctccccaagccctcgctgccagtccggacaggctgcgcggaggggagggctgccgggccggatagccggacgcctggcgttccaggggcggccggatgtggcctgcctttgcggagggtgcgctccggccacgaaaagcggactgtggatctgccacctgcaagcagctcggccatgtggctccggagccatcgtcagctctgcctggccttcctgctagtctgtgtcctctctgtaatcttcttcctccatatccatcaagacagctttccacatggcctaggcctgtcgatcctgtgtccagaccgccgcctggtgacacccccagtggccatcttctgcctgccgggtactgcgatgggccccaacgcctcctcttcctgtccccagcaccctgcttccctctccggcacctggactgtctaccccaatggccggtttggtaatcagatgggacagtatgccacgctgctggctctggcccagctcaacggccgccgggcctttatcctgcctgccatgcatgccgccctggccccggtattccgcatcaccctgcccgtgctggccccagaagtggacagccgcacgccgtggcgggagctgcagcttcacgactggatgtcggaggagtacgcggacttgagagatcctttcctgaagctctctggcttcccctgctcttggactttcttccaccatctccgggaacagatccgcagagagttcaccctgcacgaccaccttcgggaagaggcgcagagtgtgctgggtcagctccgcctgggccgcacaggggaccgcccgcgcacctttgtcggcgtccacgtgcgccgtggggactatctgcaggttatgcctcagcgctggaagggtgtggtgggcgacagcgcctacctccggcaggccatggactggttccgggcacggcacgaagcccccgttttcgtggtcaccagcaacggcatggagtggtgtaaagaaaacatcgacacctcccagggcgatgtgacgtttgctggcgatggacaggaggctacaccgtggaaagactttgccctgctcacacagtgcaaccacaccattatgaccattggcaccttcggcttctgggctgcctacctggctggcggagacactgtctacctggccaacttcaccctgccagactctgagttcctgaagatctttaagccggaggcggccttcctgcccgagtgggtgggcattaatgcagacttgtctccactctggacattggctaagccttgagagccagggagactttctgaagtagcctgatctttctagagccagcagtacgtggcttcagaggcctggcatcttctggagaagcttgtggtgttcctgaagcaaatgggtgcccgtatccagagtgattctagttgggagagttggagagaagggggacgtttctggaactgtctgaatattctagaactagcaaaacatcttttcctgatggctggcaggcagttctagaagccacagtgcccacctgctcttcccagcccatatctacagtacttccagatggctgcccccaggaatggggaactctccctctggtctactctagaagaggggttacttctcccctgggtcctccaaagactgaaggagcatatgattgctccagagcaagcattcaccaagtccccttctgtgtttctggagtgattctagagggagacttgttctagagaggaccaggtttgatgcctgtgaagaaccctgcagggcccttatggacaggatggggttctggaaatccagataactaaggtgaagaatctttttagttttttttttttttttttggagacagggtctcgctctgttgcccaggctggagtgcagtggcgtgatcttggctcactgcaacttccgcctcctgtgttcaagcgattctcctgtctcagcctcctgagtagatgggactacaggcacaggccattatgcctggctaatttttgtatttttagtagagacagggtttcaccatgttggccaggatggtctcgatctcctgaccttgtcatccacctgtcttggcctcccaaagtgctgggattactggcatgagccactgtgcccagcccggatattttttttttaattatttatttatttatttatttattgagacggagtcttgctctgtagcccaggccagagtgcagtggcgcgatctcagctcactgcaagctctgcctcccgggttcatgccattctgcctcagcctcctgagtagctgggactacaggcgcccgccaccacgcccggctaattttttttgtatttttagtagagacggggtttcatcgtgttaaccaggatggtctcgatctcctgacctcgtgatctgcccacctcggcctcccacagtgctgggattaccggcgtgagccaccatgcctggcccggataattttttttaatttttgtagagacgaggtcttgtgatattgcccaggctgttcttcaactcctgggctcaagcagtcctcccaccttggcctcccagaatgctgggtttatagatgtgagccagcacaccgggccaagtgaagaatctaatgaatgtgcaacctaattgtagcatctaatgaatgttccaccattgctggaaaaattgagatggaaaacaaaccatctctagttggccagcgtcttgctctgttcacagtctctggaaaagctggggtagttggtgagcagagcgggactctgtccaacaagccccacagcccctcaaagacttttttttgtttgttttgagcagacaggctaaaatgtgaacgtggggtgagggatcactgccaaaatggtacagcttctggagcagaactttccagggatccagggacacttttttttaaagctcataaactgccaagagctccatatattgggtgtgagttcaggttgcctctcacaatgaaggaagttggtctttgtctgcaggtgggctgctgagggtctgggatctgttttctggaagtgtgcaggtataaacacaccctctgtgcttgtgacaaactggcaggtaccgtgctcattgctaaccactgtctgtccctgaactcccagaaccactacatctggctttgggcaggtctgagataaaacgatctaaaggtaggcagaccctggacccagcctcagatccaggcaggagcacgaggtctggccaaggtggacggggttgtcgagatctcaggagccccttgctgttttttggagggtgaaagaagaaaccttaaacatagtcagctctgatcacatcccctgtctactcatccagaccccatgcctgtaggcttatcagggagttacagttacaattgttacagtactgttcccaactcagctgccacgggtgagagagcaggaggtatgaattaaaagtctacagcactaa

SEQ ID NO: 295036 - DNA, 582 bp, Artificial Sequence
  derived and/or modified sequence
atggctagggcccgtcaggagggcagttctccggaacccgtcgagggtctggctagggacggccctcgtcctttcccactagggaggttggttccatccgccgtcagttgcgggctgtgtgagcctggcctggccgctgccccagccgcaccaacattactgcctgctgcttacctatgtgcgcctacagcaccccctgctgtgaccgctgccctgggtggctccagatggccgggtgggcccaggagcaggcctcgaggcccacggcccgatggccctcagcccagcctgagcctggctgagcagcatttagagtctccagttccgagcgcccccggagcgctcgcaggggggccaacgcaggcggctcccggggttcgcggcgaggaagagcagtgggcgagagaaataggtgcccagttacgccggatggcagacgacctgaacgcccaatacgagaggcggaggcaggaggagcaacagcgccaccggccctcgccttggcgagtgttgtacaatcttatcatgggtttgctgccattgccaaggggtcatagagcccccgagatggagccaaactag

SEQ ID NO: 295037 - DNA, 582 bp, Artificial Sequence
  derived and/or modified sequence
atggcccgggcccggcaggagggcagcagccctgagcctgtggagggcctggccagagatggcccccggcccttccccctgggccgcctggtgcccagcgctgtgtcctgtggcctgtgtgagcccggcctggccgccgccccagctgcccccaccctgctgcctgctgcctacctgtgtgcccccacagcccctcctgctgtgacagctgccctgggcggcagccgctggccaggcggccccaggagccggccccggggccccaggccagatggcccccagcccagcctgagcctggccgagcagcacctggagagccctgtgcccagcgcccctggggccctggccggcggccccacccaggccgcccctggggtgcggggggaggaggagcagtgggcccgggagattggagcccagctgcggaggatggctgatgacctgaatgcccagtatgaaagaagacggcaggaggagcagcagaggcaccggcccagcccctggagggtgctgtacaacctgatcatgggcctgctgcccctgccccggggccaccgggcccctgagatggagcccaactag

SEQ ID NO: 295038 - DNA, 582 bp, Artificial Sequence
  derived and/or modified sequence
atggcccgggcccggcaggagggcagcagccccgagcccgtggagggacttgcgagggacgggccccgaccatttccgctgggccggcttgtgcccagcgccgtttcgtgcggtctctgcgagccgggcctggcagcggcccccgccgctccaaccttattgccggcggcgtacttgtgcgccccaacagcgccccctgctgtcactgcagcccttggaggatcacgctggcccgggggccctcgttcgcgcccacgcggtccgcgacccgatggcccacagccaagcctcagcctcgcagagcagcatcttgaatctccagttcctagtgcccccggtgctctggccgggggccccacacaagctgcacctggcgtgcggggcgaagaagaacagtgggctagggagattggggctcagctccgaaggatggcggacgatctgaatgcccaatacgaacgtcgcagacaagaggagcaacagcggcacaggccctccccctggcgtgtattgtacaatcttatcatgggcctcctcccactccctagaggccatagagccccagagatggagcccaactag

SEQ ID NO: 295039 - DNA, 582 bp, Artificial Sequence
  derived and/or modified sequence
atggcaagggcacgacaagagggctcctcccccgaaccagtcgagggcttggcgcgagacgggcctcgtccttttcccctaggaaggctagtcccttccgccgtctcgtgtggtctatgtgaaccgggactggccgcagcccctgcagctcctaccctgctacccgcagcctatctgtgtgccccaacagcgccacctgctgtgacggccgctcttggcggatccaggtggcccggtggcccaagatcgcgccctagagggccaagaccggacggccctcagccttcactgagcttagccgagcagcacctagagagtccagtgccttctgcacccggagccctcgctgggggacccacacaggctgcaccaggggtgcgaggcgaggaagagcagtgggcacgggagatcggtgctcaacttcggcgaatggccgacgacttgaatgcccagtatgagcgacggcgtcaggaagagcagcagcggcatagaccaagcccctggagagttctgtataatctaattatgggcttactgcctctcccccgtggccacagggctccggaaatggaaccgaattag

SEQ ID NO: 295040 - DNA, 582 bp, Artificial Sequence
  derived and/or modified sequence
atggccagagccagacaggagggcagcagccccgagcccgtggagggcctggccagagacggccccagacccttccccctgggcagactggtgcccagcgccgtgagctgcggcctgtgcgagcccggcctggccgccgcccccgccgcccccaccctgctgcccgccgcctacctgtgcgcccccaccgccccccccgccgtgaccgccgccctgggcggcagcagatggcccggcggccccagaagcagacccagaggccccagacccgacggcccccagcccagcctgagcctggccgagcagcacctggagagccccgtgcccagcgcccccggcgccctggccggcggccccacccaggccgcccccggcgtgagaggcgaggaggagcagtgggccagagagatcggcgcccagctgagaagaatggccgacgacctgaacgcccagtacgagagaagaagacaggaggagcagcagagacacagacccagcccctggagagtgctgtacaacctgatcatgggcctgctgcccctgcccagaggccacagagcccccgagatggagcccaactag

SEQ ID NO: 295041 - DNA, 168 bp, Artificial Sequence
  derived and/or modified sequence
atggtgcagtctgcctccgtatctaaagccggaaaaggctcttcatcctcacacggggtggctgccgctctaaatcaggacctggatcccgacccaaagtgccacgtcttcaacgttagcagccagagatgtcaaatgggttcggcccagccctgtctctgttgctag

SEQ ID NO: 295042 - DNA, 1677 bp, Artificial Sequence
  derived and/or modified sequence
atggcagctctcacaagggatcctcaatttcagaaactgcagcagtggtaccgcgagcaccggagtgagcttaacttgagacgactgttcgacgcaaataaggatcgtttcaaccatttctcgctgaccctgaatactaaccatggccacatcctggtggactatagcaaaaacctagttactgaagatgtgatgagaatgctcgtggacctggcaaaaagccgcggggtggaggctgcccgggagcggatgtttaatggcgagaagatcaactacactgaaggaagggctgttcttcatgtcgccttgaggaatcggagcaacacccccattttagttgatggcaaagacgtcatgccagaagtgaataaagttctggataagatgaaaagtttctgtcagcgggtgcgatctggcgactggaaggggtacactggcaaaaccataacagatgtaatcaatatcggaattggcggctcagacctcggacctcttatggtaacagaagctttgaagccttattccagtggtggaccaagggtgtggtatgtatcaaatatcgatgggacccatattgctaagactctcgctcagttgaacccagagagctccctgttcatcatcgcgtctaaaacgtttaccactcaggagaccatcacgaatgcagagacagctaaagagtggttcctccaggctgcgaaggacccatctgccgtagccaagcatttcgtggccttgagtaccaacacaacaaaagtcaaggagtttggaatcgatccgcagaatatgtttgagttctgggattgggtaggcggaaggtattccctctggtctgcgataggcctttcaatagcactgcacgtgggcttcgacaatttcgaacagctgctgagtggcgcccactggatggatcagcactttcgaaccactccccttgaaaagaatgccccggtcctgctcgccctcctagggatctggtacataaactgttttggctgcgagactcacgcgatgctcccatatgatcaatacctgcatagatttgctgcttattttcagcaaggagacatggagtccaacggaaagtacattaccaagagtgggactagggtggaccaccaaaccggcccaattgtatggggagagcccggaacaaacggacaacacgctttctatcagctgatccatcagggaaccaaaatgatcccctgtgactttttgattcccgtgcagacacaacatccgattcgaaagggcctgcatcataaaatactcttggcaaacttcctggcccagactgaagccctcatgcggggcaagtccactgaggaggcacgtaaagaactgcaggcagcagggaaatcccccgaggatctcgaaaggttgctgccccacaaagtttttgaagggaacaggcccaccaatagcatcgtgtttactaagttaactccttttatgctgggcgccttggtcgcaatgtacgaacataagatttttgtacaggggatcatttgggatattaacagtttcgaccaatggggagtggagctgggtaagcaacttgccaaaaagattgaaccagagctcgacggttccgcccaggttaccagtcatgacgcaagcactaatggcctgattaatttcattaagcagcagcgcgaggcccgggtgcagtag

SEQ ID NO: 295043 - DNA, 4194 bp, Artificial Sequence
  derived and/or modified sequence
aggggtggggccgggccgggccgggccgggcgcctgcgccataaaggccgccgcgcgcccacgcgcctcgcttgctgcgcgctgccggcgctccttcctcctcggctcgcgtctcactcagtgtaccttctagtcccgccatggccgctctcacccgggacccccagttccagaagctgcagcaatggtaccgcgagcaccgctccgagctgaacctgcgccgcctcttcgatgccaacaaggaccgcttcaaccacttcagcttgaccctcaacaccaaccatgggcatatcctggtggattactccaagaacctggtgacggaggacgtgatgcggatgctggtggacttggccaagtccaggggcgtggaggccgcccgggagcggatgttcaatggtgagaagatcaactacaccgagggtcgagccgtgctgcacgtggctctgcggaaccggtcaaacacacccatcctggtagacggcaaggatgtgatgccagaggtcaacaaggttctggacaagatgaagtctttctgccagcgtgtccggagcggtgactggaaggggtacacaggcaagaccatcacggacgtcatcaacattggcattggcggctccgacctgggacccctcatggtgactgaagcccttaagccatactcttcaggaggtccccgcgtctggtatgtctccaacattgatggaactcacattgccaaaaccctggcccagctgaaccccgagtcctccctgttcatcattgcctccaagacctttactacccaggagaccatcacgaatgcagagacggcgaaggagtggtttctccaggcggccaaggatccttctgcagtggcgaagcactttgttgccctgtctactaacacaaccaaagtgaaggagtttggaattgaccctcaaaacatgttcgagttctgggattgggtgggaggacgctactcgctgtggtcggccatcggactctccattgccctgcacgtgggttttgacaacttcgagcagctgctctcgggggctcactggatggaccagcacttccgcacgacgcccctggagaagaacgcccccgtcttgctggccctgctgggtatctggtacatcaactgctttgggtgtgagacacacgccatgctgccctatgaccagtacctgcaccgctttgctgcgtacttccagcagggcgacatggagtccaatgggaaatacatcaccaaatctggaacccgtgtggaccaccagacaggccccattgtgtggggggagccagggaccaatggccagcatgctttttaccagctcatccaccaaggcaccaagatgataccctgtgacttcctcatcccggtccagacccagcaccccatacggaagggtctgcatcacaagatcctcctggccaacttcttggcccagacagaggccctgatgaggggaaaatcgacggaggaggcccgaaaggagctccaggctgcgggcaagagtccagaggaccttgagaggctgctgccacataaggtctttgaaggaaatcgcccaaccaactctattgtgttcaccaagctcacaccattcatgcttggagccttggtcgccatgtatgagcacaagatcttcgttcagggcatcatctgggacatcaacagctttgaccagtggggagtggagctgggaaagcagctggctaagaaaatagagcctgagcttgatggcagtgctcaagtgacctctcacgacgcttctaccaatgggctcatcaacttcatcaagcagcagcgcgaggccagagtccaataaactcgtgctcatctgcagcctcctctgtgactcccctttctcttctcgtccctcctccccggagccggcactgcatgttcctggacaccacccagagcaccctctggttgtgggcttggaccacgagcccttagcagggaaggctggtctcccccagcctaacccccagcccctccatgtctatgctccctctgtgttagaattggctgaagtgtttttgtgcagctgacttttctgacccatgttcacgttgttcacatcccatgtagaaaaataaagatgccacggaggaggttgtaggctcagcctctgattttttttttcctgtgatggtgctttatgtagcagagggcaggagcgctcagcaggacgcaggctgtgcctctgcggacacttaacactaagtggtgagcgggtctagagtggagcaaggtgccctgagaagacaatagtggggtgggggcacaatcagtcaggacggcaacttggcctgtgtcaccaaatcccaagactgttttccactcctcacctctgtgactgcagaaattggatactctgttcactcgatggttctaaaaactgcattgagattatgtttgtttcgggtgaattcctggacaagaccgaggatgactgccatctcctggcaagacgctcaggtagttcttttgctttaaaaggcagatattgaaaactggaattttttttttttgagtctcgctctgtcacccagactggagtgcagtggtgcaatctcggctcactgcaacctccgcctcccgggttcaagctattctcctgcctcagcctcccgagtagctgggattacacggcgcacaccaccatacccagctaatttttgtatttttagtagtgaaggggttttaccatgttgggcaggctggtcttgaactcctgacctcaggtgatctgcccgcctcagcctcccacagtgctgggattacaggtatgagccaccacgcccggcccattttttttttttttttgacaacttttttttttttttgagacagggtcttgttccattgcccagactggagtgcagtggcatgatcacagctcactgcagccagtaatcctcttgcctcagcctcccaagtagttgagactacaggttgtaccactatgccctgctagttttttcattttttgtagagagacgggtcttttttttttttgagacggagtctcgctctgtcgcccaagctggagtgcagtagcacggtctcagctcattgcaagctccgcctcccaggttcacgccattctcctgcctcagactcctgtgtagctgggagtacaggcacctgccaccatgcccggctaattttttatatatttttttagcagagacagtgtctcactgtgttagtcaggatggtctcgatctcctgacctcgtgatccgcccgcctcagcctcccaaagtgctgggattacaggcgtgagccaccgcgcccagcaaggcgggtcttgctgtgtttcccagactagactggtcttgaattccagggctcaagagatctcccacctcagcctcccacagtgctgggattacaggcgtgagccgccacacccagcctattcaaaatttttttttcttagagacagggtctttgttgcccaggctggactgcagtgatacaatcatagctgactgaagcctcaaattcccaggctaaggtgatcttctcacctcagccttccaagtagctgggtccgcagatgcatgccagtacacccagctcatttaaaaaaaaatttttttcttttttgagagtcttgctttgttgcccaggctggagtgcagtggtgtgatctcggctcactgcaagctccacctcccggcttcacgccattctcctgcctcagcctcccgagtagctgggactacaggtgcccgccaccacacccggctaattttttgtatttttagtagagacggggtttcaccgtgttagccaggatggtcttgatctcctgacctcatgatccgcctgctttggcctcccaaagtgctgggattacaggcgtgagtcaccgcgcccggctcattttaaaatttttgtagatcagtgtactgttgtaaaaaaaaaaaaataagaaaaataaaaaataaatttttgtagtgataggatcccactgaggccagagaatagggtctggagacaaaggagcattcacttcagcctctgactggtggcaggccaagtctttatttacatagggtgtaaccaaataggaaacctctaaagggtacttaaaccccagattttctacacagggcacttgcttgagcctcatcccgctttctggaatgtacttttgcttcaataaatctgtgcttttgttccttc

SEQ ID NO: 295044 - DNA, 1677 bp, Artificial Sequence
  derived and/or modified sequence
atggccgccctgacccgggacccccagttccagaagctgcagcagtggtaccgggagcacaggtctgagctgaacctgcggcggctgtttgatgccaacaaggaccgcttcaaccacttcagcctgaccctgaacaccaaccacggccacatcctggtggactacagcaagaacctggtgacagaagatgtgatgaggatgctggtggacctggccaagagccggggcgtggaggccgcccgggagaggatgttcaacggggagaagatcaactacacagagggccgggctgtgctgcacgtggccctgaggaacagaagcaacacccccatcctggtggatggcaaggatgtgatgcctgaggtgaacaaggtgctggacaagatgaagagcttctgccagagggtgcgcagcggggactggaagggctacacaggcaagaccatcacagatgtgatcaacattggaattggaggcagtgacctgggccccctgatggtgacagaggccctgaagccctacagcagcggcggcccccgggtgtggtacgtgagcaacattgatggcacccacatcgccaagaccctggcccagctgaaccctgagagcagcctcttcatcatcgccagcaagaccttcaccacccaggagaccatcaccaatgctgagacagccaaggagtggttcctgcaggccgccaaggaccccagcgctgtggccaagcactttgtggccctgagcaccaacaccaccaaggtgaaggagtttggcatcgacccccagaacatgtttgagttctgggactgggtgggcggccgctacagcctgtggagcgccatcggcctgagcatcgccctgcacgtgggctttgacaactttgagcagctgctgagcggggcccactggatggaccagcacttccgcaccacccccctggagaagaatgcccctgtgctgctggccctgctgggcatctggtacatcaactgcttcggctgtgagacccacgccatgctgccctatgaccagtacctgcacagatttgctgcctacttccagcagggcgacatggagagcaatggcaagtacatcaccaagagcggcaccagggtggaccaccagacaggccccatcgtgtggggcgagcccggcaccaacggccagcacgccttctaccagctgatccaccagggcaccaagatgatcccctgtgacttcctgatccctgtgcagacccagcaccccatcaggaagggcctgcaccacaagatcctgctggccaacttcctggcccagacagaggccctgatgaggggcaagagcacagaggaggccaggaaggagctgcaggccgccggcaagagccctgaggacctggagcggctgctgccccacaaggtgtttgagggcaaccggcccaccaacagcatcgtgttcaccaagctgacccccttcatgctgggcgccctggtggccatgtatgagcacaagatctttgtgcagggcatcatctgggacatcaacagctttgaccagtggggcgtggagctgggcaagcagctggccaagaagattgagcctgagctggatggcagcgcccaggtgaccagccatgatgccagcaccaacggcctcatcaacttcatcaagcagcagcgggaggcccgggtgcagtag

SEQ ID NO: 295045 - DNA, 1677 bp, Artificial Sequence
  derived and/or modified sequence
atggccgccctgacccgggacccccagttccagaagctgcagcagtggtacagggagcacagatcagagctaaaccttcgtcggttgttcgatgccaacaaagacaggttcaaccatttcagcctgacattaaacaccaatcatggacacatcctggtggactatagcaaaaaccttgttacagaggatgtgatgaggatgctcgtcgatctcgccaaaagcaggggggtggaggcagcgagggaaaggatgttcaacggtgagaagattaattataccgagggacgggcagttctgcatgtcgcactccggaatcggtctaacacacccattctcgtggatgggaaggatgtgatgccagaagttaacaaagtcctggacaagatgaaatccttttgccagcgcgtccgtagcggagattggaaaggttacacaggcaagactattacagacgtgatcaacatcggcattggcggttccgatttaggaccgttaatggttaccgaggctcttaagccctatagcagcggcggtcctcgcgtgtggtatgtgagcaacatcgacgggacacatattgcgaaaactctggcccagcttaacccagaatcttccctgttcatcatcgctagcaagacttttacaacccaggagacaataactaatgcagagacagcaaaagagtggtttttgcaggcggcaaaggatccctctgctgtcgctaagcatttcgtggcgctgagcacaaacacaacaaaagtcaaggagtttggaattgatcctcagaacatgttcgagttttgggattgggtgggcgggagatattccctgtggtctgctattggactttcaatagcactccacgttggctttgataactttgagcagctcctctctggcgcccattggatggatcagcactttaggaccacccctctggaaaagaacgcccctgtgctgctggcactgttaggtatctggtatatcaattgctttggctgtgagacacacgcaatgttaccctacgaccaatacctgcaccgcttcgccgcatacttccagcagggtgacatggaatcgaatggcaaatacatcaccaagagcggcacccgagtggatcaccaaacagggcccattgtgtggggggagccaggaacgaacggccaacacgccttctaccagctgatccaccaaggtaccaaaatgattccttgcgatttccttattcccgtccagacccagcatccaatccggaagggcctacatcacaaaattttgctggcgaatttcctggcccaaaccgaggcccttatgagaggaaaatccactgaggaagcccgcaaggaattgcaggctgcgggaaagagtcccgaggaccttgagagactgctgccacataaggtcttcgaaggtaatcgaccgactaatagcattgtcttcaccaaactgaccccatttatgcttggtgctttggtcgcaatgtacgaacataagatctttgtccagggaataatttgggatatcaactccttcgatcagtggggggtcgaacttggcaagcagctggcgaaaaagattgagcctgagctcgatggcagcgcgcaggtaactagccacgacgcatctacaaacggcttgattaacttcataaaacagcagagggaggcccgtgtacagtag

SEQ ID NO: 295046 - DNA, 1677 bp, Artificial Sequence
  derived and/or modified sequence
atggctgccctgacccgagatccccaatttcaaaagctccagcagtggtacagagagcatagatccgaattgaatctccgcaggctctttgacgcaaataaggatcgctttaatcacttctctctaaccctcaatactaaccacggacacatcctagttgattactccaagaacctcgtgacagaggatgtgatgcggatgctcgtcgacctcgcaaagagccggggagttgaagctgcacgggagcgcatgttcaacggggagaagatcaactatacagagggcagggcagtattgcatgttgcattacgcaaccgcagcaacacgccaatacttgtggacggcaaggacgtgatgcccgaggttaacaaggtgctagataaaatgaagagcttctgccaacgggtgcgatctggcgattggaaagggtatactgggaagactatcaccgacgtcatcaacattggcataggcggatctgacttgggccctctgatggtcactgaggcgttgaagccatactcgtccggaggccctcgcgtatggtacgtttccaatatcgatggtacccatatcgccaagaccctagcacagctgaaccccgaaagttcgctgtttattatagcctctaaaacctttactacacaagagactatcaccaatgccgaaacagccaaagagtggtttttacaggcagccaaagatccatctgcggttgccaagcatttcgtcgccctttctaccaacactacaaaggtgaaagagtttggaatcgacccacagaatatgttcgagttttgggattgggtggggggacgctactccctctggagcgcgatcggtctgagtattgctctgcacgtgggcttcgacaacttcgagcaactcttgtctggcgctcattggatggatcagcatttcaggacaacaccccttgagaaaaatgctcccgtacttctcgcgctgctgggcatctggtacatcaattgcttcggctgcgagactcatgctatgttaccctatgaccagtatctccataggtttgctgcctatttccagcagggagatatggaaagcaatggcaaatacatcactaagtcgggaactcgggtagatcaccaaactggacccattgtgtggggggaaccaggcactaacggtcagcacgccttttaccagctcatacaccaaggcacgaagatgatcccatgcgactttctaatcccagtgcaaacccagcacccaattagaaaggggctccaccacaagattctactggctaatttcctcgcacaaaccgaagcactgatgcggggaaaaagcacagaagaggctcgcaaggagctgcaggccgcaggcaaaagccctgaggacctcgaacgccttctcccacacaaggtatttgaggggaatcgccctacaaactccattgtgtttactaagctgactccgtttatgctgggagccctcgtcgccatgtatgagcataaaattttcgtccagggaattatttgggatattaatagctttgatcagtggggtgtagaattgggaaagcagctggccaagaagattgagccagaactcgatggcagcgcacaggttacaagccacgatgcttccaccaacggcttgataaattttatcaagcagcaacgcgaagcaagagtccaatag

SEQ ID NO: 295047 - DNA, 1677 bp, Artificial Sequence
  derived and/or modified sequence
atggccgccctgaccagagacccccagttccagaagctgcagcagtggtacagagagcacagaagcgagctgaacctgagaagactgttcgacgccaacaaggacagattcaaccacttcagcctgaccctgaacaccaaccacggccacatcctggtggactacagcaagaacctggtgaccgaggacgtgatgagaatgctggtggacctggccaagagcagaggcgtggaggccgccagagagagaatgttcaacggcgagaagatcaactacaccgagggcagagccgtgctgcacgtggccctgagaaacagaagcaacacccccatcctggtggacggcaaggacgtgatgcccgaggtgaacaaggtgctggacaagatgaagagcttctgccagagagtgagaagcggcgactggaagggctacaccggcaagaccatcaccgacgtgatcaacatcggcatcggcggcagcgacctgggccccctgatggtgaccgaggccctgaagccctacagcagcggcggccccagagtgtggtacgtgagcaacatcgacggcacccacatcgccaagaccctggcccagctgaaccccgagagcagcctgttcatcatcgccagcaagaccttcaccacccaggagaccatcaccaacgccgagaccgccaaggagtggttcctgcaggccgccaaggaccccagcgccgtggccaagcacttcgtggccctgagcaccaacaccaccaaggtgaaggagttcggcatcgacccccagaacatgttcgagttctgggactgggtgggcggcagatacagcctgtggagcgccatcggcctgagcatcgccctgcacgtgggcttcgacaacttcgagcagctgctgagcggcgcccactggatggaccagcacttcagaaccacccccctggagaagaacgcccccgtgctgctggccctgctgggcatctggtacatcaactgcttcggctgcgagacccacgccatgctgccctacgaccagtacctgcacagattcgccgcctacttccagcagggcgacatggagagcaacggcaagtacatcaccaagagcggcaccagagtggaccaccagaccggccccatcgtgtggggcgagcccggcaccaacggccagcacgccttctaccagctgatccaccagggcaccaagatgatcccctgcgacttcctgatccccgtgcagacccagcaccccatcagaaagggcctgcaccacaagatcctgctggccaacttcctggcccagaccgaggccctgatgagaggcaagagcaccgaggaggccagaaaggagctgcaggccgccggcaagagccccgaggacctggagagactgctgccccacaaggtgttcgagggcaacagacccaccaacagcatcgtgttcaccaagctgacccccttcatgctgggcgccctggtggccatgtacgagcacaagatcttcgtgcagggcatcatctgggacatcaacagcttcgaccagtggggcgtggagctgggcaagcagctggccaagaagatcgagcccgagctggacggcagcgcccaggtgaccagccacgacgccagcaccaacggcctgatcaacttcatcaagcagcagagagaggccagagtgcagtag

SEQ ID NO: 295048 - DNA, 774 bp, Artificial Sequence
  derived and/or modified sequence
atgctggagtacgccctgaagcaggagagagccaagtaccacaagctgaagttcggcaccgacctgaaccagggcgagaagaaggccgacgtgagcgagcaggtgagcaacggccccgtggagagcgtgaccctggagaacagccccctggtgtggaaggagggcagacagctgctgagacagtacctggaggaggtgggctacaccgacaccatcctggacatgagaagcaagagagtgagaagcctgctgggcagaagcctggagctgaacggcgccgtggagcccagcgagggcgcccccagagccccccccggccccgccggcctgagcggcggcgagagcctgctggtgaagcagatcgaggagcagatcaagagaaacgccgccggcaaggacggcaaggagagactgggcggcagcgtgctgggccagatccccttcctgcagaactgcgaggacgaggacagcgacgaggacgacgagctggacagcgtgcagcacaagaagcagagagtgaagctgcccagcaaggccctggtgcccgagatggaggacgaggacgaggaggacgacagcgaggacgccatcaacgagttcgacttcctgggcagcggcgaggacggcgagggcgcccccgaccccagaagatgcaccgtggacggcagcccccacgagctgggccccgagctgcacagccccaccgagtggcagggcgccctgagcgtgggcaaggccagccccatgcccgactgggtgggcaccgccggctag

SEQ ID NO: 295049 - DNA, 774 bp, Artificial Sequence
  derived and/or modified sequence
atgctggagtatgctctcaagcaggaacgggcaaagtatcacaaactgaagttcggaaccgatctgaatcagggcgaaaaaaaagcagatgtgtccgaacaagtatctaatgggcccgtcgaaagtgtgaccttggagaacagtccactggtctggaaggagggccgccaattactgcgacagtatctggaggaggtagggtatacagacacaattctcgacatgcggtctaagcgcgtcaggtcactgctgggacgttcactggaactgaatggtgccgtcgagccaagtgaaggcgcccccagggccccccccggccccgctgggctgagtggaggcgaatccctgctagtgaaacagatcgaggagcagataaagcgtaacgcagccgggaaggacggcaaagaacgcctcgggggatccgtactggggcagattccctttttacagaattgcgaagatgaggacagcgacgaggacgacgaactagattccgtgcagcacaagaaacaaagagtgaaattgccatcaaaagcacttgtgcctgaaatggaggatgaggatgaagaggacgactccgaggatgcgatcaacgaattcgatttcctgggtagcggcgaggacggtgaaggcgcacctgatccccgcaggtgcactgtagatggaagtcctcacgaattgggtcctgaactccatagcccaaccgagtggcagggagctctgagtgtgggcaaagcctcgccaatgcctgattgggtgggtacagctggctag

SEQ ID NO: 295050 - DNA, 774 bp, Artificial Sequence
  derived and/or modified sequence
atgctggagtatgccctgaagcaggagcgggccaagtaccacaagctgaagtttggaacagacctgaaccagggcgagaagaaggcagatgtgtctgagcaggtgtccaatggacctgtggagagcgtgaccctggagaacagccccctggtgtggaaggagggccggcagctgctgcggcagtacctggaggaggtgggctacacagacaccatcctggacatgaggagcaagagggtgcgcagcctgctgggccgcagcctggagctgaatggagctgtggagcccagcgagggcgccccccgggcccctcctggccctgctggcctgtctggaggagagagcctgctggtgaagcagatcgaggagcagatcaagagaaatgctgctgggaaggatggcaaggagcggctgggcggctctgtgctgggccagatccccttcctgcagaactgtgaagatgaagattctgatgaagatgatgagctggacagcgtgcagcacaagaagcagagggtgaagctgcccagcaaggccctggtgcctgagatggaggatgaagatgaggaggatgattctgaagatgccatcaatgaatttgacttcctgggcagcggagaagatggagagggcgccccagacccccggcgctgcaccgtggatggcagcccccatgagctgggccctgagctgcacagccccacagagtggcagggcgccctgtctgtgggcaaggccagccccatgccagactgggtgggcacagctggatag

SEQ ID NO: 295051 - DNA, 774 bp, Artificial Sequence
  derived and/or modified sequence
atgctggagtacgccctgaagcaggagcgggccaagtaccacaagcttaaatttggcaccgacctcaatcagggggagaagaaggctgatgtctctgaacaagtctctaatggccccgtcgaatccgtgaccttggagaatagcccgcttgtgtggaaggaagggagacagcttctacggcagtacctcgaggaagttggctacaccgacaccatactcgacatgagatctaaacgcgtgcgtagtctcctcggcaggagtctggagctgaacggtgctgttgaaccctcagagggtgccccacgtgcccccccaggacccgcaggcctgtccgggggtgagtctctcctggtgaagcagatcgaggaacaaatcaagcgcaacgcagccggaaaggacggaaaggaaagactcggaggctcagtcctgggccagatccctttcttgcagaattgcgaagacgaggactcggacgaggatgacgagttagactctgtgcagcacaagaagcagcgagttaaattaccgtctaaggccctggtaccggaaatggaagatgaggatgaggaagatgattcagaagacgccataaatgagtttgatttcctggggagtggagaggacggggagggggcccctgaccctaggcgctgtaccgtggacggtagcccacacgaactgggccccgagctgcacagccccacagaatggcagggtgcactctctgtaggaaaggcctcccccatgcccgattgggtcggaactgcaggatag

SEQ ID NO: 295052 - DNA, 774 bp, Artificial Sequence
  derived and/or modified sequence
atgctggagtatgccctcaaacaggagcgagccaagtaccacaaattgaagttcggtaccgacttaaaccagggagaaaaaaaggctgacgtgtcagaacaggtcagcaatggacccgtcgagtctgtgacactggaaaactccccgctggtgtggaaagagggtcgccagctgctgaggcagtacttggaggaagtcgggtataccgatactattttggacatgcgtagcaagagagtcaggtctctgctcggcaggtcactggagctcaacggcgctgtggagcccagcgaaggcgctccaagggcaccgccaggcccagccggattatccgggggtgaaagcctcctagtgaagcagatcgaggagcagatcaagcgaaatgctgccggaaaggatggcaaagaaaggctcggaggatccgtactcgggcagattccattcttgcaaaattgtgaagacgaggactctgatgaagatgacgaacttgacagcgttcagcataagaagcaacgggtcaagctcccttcgaaggctcttgttccagagatggaggacgaggatgaagaggacgatagcgaagatgccattaacgaattcgattttctgggaagcggagaggatggcgaaggggctcccgacccaagacggtgtaccgtggacggaagtccgcatgaacttggacctgaactacattcgcctactgagtggcagggggcactgtcagtgggcaaggcctccccgatgcctgattgggtgggcactgccggatag

SEQ ID NO: 295053 - protein, 427 aa, Artificial Sequence
  derived and/or modified sequence
MGTPKPRILPWLVSQLDLGQLEGVAWVNKSRTRFRIPWKHGLRQDAQQEDFGIFQAWAEATGAYVPGRDKPDLPTWKRNFRSALNRKEGLRLAEDRSKDPHDPHKIYEFVNSGVGDFSQPDTSPDTNGGGSTSDTQEDILDELLGNMVLAPLPDPGPPSLAVAPEPCPQPLRSPSLDNPTPFPNLGPSENPLKRLLVPGEEWEFEVTAFYRGRQVFQQTISCPEGLRLVGSEVGDRTLPGWPVTLPDPGMSLTDRGVMSYVRHVLSCLGGGLALWRAGQWLWAQRLGHCHTYWAVSEELLPNSGHGPDGEVPKDKEGGVFDLGPFIVDLITFTEGSGRSPRYALWFCVGESWPQDQPWTKRLVMVKVVPTCLRALVEMARVGGASSLENTVDLHISNSHPLSLTSDQYKAYLQDLVEGMDFQGPGES

SEQ ID NO: 295054 - DNA, 1614 bp, Artificial Sequence
  derived and/or modified sequence
ggaaacccaaaaaagggcataggggcgggaacagcccagcgggccgtcccatcggcttttgggtctgttacccaaagaatgataaagttggttttatttcaagaagtcgatcaaaaagaaagccccagcgctctagagctcagctgacgggaaagggggtgcgcagcctcgagtttgagagctacccggagctccaagacaggggtgggttccagctgcccgcacgccccgaccttccatcgtaggccggaccatgggaaccccaaagccacggatcctgccctggctggtgtcgcagctggacctggggcaactggagggcgtggcctgggtgaacaagagccgcacgcgcttccgcatcccttggaagcacggcctacggcaggatgcacagcaggaggatttcggaatcttccaggcctgggccgaggccactggtgcatatgttcccgggagggataagccagacctgccaacctggaagaggaatttccgctctgccctcaaccgcaaagaagggttgcgtttagcagaggaccggagcaaggaccctcacgacccacataaaatctacgagtttgtgaactcaggagttggggacttttcccagccagacacctctccggacaccaatggtggaggcagtacttctgatacccaggaagacattctggatgagttactgggtaacatggtgttggccccactcccagatccgggacccccaagcctggctgtagcccctgagccctgccctcagcccctgcggagccccagcttggacaatcccactcccttcccaaacctggggccctctgagaacccactgaagcggctgttggtgccgggggaagagtgggagttcgaggtgacagccttctaccggggccgccaagtcttccagcagaccatctcctgcccggagggcctgcggctggtggggtccgaagtgggagacaggacgctgcctggatggccagtcacactgccagaccctggcatgtccctgacagacaggggagtgatgagctacgtgaggcatgtgctgagctgcctgggtgggggactggctctctggcgggccgggcagtggctctgggcccagcggctggggcactgccacacatactgggcagtgagcgaggagctgctccccaacagcgggcatgggcctgatggcgaggtccccaaggacaaggaaggaggcgtgtttgacctggggcccttcattgtagatctgattaccttcacggaaggaagcggacgctcaccacgctatgccctctggttctgtgtgggggagtcatggccccaggaccagccgtggaccaagaggctcgtgatggtcaaggttgtgcccacgtgcctcagggccttggtagaaatggcccgggtagggggtgcctcctccctggagaatactgtggacctgcacatttccaacagccacccactctccctcacctccgaccagtacaaggcctacctgcaggacttggtggagggcatggatttccagggccctggggagagctgagccctcgctcctcatggtgtgcctccaacccccctgttccccaccacctcaaccaataaactggttcctgctatgaa

SEQ ID NO: 295055 - DNA, 1284 bp, Artificial Sequence
  derived and/or modified sequence
atgggcactcccaaacctcgcatattaccttggctggtgagccaactagacctgggacagcttgagggagtggcatgggtgaacaaaagtagaactagattcaggattccatggaaacacggcttaagacaggacgcacagcaagaggattttggaatttttcaggcatgggccgaagctactggagcttatgttccaggaagagataagccagaccttcctacatggaagaggaacttcaggagcgccctgaaccgtaaagagggtttgcgcctggctgaagacaggagcaaagacccgcacgatccacacaagatctacgagtttgtcaatagcggcgttggtgacttttcgcagcccgacacgagtccagacactaacggtggcggcagtacctccgacactcaggaagatatcctggacgagctgctcggtaatatggtgctggcccctttgcccgatcccgggcctccatcccttgctgtggcgcctgaaccatgcccccagcctctgcgcagcccaagcctggacaacccgacaccgttccctaacttgggaccaagcgagaatcctctgaaaagattgctagtgccaggagaagagtgggaattcgaggtgacggctttctaccgcggccgtcaggtttttcagcagactatctcttgtcctgaagggcttcgattagtcggctcagaggtgggcgatcgaaccctgccaggttggcctgtaaccctgcccgaccccggcatgagcttgaccgaccgaggtgtgatgtcctacgtgcgacacgtgctatcttgcctgggcggcggacttgcgctctggcgcgcaggccaatggctctgggcacagcggctgggacactgccacacctattgggccgtttctgaggaacttttgcctaatagtggtcacgggcctgatggtgaggtcccgaaggacaaggaaggcggtgtgttcgaccttggtccctttattgtcgatctaattacattcacagaagggagcggcagatccccccgatatgccctgtggttttgtgtgggcgaaagctggccccaggaccaaccctggacaaagcggctcgtaatggtgaaagtggtgccgacttgcctgagggctttggtggaaatggcgcgggttggtggagcgtctagccttgagaatacggttgatttgcacataagcaattcacatcctctctccctgacctctgaccagtataaagcctacctccaggacctagtcgaagggatggactttcaagggcccggcgaatcttag

SEQ ID NO: 295056 - DNA, 1284 bp, Artificial Sequence
  derived and/or modified sequence
atggggacacccaagccgagaattctgccctggctcgttagtcaactggacctggggcagttggagggcgtggcttgggttaacaagtccagaacccggtttaggatcccatggaaacacggacttagacaggacgctcagcaggaggactttggcatttttcaggcatgggcggaagccacaggagcttacgttcctggaagggataagccagatttgcccacatggaagaggaatttcagatcggcgctgaaccggaaggaggggctgcgcctggccgaagatagatccaaggatcctcacgacccacataagatatatgaattcgtgaattctggcgtcggtgatttcagccagccggacacatcccccgatactaacgggggaggcagcaccagcgacacccaggaggacatactcgacgaactacttggcaatatggtgctcgctcccctgcccgatccagggcccccaagcctcgctgtggccccggaaccttgtccacagcctctacgtagcccttccctggacaacccaacgccctttcctaatctgggcccttccgaaaaccccttaaagaggctgctcgtccctggcgaggaatgggagttcgaggtgaccgctttctataggggccgccaggtattccagcaaacaatctcgtgcccggaaggtcttcggctcgtgggctcagaggtgggcgatagaacactgccggggtggcccgtgactcttcctgacccaggaatgagcttaaccgacaggggggtcatgagctacgtgaggcatgttttgtcctgtcttggaggcgggctggctctgtggagagcaggccagtggttatgggcccagcggctcggccactgtcacacatattgggcggtctccgaggaactgctgcccaattccgggcatggtcctgatggcgaagtccccaaggacaaggagggcggggtgtttgacctgggcccgttcattgtggacctgattacatttaccgaaggatcagggaggtcaccccggtatgccctttggttctgtgtgggcgaaagctggccccaagaccaaccgtggacaaaacggctggtgatggttaaagtggtaccgacgtgcctccgagccctcgtggagatggccagggtagggggggccagctcactggagaatacagttgacctccacatctcaaacagccaccctctgagtctgacctcggatcagtacaaggcttatctccaggatctcgtagaaggaatggactttcagggacctggggaatcctag

SEQ ID NO: 295057 - DNA, 1690 bp, Artificial Sequence
  derived and/or modified sequence
gctaccctgaaagtggggatacttactttcgatgatgtgggggagggaggaggtctatactggcggaattgagggagtggagggtctgcactgaagacgctggggaaggatgtgccatggatatgggaaggaaccctagctgattagagagcctctcgggaggatgggaggatgggaagaggaggtttcctgtttgtacccccgaaaatatgggtgaaggacctgtgccgtggcccgtgagaaggaggtctgggtgcggaaactccaggccaggtgggtccgggggaggccggtcgcgcccaggaaatgccctatacgcgcaggccggaccatgggaaccccaaagccacggatcctgccctggctggtgtcgcagctggacctggggcaactggagggcgtggcctgggtgaacaagagccgcacgcgcttccgcatcccttggaagcacggcctacggcaggatgcacagcaggaggatttcggaatcttccaggcctgggccgaggccactggtgcatatgttcccgggagggataagccagacctgccaacctggaagaggaatttccgctctgccctcaaccgcaaagaagggttgcgtttagcagaggaccggagcaaggaccctcacgacccacataaaatctacgagtttgtgaactcaggagttggggacttttcccagccagacacctctccggacaccaatggtggaggcagtacttctgatacccaggaagacattctggatgagttactgggtaacatggtgttggccccactcccagatccgggacccccaagcctggctgtagcccctgagccctgccctcagcccctgcggagccccagcttggacaatcccactcccttcccaaacctggggccctctgagaacccactgaagcggctgttggtgccgggggaagagtgggagttcgaggtgacagccttctaccggggccgccaagtcttccagcagaccatctcctgcccggagggcctgcggctggtggggtccgaagtgggagacaggacgctgcctggatggccagtcacactgccagaccctggcatgtccctgacagacaggggagtgatgagctacgtgaggcatgtgctgagctgcctgggtgggggactggctctctggcgggccgggcagtggctctgggcccagcggctggggcactgccacacatactgggcagtgagcgaggagctgctccccaacagcgggcatgggcctgatggcgaggtccccaaggacaaggaaggaggcgtgtttgacctggggcccttcattgtagatctgattaccttcacggaaggaagcggacgctcaccacgctatgccctctggttctgtgtgggggagtcatggccccaggaccagccgtggaccaagaggctcgtgatggtcaaggttgtgcccacgtgcctcagggccttggtagaaatggcccgggtagggggtgcctcctccctggagaatactgtggacctgcacatttccaacagccacccactctccctcacctccgaccagtacaaggcctacctgcaggacttggtggagggcatggatttccagggccctggggagagctgagccctcgctcctcatggtgtgcctccaacccccctgttccccaccacctcaaccaataaactggttcctgctatg

SEQ ID NO: 295058 - DNA, 1613 bp, Artificial Sequence
  derived and/or modified sequence
ggaaacccaaaaaagggcataggggcgggaacagcccagcgggccgtcccatcggcttttgggtctgttacccaaagaatgataaagttggttttatttcaagaagtcgatcaaaaagaaagccccagcgctctagagctcagctgacgggaaagggggtgcgcagcctcgagtttgagagctacccggagctccaagacaggggtgggttccagctgcccgcacgccccgaccttccatcgtaggccggaccatgggaaccccaaagccacggatcctgccctggctggtgtcgcagctggacctggggcaactggagggcgtggcctgggtgaacaagagccgcacgcgcttccgcatcccttggaagcacggcctacggcaggatgcacagcaggaggatttcggaatcttccaggcctgggccgaggccactggtgcatatgttcccgggagggataagccagacctgccaacctggaagaggaatttccgctctgccctcaaccgcaaagaagggttgcgtttagcagaggaccggagcaaggaccctcacgacccacataaaatctacgagtttgtgaactcaggagttggggacttttcccagccagacacctctccggacaccaatggtggaggcagtacttctgatacccaggaagacattctggatgagttactgggtaacatggtgttggccccactcccagatccgggacccccaagcctggctgtagcccctgagccctgccctcagcccctgcggagccccagcttggacaatcccactcccttcccaaacctggggccctctgagaacccactgaagcggctgttggtgccgggggaagagtgggagttcgaggtgacagccttctaccggggccgccaagtcttccagcagaccatctcctgcccggagggcctgcggctggtggggtccgaagtgggagacaggacgctgcctggatggccagtcacactgccagaccctggcatgtccctgacagacaggggagtgatgagctacgtgaggcatgtgctgagctgcctgggtgggggactggctctctggcgggccgggcagtggctctgggcccagcggctggggcactgccacacatactgggcagtgagcgaggagctgctccccaacagcgggcatgggcctgatggcgaggtccccaaggacaaggaaggaggcgtgtttgacctggggcccttcattgtagatctgattaccttcacggaaggaagcggacgctcaccacgctatgccctctggttctgtgtgggggagtcatggccccaggaccagccgtggaccaagaggctcgtgatggtcaaggttgtgcccacgtgcctcagggccttggtagaaatggcccgggtagggggtgcctcctccctggagaatactgtggacctgcacatttccaacagccacccactctccctcacctccgaccagtacaaggcctacctgcaggacttggtggagggcatggatttccagggccctggggagagctgagccctcgctcctcatggtgtgcctccaacccccctgttccccaccacctcaaccaataaactggttcctgctatga

SEQ ID NO: 295059 - DNA, 1284 bp, Artificial Sequence
  derived and/or modified sequence
atgggcacccccaagccccgcatcctgccctggctggtgtcccagctggacctgggccagctggagggcgtggcctgggtgaacaagagcaggacccgcttccgcatcccctggaagcacggcctgcggcaggatgcccagcaggaggactttggcatcttccaggcctgggccgaggccactggagcctacgtgcccggccgggacaagccagacctgcccacctggaagaggaacttccgcagcgccctgaacaggaaggagggcctgcggctggccgaggacaggagcaaggacccccatgacccccacaagatctatgaatttgtgaacagcggcgtgggggacttcagccagcctgacaccagcccagacaccaatggaggcggcagcaccagtgacacccaggaggacatcctggatgagctgctgggcaacatggtgctggcccccctgcctgaccccggcccccccagcctggccgtggcccctgagccctgcccccagcccctgcggagccccagcctggacaaccccacccccttccccaacctgggccccagcgagaaccccctgaagaggctgctggtgcctggagaggagtgggagtttgaggtgacagccttctaccggggccggcaggtgttccagcagaccatcagctgcccagagggcctgcggctggtgggcagcgaggtgggggacaggaccctgcccggctggcctgtgaccctgcctgaccccggcatgagcctgacagaccggggcgtgatgtcctatgtgagacatgtgctgagctgcctgggcggcggcctggccctgtggagggctggccagtggctgtgggcccagaggctgggccactgccacacctactgggccgtgtctgaggagctgctgcccaacagcggccacggcccagatggagaggtgcccaaggacaaggagggcggcgtgtttgacctgggccccttcatcgtggacctgatcaccttcacagagggcagcggccgcagccccaggtatgccctgtggttctgtgtgggggagagctggccccaggaccagccctggaccaagaggctggtgatggtgaaggtggtgcccacctgcctgcgggccctggtggagatggcccgggtgggcggggccagcagcctggagaacacagtggacctgcacatcagcaacagccaccccctgagcctgaccagtgaccagtacaaggcctacctgcaggacctggtggagggcatggacttccagggccctggagagagctag

SEQ ID NO: 295060 - DNA, 1284 bp, Artificial Sequence
  derived and/or modified sequence
atgggcacccccaagccccggatcctgccctggctggtgagccagctggatctgggacaattggagggggtggcctgggttaataaatctcggacccggtttaggataccttggaagcacgggctgaggcaagacgctcagcaagaggactttggtatctttcaagcatgggctgaggccaccggcgcatatgttccaggaagggacaagccagacttgcccacttggaaaaggaatttcagatcagccctcaataggaaggagggtttgcggctggctgaagatcggtcgaaggatcctcacgacccccacaaaatttacgaatttgtgaattctggggtgggcgattttagtcagccagatacgtccccggatacaaatggtggaggctctaccagcgacacccaggaggacattttagacgaactcctgggaaatatggtgctggcaccactgcccgatcccggacctcccagtctggctgtggcgcccgagccctgcccacaaccactcagaagcccttcactggacaatcctacacccttcccaaacctaggacccagtgagaacccacttaaacgattgttggtgcccggggaagaatgggaatttgaagtgaccgcattctaccgcggaagacaagtcttccagcagaccattagctgtccggaaggcctgagattggttgggagcgaggtgggtgacagaacactgccaggctggcctgtgactttgcctgatcccgggatgtccttaacggatcgtggagttatgagctatgtccgccatgtgctaagctgtctcggaggcgggttggccttgtggcgggcaggacaatggctgtgggcccagagactgggtcattgtcacacttactgggccgtttcagaggagctactccccaactcaggccatggccctgatggggaagttcctaaggacaaggaaggtggcgtgttcgacctgggtccctttatagttgaccttatcacttttactgaaggctctggcaggtcaccacgctacgccttgtggttttgcgtgggggagtcatggccccaggaccagccttggaccaaacgcctggttatggtgaaagtagtgcccacctgtcttagggcactcgttgaaatggccagggtgggaggcgcctcctcgctggaaaatacagtcgacctgcacattagtaattctcatccactgtccctgacatcagatcagtacaaagcatatttacaggatctggttgaagggatggattttcaaggacctggcgagtcctag

SEQ ID NO: 295061 - DNA, 1284 bp, Artificial Sequence
  derived and/or modified sequence
atgggcacccccaagccccggatcctgccctggctggtgagccagctcgacctggggcagctagaaggcgttgcctgggtgaataaaagtagaacacggttccgcataccatggaaacatgggctgagacaagatgcacaacaggaagactttggtattttccaggcgtgggctgaagcaacaggagcgtatgtccctggccgcgataagcccgacctcccgacatggaaacgaaacttcaggtcagctctgaaccgcaaggaggggttgagacttgctgaggatcggtccaaggacccacatgaccctcacaaaatctatgagttcgtgaacagcggggtcggcgatttttcccaacccgacacttcacctgatacaaacggcggaggaagcacaagcgatacgcaagaggatatactggacgagctactcgggaacatggtgctggctcccctgccagaccccggaccgcctagtttggccgttgctccggagccatgtcctcagccgctcagatcgcctagtctggacaacccaacaccttttcccaacctgggaccgtcagagaaccccctgaaaaggcttctggtgcctggggaggagtgggaatttgaagtaacggccttctatagaggccgacaagtgtttcagcagactattagttgcccggaaggactgcggctggttggcagcgaggtaggtgacagaaccctccctgggtggcccgtaaccctcccggaccctggcatgtctctgaccgaccgaggcgtgatgtcgtacgtccgccatgtcttatcctgcttgggtggaggcctggccttatggagggcaggacagtggctctgggcacaacgacttggacattgccacacgtactgggcagtgagcgaggagctgttgcccaacagcggccacggccccgacggagaagttcctaaagacaaggagggcggagtgttcgacctgggtccattcatcgtcgacctgataacattcactgagggttccggccggtccccccgctatgctctttggttctgcgtgggcgaatcatggccccaggatcagccatggactaagaggctggttatggtcaaggtggtgcccacatgcttgcgggcgctggtggaaatggcgcgggtggggggagcttctagcctggagaacaccgtggacctccatatcagtaacagccacccacttagtttaacctccgatcaatacaaagcgtacctacaggacttggtggaagggatggacttccaaggccccggcgaatcctag

SEQ ID NO: 295062 - DNA, 1284 bp, Artificial Sequence
  derived and/or modified sequence
atgggaacaccaaagccacgcattcttccctggctggtctcccagctagatttgggacagctcgagggagtagcttgggtgaacaagtctagaactaggtttcgaataccttggaaacacggcctgcgacaggacgctcagcaggaagattttggaatattccaagcctgggctgaggcgactggggcttacgttccaggcagagacaaaccagacctccccacttggaagcgcaactttcggtcagcccttaataggaaggaaggcctacgacttgccgaagatcgaagcaaggaccctcacgatccccataaaatatacgagtttgtcaattccggtgtcggagatttctcacaaccggataccagtcccgacactaacggcggtgggagcacaagcgatactcaggaagacatcctagatgaacttcttggcaatatggtgctggcgcctcttccagacccagggcctccttctctggctgtggcccctgagccttgtccccagcctttgaggtccccaagcctggacaatcctacacccttccctaatctcggcccatccgaaaatcctttgaagcgtctgctcgtgccaggggaggaatgggaatttgaggtgacagctttctaccggggacggcaagtgttccagcagaccatcagctgccccgagggcctcagattggtggggtctgaagttggagaccggacactccccggttggcccgttaccctgcctgatcccggaatgagcctgacagacagaggggtcatgagttatgtgaggcacgtactcagctgtctaggcggtggactcgccctgtggagggccggtcagtggctgtgggctcaacgtcttggccactgtcacacttattgggccgtatcggaggaactcttgcccaacagtggacacggtcctgatggtgaggttccaaaggacaaggaaggtggtgtgttcgacctgggcccattcatagtcgacttgattacgtttacggaaggttctggacggagccctcgctacgctctgtggttctgcgtaggagagtcctggccccaagatcagccgtggaccaagcgcctggtgatggttaaggtggttccaacatgcctgagagctcttgttgaaatggctcgggtgggcggtgcctccagtctggagaataccgtggaccttcacatcagtaattcgcacccactctcccttacctccgaccaatacaaagcatacttacaagacctggttgagggaatggacttccaagggccaggtgagtcgtag

SEQ ID NO: 295063 - DNA, 1284 bp, Artificial Sequence
  derived and/or modified sequence
atgggtactccgaaacccagaatactgccgtggctggtgagccagctagacctcggccaattagagggagtggcttgggtgaataagagccggacgagatttaggatcccttggaagcacgggttaagacaggacgcacagcaggaggacttcggcatttttcaggcctgggcagaggctacaggcgcatacgtaccgggtagggacaaacccgaccttcctacgtggaaaagaaactttaggagtgctttgaaccgtaaggagggcctccgcctcgccgaagatagaagcaaggatccccacgatccccacaagatctatgaattcgtgaattccggagtgggcgacttttcccaacctgatacaagtccagacactaatggcggaggaagtacctcagatacgcaggaggacatactggacgagctgctcgggaacatggttcttgcacctctccctgatcctgggcctccttccctggccgttgccccagagccatgccctcaacctctgagatcccccagtcttgataatcctaccccattcccgaacctgggtccttcagagaaccccctcaagaggctgctggttccaggagaagagtgggaattcgaagtgaccgcattttaccgaggcagacaagttttccaacaaaccatcagctgccctgagggcttaaggctggtgggctcagaggtgggggataggacactgccaggttggcccgtcacattgccggacccagggatgtcattgaccgataggggagtgatgtcctatgtaagacatgtgctgtcctgtctcggaggtgggctcgccctgtggcgcgctggacagtggctttgggctcagcgtctggggcattgccacacatattgggcggttagcgaagagctcttgcccaacagcgggcacgggcctgacggcgaggtcccaaaggataaggagggtggtgtgtttgatctcggacccttcatcgttgatttaatcacatttacggaaggcagcgggagaagtccacgctatgcactctggttctgtgtcggcgaaagttggccccaggatcagccctggaccaagagactggtgatggtgaaggtggtgcctacgtgccttcgagccctagtagaaatggctcgggtgggaggtgcctctagcctggaaaacactgtggaccttcacatcagtaatagccaccctctctctcttacgtctgaccagtataaggcctatctccaggatcttgtggaggggatggactttcagggccctggcgaatcctag

SEQ ID NO: 295064 - DNA, 1284 bp, Artificial Sequence
  derived and/or modified sequence
atgggcacccccaagcccagaatcctgccctggctggtgagccagctggacctgggccagctggagggcgtggcctgggtgaacaagagcagaaccagattcagaatcccctggaagcacggcctgagacaggacgcccagcaggaggacttcggcatcttccaggcctgggccgaggccaccggcgcctacgtgcccggcagagacaagcccgacctgcccacctggaagagaaacttcagaagcgccctgaacagaaaggagggcctgagactggccgaggacagaagcaaggacccccacgacccccacaagatctacgagttcgtgaacagcggcgtgggcgacttcagccagcccgacaccagccccgacaccaacggcggcggcagcaccagcgacacccaggaggacatcctggacgagctgctgggcaacatggtgctggcccccctgcccgaccccggcccccccagcctggccgtggcccccgagccctgcccccagcccctgagaagccccagcctggacaaccccacccccttccccaacctgggccccagcgagaaccccctgaagagactgctggtgcccggcgaggagtgggagttcgaggtgaccgccttctacagaggcagacaggtgttccagcagaccatcagctgccccgagggcctgagactggtgggcagcgaggtgggcgacagaaccctgcccggctggcccgtgaccctgcccgaccccggcatgagcctgaccgacagaggcgtgatgagctacgtgagacacgtgctgagctgcctgggcggcggcctggccctgtggagagccggccagtggctgtgggcccagagactgggccactgccacacctactgggccgtgagcgaggagctgctgcccaacagcggccacggccccgacggcgaggtgcccaaggacaaggagggcggcgtgttcgacctgggccccttcatcgtggacctgatcaccttcaccgagggcagcggcagaagccccagatacgccctgtggttctgcgtgggcgagagctggccccaggaccagccctggaccaagagactggtgatggtgaaggtggtgcccacctgcctgagagccctggtggagatggccagagtgggcggcgccagcagcctggagaacaccgtggacctgcacatcagcaacagccaccccctgagcctgaccagcgaccagtacaaggcctacctgcaggacctggtggagggcatggacttccagggccccggcgagagctag

SEQ ID NO: 295065 - protein, 757 aa, Artificial Sequence
  derived and/or modified sequence
MLSSVCVSSFRGRQGASKQQPAPPPQPPESPPPPPLPPQQQQPAQPGPAASPAGPPAPRGPGDRRAEPCPGLPAAAMGRHGGGGGDSGKIVINVGGVRHETYRSTLRTLPGTRLAGLTEPEAAARFDYDPGADEFFFDRHPGVFAYVLNYYRTGKLHCPADVCGPLFEEELGFWGIDETDVEACCWMTYRQHRDAEEALDSFEAPDPAGAANAANAAGAHDGGLDDEAGAGGGGLDGAGGELKRLCFQDAGGGAGGPPGGAGGAGGTWWRRWQPRVWALFEDPYSSRAARYVAFASLFFILISITTFCLETHEGFIHISNKTVTQASPIPGAPPENITNVEVETEPFLTYVEGVCVVWFTFEFLMRITFCPDKVEFLKSSLNIIDCVAILPFYLEVGLSGLSSKAAKDVLGFLRVVRFVRILRIFKLTRHFVGLRVLGHTLRASTNEFLLLIIFLALGVLIFATMIYYAERIGADPDDILGSNHTYFKNIPIGFWWAVVTMTTLGYGDMYPKTWSGMLVGALCALAGVLTIAMPVPVIVNNFGMYYSLAMAKQKLPKKKNKHIPRPPQPGSPNYCKPDPPPPPPPHPHHGSGGISPPPPITPPSMGVTVAGAYPAGPHTHPGLLRGGAGGLGIMGLPPLPAPGEPCPLAQEEVIEINRADPRPNGDPAAAALAHEDCPAIDQPAMSPEDKSPITPGSRGRYSRDRACFLLTDYAPSPDGSIRKATGAPPLPPQDWRKPGPPSFLPDLNANAAAWISP

SEQ ID NO: 295066 - DNA, 2274 bp, Artificial Sequence
  derived and/or modified sequence
atgttgtctagcgtttgtgtgagcagtttccgggggagacagggagcttcgaagcagcagcctgcccctcccccacagcctcccgagtcacccccaccacctcctctgcccccccagcagcagcagcctgcgcaacccggccctgccgcgtcacccgcagggcctcctgccccccgcggcccgggggatcgacgggccgaaccctgccccgggctgccggcagccgccatgggccgccatggcggcggcggcggtgatagtggtaagattgttattaatgtaggcggcgtgcgacacgaaacgtaccgcagcactctcagaactctacctggaacccgcctggccggactcacagaacccgaggccgccgctagatttgactatgatcctggagccgacgagtttttcttcgaccgccaccctggggtgttcgcatacgtcctgaactattaccggaccggtaaactgcattgtccagctgacgtctgtggccccctgttcgaggaggagcttggcttctggggaatagacgagacagacgtcgaagcatgttgttggatgacctataggcaacacagggatgccgaggaagcattggattcctttgaagctcctgaccccgccggagctgctaatgcagccaacgccgccggggcccatgacgggggtctggacgatgaagccggcgccggcggaggcggtcttgatggtgcgggaggcgaactgaagcgtctgtgcttccaggatgctgggggcggcgccggcggtcccccaggtggggctggcggcgcaggaggcacatggtggagaaggtggcagccacgggtgtgggcgctgttcgaagacccatattcctcccgggcggcacgatacgtcgccttcgcgtccctctttttcatcctgatctccatcactactttttgcttggagacacatgagggctttatccatattagcaataaaacagtcactcaagcgagcccgatacccggggctcctcctgagaacatcactaatgtggaagtcgagaccgagcccttcttgacctacgtggagggggtatgtgttgtttggttcacatttgagttcctgatgaggattactttttgccccgacaaggtggaattcctcaagtccagcttaaacattattgactgtgtcgccattctgcccttctacttagaggtgggtctcagcggtctgtccagtaaggccgccaaagacgtccttgggtttcttcgtgttgtgcgtttcgtccgcatcctccgaatttttaaattgactcgccattttgtgggcttgcgagtgctcggccacaccttgagggcaagcacgaacgaattcctgttactcataattttcttagctctgggagtcctgatctttgccacaatgatatattacgccgagcgcatcggagcagaccctgacgatatcctgggatccaatcacacctactttaagaatatccccatcggcttctggtgggcagttgttaccatgaccacgctgggttacggcgatatgtatccaaaaacttggtccggcatgctggtcggagctctgtgtgcactcgcaggcgttctgactatcgcaatgcccgtgcctgttatcgtcaacaatttcggaatgtattatagtctggccatggctaagcaaaaactgccaaaaaaaaaaaacaaacacattcctcgacccccccagcctgggtccccaaattactgcaaacccgatccaccccctccgcccccccctcacccccaccacgggtccggagggatctcgcctcccccgcctattacgcctcccagtatgggagttaccgtggccggagcctaccctgctggaccccacacccaccccggactgctgcgtggaggcgccggcgggctgggcatcatgggccttccgccactgcctgcaccaggcgagccctgccccctggctcaagaggaagttatagagattaatagagcagatccacggccaaatggagatcccgccgcagccgcactggcccacgaagattgtcctgccatcgaccaacccgcgatgtcccccgaagacaagtccccaataacacccggtagcagagggcgttacagcagagaccgcgcctgctttctcttgacagactacgcccccagtccggacggctccatccgtaaagctactggggctccaccactaccgccccaggattggcgcaagcctggcccccccagttttctgcccgacctgaatgccaacgccgccgcatggatctctccttag

SEQ ID NO: 295067 - DNA, 2274 bp, Artificial Sequence
  derived and/or modified sequence
atgctgagctctgtgtgtgtgtcctccttccggggccggcagggcgccagcaagcagcagcctgcccccccaccccagcccccagagagccccccacctccacccctgcccccccagcagcagcagcctgcccagcccggccctgctgccagccctgctggccccccagccccccggggccctggggaccggcgggcagagccctgccccggcctgcctgctgctgccatgggccgccacggcggcggcggcggggacagcggcaagatcgtcatcaacgtgggcggcgtgagacatgagacctaccgcagcaccctgcggaccctgcccggcacccggctggccggcctgacagagcctgaggccgccgccaggtttgattatgaccccggggctgatgagttcttctttgacagacaccctggggtgtttgcctacgtgctgaactactacagaacaggcaagctgcactgcccagcagatgtgtgtggccccctgtttgaggaggagctgggcttctggggcattgatgaaacagatgtggaggcctgctgctggatgacctaccggcagcacagagatgctgaggaggccctggacagctttgaggccccagaccctgctggggccgccaatgctgccaatgctgctggggcccatgatggcggcctggatgatgaggccggggccggcggcggcggcctggatggagctggaggagagctgaagaggctgtgcttccaggatgctgggggcggggccggcggccccccaggaggagctggaggagctgggggcacctggtggaggcgctggcagccccgggtgtgggccctgtttgaggacccctacagcagccgggccgcccgctacgtggcctttgccagcctcttcttcatcctgatcagcatcaccaccttctgcctggagacccatgagggcttcatccacatcagcaacaagacagtgacccaggccagccccatccctggggcccccccagagaacatcaccaacgtggaggtggagacagagcccttcctgacctacgtggagggcgtgtgtgtggtgtggttcacctttgagttcctgatgaggatcaccttctgcccagacaaggtggagttcctgaagagcagcctgaacatcatcgactgtgtggccatcctgcccttctacctggaggtgggcctgagcggcctgagcagcaaggccgccaaggatgtgctgggcttcctgcgggtggtgcgctttgtgcgcatcctgcgcatcttcaagctgaccaggcactttgtgggcctgcgggtgctgggccacaccctgcgggccagcaccaatgagttcctgctgctgatcatcttcctggccctgggcgtgctgatctttgccaccatgatctactatgcagagcgcatcggggctgaccctgatgacatcctgggcagcaaccacacctacttcaagaacatccccatcggcttctggtgggccgtggtgaccatgaccaccctgggctacggggacatgtaccccaagacctggagcggcatgctggtgggcgccctgtgtgccctggccggcgtgctgaccatcgccatgcctgtgcctgtgattgtgaacaactttggcatgtactacagcctggccatggccaagcagaagctgcccaagaagaagaacaagcacatcccccggcccccccagcccggcagccccaactactgcaagccagaccccccacctcctcctccaccccacccccaccacggcagcggcggcatcagccccccaccacccatcaccccacccagcatgggcgtgacagtggccggggcctacccagctggcccccacacccaccctggcctgctgcggggcggggccggcggcctgggcatcatgggcctgccccccctgcctgcccctggagagccctgccccctggcccaggaggaggtgattgagatcaacagagctgacccccggcccaacggggaccctgctgctgctgccctggcccacgaggactgcccagccatcgaccagcctgccatgagccctgaggacaagagccccatcaccccaggcagccggggccgctacagccgggaccgggcctgcttcctgctgacagattatgcccccagcccagatggcagcatcaggaaggccactggagccccacccctgcccccccaggactggaggaagccaggcccccccagcttcctgcctgacctgaatgccaatgctgctgcctggatcagcccctag

SEQ ID NO: 295068 - DNA, 2274 bp, Artificial Sequence
  derived and/or modified sequence
atgctgagcagcgtgtgcgtgagcagcttccggggccggcagggcgcctctaaacaacagccagcccccccaccacagcccccagagagtcctcctcctccacctctgcccccccagcagcagcagcccgctcagcccgggccagcagcctcccccgccggaccgcccgcaccgagaggaccaggcgatcggcgggcagaaccttgtcccggattacctgcagccgcaatgggaagacacggtggagggggaggagatagtggaaagatcgtcattaacgttgggggcgtgcgccatgagacctaccgctcaactctccggactttaccgggcactagactggccggactgacggaacccgaggccgcagctcggttcgattatgaccctggcgcagacgagttttttttcgacaggcacccaggtgttttcgcgtatgtgttaaactattacaggacaggcaaattgcactgtccagctgacgtctgtggtcccctgttcgaggaggagttgggattctgggggattgacgaaaccgatgtggaagcatgctgctggatgacataccggcagcaccgagatgcggaggaggccctggacagcttcgaagcaccagaccccgccggggccgcaaatgccgccaacgctgctggagcacacgatggggggctggatgatgaggctggagccggcggcggaggtcttgatggcgcgggcggcgaattgaaacggctctgttttcaggacgcaggtgggggcgccggcggcccaccaggaggagccggtggcgccggcggaacttggtggcgtaggtggcagcccagggtgtgggcactttttgaagacccgtactctagtagggccgccaggtatgtggccttcgcctcactgttcttcatcctgatatccatcacaactttctgcctcgaaacacacgaggggttcattcacatatctaacaaaactgttacacaagccagcccaattcccggagctcctccagaaaacatcacaaacgtcgaagttgagacagaacccttcttaacatatgtcgagggggtctgtgtagtttggtttacttttgagtttctgatgcgtataacattctgccccgacaaagttgagtttttaaaaagtagtttaaacatcattgactgtgtggccatattgccattttatcttgaagtcggtttgagtggcctgtcttccaaagcagccaaggatgttctgggattcctgagagtcgttcggttcgtgcggatcttgcggatcttcaaactgaccagacatttcgttggattacgggtcctgggccacacacttagggcatccacgaacgaattcctgctgttaataatatttctagctctcggggtcttaatctttgccactatgatctactacgcggaaaggattggggccgacccagatgatatcctggggagcaatcatacatattttaagaacatccctattggattttggtgggctgtagtcactatgacaaccttaggttacggggatatgtatccaaagacctggtcaggaatgttggttggtgctttgtgtgcactggcaggagttcttaccatcgctatgccggtacctgtgattgtgaataattttgggatgtactattccctcgcaatggccaaacaaaaattacctaagaagaaaaacaaacacatcccaaggccacctcagcccggatcaccgaattactgcaagcccgatcctccaccacctcccccgcctcacccccaccacggctctggaggcattagcccacctccaccgatcactccgccttcaatgggagtgacagtcgctggcgcttatccagcaggacctcacacccaccctggacttctgcgggggggtgctgggggcttaggaatcatgggcctgccaccactcccagctccaggggagccctgcccacttgcacaggaggaggtcattgagatcaatcgtgccgaccctcgacccaatggcgaccctgctgccgccgcactcgctcacgaggactgccctgcaatagatcagcccgccatgtcccccgaggacaagtcaccaatcactcccgggagcagaggcaggtactctagggacagagcctgcttccttctaacagattacgcgcctagcccagacggcagcattagaaaggctacaggagccccccctctgccccctcaagactggaggaagccggggccgccctccttcctgcctgacttgaatgcgaatgcagctgcgtggatcagtccttag

SEQ ID NO: 295069 - DNA, 3176 bp, Artificial Sequence
  derived and/or modified sequence
accggtcccgcctcccttgacgccccgccccgcccctcctccctgctctcttagaaagagccaatcgctccgtctcattggcggccccgactcgtccagctgggtcgcgttagagtgcccgccccactcctcccagccacagccccgccccacctcccccaggccaatcagtttggttcctctcccctaagccacgcccccgctacctcgctcctcctcccacccaatcccgtcggtctctccccccgtgtccccgcccctgcgtccccgcccctcccgccccgccccccgtccaatgctgagctcagtctgcgtctcgtccttccgcgggcgccagggggccagcaagcagcagccggcgccaccgccgcagccgcccgagtccccgccgccgccaccgctgccgccgcagcagcagcagcctgcgcagcccggccccgccgcgtccccggcgggccccccggcaccccgcgggcccggggaccggcgcgccgagccatgccccgggctgccggcggcggccatggggcggcacggcggcggcggtggcgacagcggcaagatcgtgatcaacgtgggcggcgtgcgccatgagacgtaccgctcgacgctgcgcaccctgccggggacgcggctggccggcctgacggagcccgaggcggcggcacgcttcgactacgacccgggcgccgacgagttcttctttgaccggcacccgggagtcttcgcgtacgtgctcaactactaccgcaccggcaagctgcactgcccagccgacgtgtgcgggcccctgtttgaggaggagctcggcttctggggcatcgacgagaccgacgtggaggcctgctgctggatgacctaccggcagcatcgcgacgctgaggaggcgctcgactccttcgaggcgcccgaccccgcgggcgccgccaacgccgccaacgccgcaggcgcccacgacggaggcctggacgacgaggcgggcgcgggcggcggcggcctggacggagcgggcggcgagctcaagcgcctctgcttccaggacgcgggcggcggcgccggggggccgccagggggcgcgggcggcgcgggcggcacatggtggcgccgctggcagccccgcgtgtgggcgctcttcgaggacccctactcgtcgcgggctgccaggtatgtggccttcgcctccctcttcttcatcctcatctccatcaccaccttctgcctggaaacccatgagggcttcatccatattagcaacaagacggtgacccaggcctccccgatccccggggcacctccggagaacatcaccaacgtggaggtggagacggagcccttcctgacctacgtggagggggtgtgcgtggtctggttcaccttcgagttcctcatgcgcatcaccttctgcccagacaaggtggagtttcttaaaagcagcctcaacatcatcgactgtgtggccatcctgcccttctatctcgaggtgggcctctcgggcctcagctccaaggccgccaaagacgtgctgggcttcctgcgggtggtccgcttcgtccgcatcctgcgcatcttcaagctgacccggcacttcgtggggctgcgcgtgctgggacacacgctccgcgccagcaccaacgagttcctgctgctcatcatcttcctggccctgggggtgctcatcttcgccaccatgatttactacgctgagcgcattggcgccgaccccgatgacatcctgggctccaaccacacctacttcaagaacatccccattggcttctggtgggctgtggtcaccatgacgaccctgggctatggagacatgtaccccaagacgtggtcggggatgctggtcggggcgctgtgtgccctggcgggggtgctgaccatcgccatgcctgtgcccgtcattgtcaacaactttggcatgtactattcgctggccatggccaagcagaagctgcccaagaagaagaacaaacacatcccccggcccccgcaaccgggctcgcccaactactgcaagcctgacccacccccgccacccccgccccacccgcaccacggcagcgggggcatcagcccgccgccacccatcaccccaccctccatgggggtgactgtggccggggcctacccagcggggccccacacgcaccccgggctgctcagggggggagcgggtgggctggggatcatggggctgcctcctctgccagcccccggcgagccttgcccgttggctcaggaggaggtgattgagatcaaccgggcagatcctcgccccaatggggatccggcagcagctgcgcttgcccacgaggactgcccagccattgaccagcctgccatgtccccggaagacaagagccccatcacgcctggaagccgtggccgctatagccgggaccgagcctgcttcctcctcaccgactatgccccttcccctgatggctccatccgaaaagccactggtgctcccccactgcccccccaagactggcgtaagccaggccccccaagcttcttgcccgacctcaacgccaacgccgcggcctggatatccccctagtggacgaaccccctccccccgggctcttgtcaccgcctgagacctcgcgagactttcggtcccccccgccccttccccccaggttagcaattgggaatggctgggagggggtgtccccaagacactgggcttcaaatctccccccaagccctccctcctacgatcaagacaccttttgtccagacagctcccttagcgttgcctggaaaagccacagagctccctgcgggggtgcagaaccctgcaggcagccccaggctttgcagaaaccacacacactgttgctggatcttgagtcccattagctgtgagatgcctgtgagagccttcccgcacccgtcagaagctcagagccttcttggaccctttaaagatgtccctctccccagccctccgcctcaccgccccccacccccgaccccgtccttagaatcttctggaggagcctccctccccccccacccccccccactgctcctggagttctcatcggattccccaagggcactgccagcttcgctccactcagcccccttgcagaccccaccccctgcctgctctctttccctacaactaggtcagcccccagccccgctacggcggccgc

SEQ ID NO: 295070 - DNA, 2274 bp, Artificial Sequence
  derived and/or modified sequence
atgctgtcctctgtctgcgtctcgagcttccgcggacgacaaggagctagtaaacaacaaccagctccccctccacagccacccgagagccctcctcctcctccactgccccctcagcagcagcagcccgcacagccagggccagccgcttctcctgcagggccaccggctccgagaggccctggtgataggagagcggaaccatgtcctggtctgcctgcagccgcaatggggaggcatggaggcggtggtggcgacagtggtaaaattgtcatcaatgtcggaggagtcaggcacgaaacgtatagaagtaccctcagaacgctgcctgggactcgacttgcaggacttacggagccagaagctgccgcacggtttgattacgatcctggggcagatgagttctttttcgaccgacaccccggtgtcttcgcgtatgtgctgaattattacagaacaggcaagctccactgccctgcagacgtatgcggtcccttatttgaagaagaactgggcttctggggcatcgatgagacggacgtagaggcctgttgctggatgacctacaggcaacaccgggacgctgaggaagccctggatagttttgaggcacccgacccggcaggtgcggctaatgctgctaacgcagctggggctcatgatggagggctcgacgacgaagcaggagcgggtggaggtggactagacggggcaggcggtgaactgaagcggctttgcttccaagacgcgggaggtggcgcagggggaccacctggcggtgctggcggagcaggtggaacctggtggcggagatggcagcccagagtctgggccctgttcgaggatccgtattcctctcgggctgctcgctacgtagcctttgccagcctgtttttcatcctgattagcattaccactttctgcctggaaactcacgagggctttatccacatcagtaacaaaacagtcactcaagcgagcccaatccctggggcacctcctgagaatataaccaacgtggaagtagagaccgagccattcctcacatatgttgaaggggtctgcgtcgtctggttcacttttgagtttctgatgcgtatcacgttttgtcctgacaaggtcgagtttctaaaatccagccttaacatcattgattgtgttgccatacttccattctatttggaggtgggccttagtggactgtcatccaaggccgctaaagatgttctgggctttctgagagttgttagatttgtgaggatactccggatcttcaaactgacgaggcatttcgtagggctcagagtcttggggcatacgctgcgggcttcaactaacgagttcctgctgctgattatcttcctggcgcttggggtcttgatctttgctacaatgatctattatgccgaaaggattggggcagatccggacgatatcctgggctccaaccatacctacttcaaaaacatccccataggattttggtgggcagtggtgacaatgaccaccctgggatatggcgatatgtaccctaagacatggtccggcatgcttgttggggctttgtgcgctcttgccggtgtccttaccatcgctatgccagtccctgttatcgtgaacaatttcggtatgtattactcccttgctatggcgaaacagaaattgccaaagaagaaaaacaagcatataccacggcctccgcagcccggatctcccaattattgcaagcccgatcctccaccccctccgcctcctcatcctcaccatggcagcggagggatcagtccgcctcctcctatcacgcctcccagcatgggcgtcaccgtagccggtgcatacccagcaggccctcacacacatccgggattactgcgcggaggagcgggaggacttggtatcatgggcctgcccccactgcccgcacccggagaaccttgtccgctggcccaagaagaggtgatagagatcaaccgggcagatcctcggccaaatggcgatcccgctgctgccgctctggcccatgaggattgccctgccattgaccagcctgctatgtctcctgaagacaagagcccaattaccccaggctcccggggaaggtatagccgagaccgcgcatgttttctgctgaccgattacgccccttctcctgacgggagtattcgtaaagccacaggggctccacccctgcctcctcaggattggcggaagcccggacctcccagtttcttgccagacctcaacgcaaatgcagctgcatggataagcccctag

SEQ ID NO: 295071 - DNA, 2274 bp, Artificial Sequence
  derived and/or modified sequence
atgctgagcagcgtgtgcgtgagcagcttcagaggcagacagggcgccagcaagcagcagcccgccccccccccccagccccccgagagccccccccccccccccctgcccccccagcagcagcagcccgcccagcccggccccgccgccagccccgccggcccccccgcccccagaggccccggcgacagaagagccgagccctgccccggcctgcccgccgccgccatgggcagacacggcggcggcggcggcgacagcggcaagatcgtgatcaacgtgggcggcgtgagacacgagacctacagaagcaccctgagaaccctgcccggcaccagactggccggcctgaccgagcccgaggccgccgccagattcgactacgaccccggcgccgacgagttcttcttcgacagacaccccggcgtgttcgcctacgtgctgaactactacagaaccggcaagctgcactgccccgccgacgtgtgcggccccctgttcgaggaggagctgggcttctggggcatcgacgagaccgacgtggaggcctgctgctggatgacctacagacagcacagagacgccgaggaggccctggacagcttcgaggcccccgaccccgccggcgccgccaacgccgccaacgccgccggcgcccacgacggcggcctggacgacgaggccggcgccggcggcggcggcctggacggcgccggcggcgagctgaagagactgtgcttccaggacgccggcggcggcgccggcggcccccccggcggcgccggcggcgccggcggcacctggtggagaagatggcagcccagagtgtgggccctgttcgaggacccctacagcagcagagccgccagatacgtggccttcgccagcctgttcttcatcctgatcagcatcaccaccttctgcctggagacccacgagggcttcatccacatcagcaacaagaccgtgacccaggccagccccatccccggcgccccccccgagaacatcaccaacgtggaggtggagaccgagcccttcctgacctacgtggagggcgtgtgcgtggtgtggttcaccttcgagttcctgatgagaatcaccttctgccccgacaaggtggagttcctgaagagcagcctgaacatcatcgactgcgtggccatcctgcccttctacctggaggtgggcctgagcggcctgagcagcaaggccgccaaggacgtgctgggcttcctgagagtggtgagattcgtgagaatcctgagaatcttcaagctgaccagacacttcgtgggcctgagagtgctgggccacaccctgagagccagcaccaacgagttcctgctgctgatcatcttcctggccctgggcgtgctgatcttcgccaccatgatctactacgccgagagaatcggcgccgaccccgacgacatcctgggcagcaaccacacctacttcaagaacatccccatcggcttctggtgggccgtggtgaccatgaccaccctgggctacggcgacatgtaccccaagacctggagcggcatgctggtgggcgccctgtgcgccctggccggcgtgctgaccatcgccatgcccgtgcccgtgatcgtgaacaacttcggcatgtactacagcctggccatggccaagcagaagctgcccaagaagaagaacaagcacatccccagacccccccagcccggcagccccaactactgcaagcccgacccccccccccccccccccccccacccccaccacggcagcggcggcatcagcccccccccccccatcaccccccccagcatgggcgtgaccgtggccggcgcctaccccgccggcccccacacccaccccggcctgctgagaggcggcgccggcggcctgggcatcatgggcctgccccccctgcccgcccccggcgagccctgccccctggcccaggaggaggtgatcgagatcaacagagccgaccccagacccaacggcgaccccgccgccgccgccctggcccacgaggactgccccgccatcgaccagcccgccatgagccccgaggacaagagccccatcacccccggcagcagaggcagatacagcagagacagagcctgcttcctgctgaccgactacgcccccagccccgacggcagcatcagaaaggccaccggcgccccccccctgcccccccaggactggagaaagcccggcccccccagcttcctgcccgacctgaacgccaacgccgccgcctggatcagcccctag

SEQ ID NO: 295072 - protein, 415 aa, Artificial Sequence
  derived and/or modified sequence
MQRSIMSFFHPKKEGKAKKPEKEASNSSRETEPPPKAALKEWNGVVSESDSPVKRPGRKAARVLGSEGEEEDEALSPAKGQKPALDCSQVSPPRPATSPENNASLSDTSPMDSSPSGIPKRRTEEETPKESLTEAEVATEKEGEDGDQPTTPPKPLKTSKAETPTESVSEPEVATKQELQEEEEQTKPPRRAPKTLSSFFTPRKPAVKKEVKEEEPGAPGKEGAAEGPLDPSGYNPAKNNYHPVEDACWKPGQKVPYLAVARTFEKIEEVSARLRMVETLSNLLRSVVALSPPDLLPVLYLSLNHLGPPQQGLELGVGDGVLLKAVAQATGRERRETRSHNCHPRHPHPRSPLKVGSWSPSGLRQPRKATWGWWPRTAAAPRGSCCHHLRSLPPGSSASSATSPGSLAVLPQPRR

SEQ ID NO: 295073 - protein, 832 aa, Artificial Sequence
  derived and/or modified sequence
VCCPGSGARDQRKARLTDEEKCWTGRENSDANMQRSIMSFFHPKKEGKAKKPEKEASNSSRETEPPPKAALKEWNGVVSESDSPVKRPGRKAARVLGSEGEEEDEALSPAKGQKPALDCSQVSPPRPATSPENNASLSDTSPMDSSPSGIPKRRTARKQLPKRTIQEVLEEQSEDEDREAKRKKEEEEETPKESLTEAEVATEKEGEDGDQPTTPPKPLKTSKAETPTESVSEPEVATKQELQEEEEQTKPPRRAPKTLSSFFTPRKPAVKKEVKEEEPGAPGKEGAAEGPLDPSGYNPAKNNYHPVEDACWKPGQKVPYLAVARTFEKIEEVSARLRMVETLSNLLRSVVALSPPDLLPVLYLSLNHLGPPQQGLELGVGDGVLLKAVAQATGRQLESVRAEAAEKGDVGLVAENSRSTQRLMLPPPPLTASGVFSKFRDIARLTGSASTAKKIDIIKGLFVACRHSEARFIARSLSGRLRLGLAEQSVLAALSQAVSLTPPGQEFPPAMVDAGKGKTAEARKTWLEEQGMILKQTFCEVPDLDRIIPVLLEHGLERLPEHCKLSPGIPLKPMLAHPTRGISEVLKRFEEAAFTCEYKYDGQRAQIHALEGGEVKIFSRNQEDNTGKYPDIISRIPKIKLPSVTSFILDTEAVAWDREKKQIQPFQVLTTRKRKEVDASEIQVQVCLYAFDLIYLNGESLVREPLSRRRQLLRENFVETEGEFVFATSLDTKDIEQIAEFLEQSVKDSCEGLMVKTLDVDATYEIAKRSHNWLKLKKDYLDGVGDTLDLVVIGAYLGRGKRAGRYGGFLLASYDEDSEELQAICKVLGNWG

SEQ ID NO: 295074 - DNA, 1248 bp, Artificial Sequence
  derived and/or modified sequence
atgcagagaagcatcatgagcttcttccaccccaagaaggagggcaaggccaagaagcccgagaaggaggccagcaacagcagcagagagaccgagcccccccccaaggccgccctgaaggagtggaacggcgtggtgagcgagagcgacagccccgtgaagagacccggcagaaaggccgccagagtgctgggcagcgagggcgaggaggaggacgaggccctgagccccgccaagggccagaagcccgccctggactgcagccaggtgagcccccccagacccgccaccagccccgagaacaacgccagcctgagcgacaccagccccatggacagcagccccagcggcatccccaagagaagaaccgaggaggagacccccaaggagagcctgaccgaggccgaggtggccaccgagaaggagggcgaggacggcgaccagcccaccaccccccccaagcccctgaagaccagcaaggccgagacccccaccgagagcgtgagcgagcccgaggtggccaccaagcaggagctgcaggaggaggaggagcagaccaagccccccagaagagcccccaagaccctgagcagcttcttcacccccagaaagcccgccgtgaagaaggaggtgaaggaggaggagcccggcgcccccggcaaggagggcgccgccgagggccccctggaccccagcggctacaaccccgccaagaacaactaccaccccgtggaggacgcctgctggaagcccggccagaaggtgccctacctggccgtggccagaaccttcgagaagatcgaggaggtgagcgccagactgagaatggtggagaccctgagcaacctgctgagaagcgtggtggccctgagcccccccgacctgctgcccgtgctgtacctgagcctgaaccacctgggccccccccagcagggcctggagctgggcgtgggcgacggcgtgctgctgaaggccgtggcccaggccaccggcagagagagaagagagaccagaagccacaactgccaccccagacacccccaccccagaagccccctgaaggtgggcagctggagccccagcggcctgagacagcccagaaaggccacctggggctggtggcccagaaccgccgccgcccccagaggcagctgctgccaccacctgagaagcctgccccccggcagcagcgccagcagcgccaccagccccggcagcctggccgtgctgccccagcccagaagatag

SEQ ID NO: 295075 - DNA, 2499 bp, Artificial Sequence
  derived and/or modified sequence
gtgtgctgccccggcagcggcgccagagaccagagaaaggccagactgaccgacgaggagaagtgctggaccggcagagagaacagcgacgccaacatgcagagaagcatcatgagcttcttccaccccaagaaggagggcaaggccaagaagcccgagaaggaggccagcaacagcagcagagagaccgagcccccccccaaggccgccctgaaggagtggaacggcgtggtgagcgagagcgacagccccgtgaagagacccggcagaaaggccgccagagtgctgggcagcgagggcgaggaggaggacgaggccctgagccccgccaagggccagaagcccgccctggactgcagccaggtgagcccccccagacccgccaccagccccgagaacaacgccagcctgagcgacaccagccccatggacagcagccccagcggcatccccaagagaagaaccgccagaaagcagctgcccaagagaaccatccaggaggtgctggaggagcagagcgaggacgaggacagagaggccaagagaaagaaggaggaggaggaggagacccccaaggagagcctgaccgaggccgaggtggccaccgagaaggagggcgaggacggcgaccagcccaccaccccccccaagcccctgaagaccagcaaggccgagacccccaccgagagcgtgagcgagcccgaggtggccaccaagcaggagctgcaggaggaggaggagcagaccaagccccccagaagagcccccaagaccctgagcagcttcttcacccccagaaagcccgccgtgaagaaggaggtgaaggaggaggagcccggcgcccccggcaaggagggcgccgccgagggccccctggaccccagcggctacaaccccgccaagaacaactaccaccccgtggaggacgcctgctggaagcccggccagaaggtgccctacctggccgtggccagaaccttcgagaagatcgaggaggtgagcgccagactgagaatggtggagaccctgagcaacctgctgagaagcgtggtggccctgagcccccccgacctgctgcccgtgctgtacctgagcctgaaccacctgggccccccccagcagggcctggagctgggcgtgggcgacggcgtgctgctgaaggccgtggcccaggccaccggcagacagctggagagcgtgagagccgaggccgccgagaagggcgacgtgggcctggtggccgagaacagcagaagcacccagagactgatgctgccccccccccccctgaccgccagcggcgtgttcagcaagttcagagacatcgccagactgaccggcagcgccagcaccgccaagaagatcgacatcatcaagggcctgttcgtggcctgcagacacagcgaggccagattcatcgccagaagcctgagcggcagactgagactgggcctggccgagcagagcgtgctggccgccctgagccaggccgtgagcctgaccccccccggccaggagttcccccccgccatggtggacgccggcaagggcaagaccgccgaggccagaaagacctggctggaggagcagggcatgatcctgaagcagaccttctgcgaggtgcccgacctggacagaatcatccccgtgctgctggagcacggcctggagagactgcccgagcactgcaagctgagccccggcatccccctgaagcccatgctggcccaccccaccagaggcatcagcgaggtgctgaagagattcgaggaggccgccttcacctgcgagtacaagtacgacggccagagagcccagatccacgccctggagggcggcgaggtgaagatcttcagcagaaaccaggaggacaacaccggcaagtaccccgacatcatcagcagaatccccaagatcaagctgcccagcgtgaccagcttcatcctggacaccgaggccgtggcctgggacagagagaagaagcagatccagcccttccaggtgctgaccaccagaaagagaaaggaggtggacgccagcgagatccaggtgcaggtgtgcctgtacgccttcgacctgatctacctgaacggcgagagcctggtgagagagcccctgagcagaagaagacagctgctgagagagaacttcgtggagaccgagggcgagttcgtgttcgccaccagcctggacaccaaggacatcgagcagatcgccgagttcctggagcagagcgtgaaggacagctgcgagggcctgatggtgaagaccctggacgtggacgccacctacgagatcgccaagagaagccacaactggctgaagctgaagaaggactacctggacggcgtgggcgacaccctggacctggtggtgatcggcgcctacctgggcagaggcaagagagccggcagatacggcggcttcctgctggccagctacgacgaggacagcgaggagctgcaggccatctgcaaggtgctgggcaactggggctag

SEQ ID NO: 295076 - DNA, 1248 bp, Artificial Sequence
  derived and/or modified sequence
atgcagcgatcaattatgtccttttttcatcccaagaaagaaggcaaggctaaaaaacccgaaaaggaagcctccaacagctccagggaaactgagccacccccaaaagccgccctaaaagagtggaacggggttgtcagcgaaagtgactccccagtgaagagacccgggcgcaaagccgcccgggtactgggctcggagggagaggaggaggatgaggctctcagtcccgccaagggacaaaaacctgccctggactgttctcaggtctcccctcctaggccagcgacctcccccgagaacaatgctagtcttagtgatacatcccccatggattctagccccagcggtatccccaagcgccgaacggaggaagaaacacccaaggaatcattaaccgaagcagaggtcgccaccgagaaagagggagaggacggcgaccagccaacgacacctcctaagcctctcaaaaccagcaaggccgaaaccccaacagaatccgtgagcgaacctgaggttgctaccaaacaggagctccaggaagaagaggagcagacaaaacctccgcgacgggcccctaagacactcagctcattcttcacaccacgcaagcccgctgttaaaaaagaggtcaaagaggaggagccaggagctcccggcaaggagggggccgccgagggcccactcgacccatcggggtacaacccagctaagaataactatcatccggtggaggatgcctgttggaaacctggtcagaaggtgccctatctcgctgttgctcggacattcgaaaagatagaggaagttagtgccagactgcgaatggtagagacattaagtaatcttctgagaagcgtcgtggccttatcaccaccagatctcctccccgtgctatatctcagcctgaatcaccttgggcccccccagcaaggtcttgagctgggtgtgggagatggggttttgcttaaggccgttgcgcaggccaccgggcgagagagaagggagacacggagtcacaactgtcaccctagacacccccaccctagaagccctctgaaggtgggcagctggtctcccagtgggcttcgtcaacccagaaaggccacctggggatggtggcccagaacagctgcagcaccacgtggctcatgctgtcatcatctgagatctctcccaccaggcagttctgcttcaagcgctacctccccgggttcgcttgccgtactccctcagccccgcagatag

SEQ ID NO: 295077 - DNA, 2499 bp, Artificial Sequence
  derived and/or modified sequence
gtgtgttgtcctgggtctggggccagggaccagagaaaggctagattgacagatgaagagaaatgttggacagggagagagaactccgacgccaacatgcagcgcagcatcatgtctttcttccatcctaaaaaggaggggaaggctaagaagcccgagaaggaggcttcaaacagctcccgggagactgagccaccacccaaggcagccttaaaggaatggaacggcgtggtgtccgaaagcgatagtccagtgaaaagacctggaaggaaggccgcaagagttctcggtagcgagggagaagaagaggacgaggcactctccccagcaaagggccagaagccagctttggactgtagccaggtaagcccgccacgacccgcaacgtcccccgaaaacaatgcatctctgtccgatacctcacctatggatagcagccctagcggtatccctaagcgccggacggcaagaaagcagcttccaaagagaaccatccaggaggtgctggaagaacagtccgaagatgaagaccgggaggcgaaacggaaaaaggaggaggaggaggagactcccaaagaatccctcactgaggcggaggtcgccaccgaaaaagaaggagaggatggggatcagcctacaacccctccgaaacctctaaagacaagcaaggcagagaccccgacggaatccgtgagcgagccagaagtggcaacaaaacaggagctgcaggaagaggaagagcagacaaagcctcccaggcgcgccccgaaaacgttgtcgagtttttttactccacgcaagcctgcggtcaagaaagaagttaaagaagaagaacctggggcccccggtaaagaaggcgctgccgaaggacccctcgatccaagcggctataacccagctaagaacaactaccaccccgtagaagacgcttgctggaagccagggcagaaagtaccttacctggcagtggcccggacattcgagaagatcgaagaggtttcagcaaggctaaggatggtcgagactctgtcaaacctgctgcggagtgtcgtggccttgtcccccccggacctgctcccagttctctacctgtccctgaatcatctgggacccccccagcagggcctggaacttggcgtgggagatggagtgctcctcaaggccgtggcccaggccaccggcagacagctcgaatctgtgagagccgaagccgccgaaaagggcgacgtgggactcgtggctgaaaactcaaggtcgacacaacggttgatgttgcccccaccacccctgaccgccagcggggtattcagtaagtttagagacattgcgaggctaaccggtagtgccagcacggccaaaaagatcgatataatcaaaggcctttttgtggcatgccgccattctgaagcccggtttattgcaaggtctttgtcaggcaggctgcggctgggcttggctgaacagtccgtgctggccgccttaagtcaggcagtttctctgactcctcctggccaggagtttccccccgcaatggtggatgccggaaagggaaaaactgcggaggctcggaagacctggttggaggaacagggtatgattttgaagcagaccttttgtgaggtccctgatctggatcggatcatacccgtgttactggagcatggactggaaaggttgcctgagcattgcaaattgagcccaggcattcccttaaagccaatgctggctcatcctaccaggggcatcagtgaagtcctgaaacgttttgaggaagctgcctttacctgtgagtacaagtacgatggccagcgcgcacagatccacgccctcgaggggggagaagttaaaattttcagtcggaaccaagaggataatacaggaaaatatcccgacataataagcaggatcccaaagatcaagctgccatccgttacctcattcatcctcgacactgaggccgtggcatgggatcgggagaaaaagcagattcagccatttcaggtgctcaccacacgtaagaggaaagaggtcgatgcttccgaaattcaggtgcaggtgtgtctctatgcattcgatttgatctatttgaatggagaatccctcgtgagggagcctctgtctaggcgccggcagctgctccgcgaaaactttgtggagaccgaaggagagttcgttttcgccacgtctctcgacacaaaggatattgaacagattgccgagttcctggaacagtctgtcaaagactcctgtgaaggtctgatggtgaagactcttgacgtggacgctacttatgaaatcgcaaaacgaagccataattggctgaaactgaagaaagattacctcgacggcgtcggggataccctggatctagtggtcatcggagcgtatctcggtaggggtaagcgcgccggcagatacggtggtttcttattagcgtcgtatgatgaggactcagaagagctgcaggctatttgtaaggttctcggcaactggggatag

SEQ ID NO: 295078 - DNA, 1248 bp, Artificial Sequence
  derived and/or modified sequence
atgcagaggagcatcatgtccttcttccaccccaagaaggagggcaaggccaagaagccagagaaggaggccagcaacagcagccgggagacagagcccccacccaaggccgccctgaaggagtggaatggagtggtgtctgagagtgacagccctgtgaagaggcctggcaggaaggccgcccgggtgctgggcagcgagggggaggaggaggatgaggccctgagccctgccaagggccagaagccagccctggactgcagccaggtgagcccccccaggcctgccaccagccctgagaacaatgccagcctgagtgacaccagccccatggacagcagccccagcggcatccccaagagaagaacagaggaggagacccccaaggagagcctgacagaagctgaggtggccacagagaaggagggggaggatggagaccagcccaccaccccacccaagcccctgaagaccagcaaggccgagacccccacagaatctgtgtctgagcctgaggtggccaccaagcaggagctgcaggaggaggaggagcagaccaagccaccccggcgggcccccaagaccctgagcagcttcttcacccccaggaagccagctgtgaagaaggaggtgaaggaggaggagcccggggcccctgggaaggagggcgctgctgagggccccctggaccccagcggctacaacccagccaagaacaactaccaccctgtggaggatgcctgctggaagccaggccagaaggtgccctacctggccgtggcccggacctttgagaagattgaggaggtgtctgcccggctgaggatggtggagaccctgagcaacctgctgcggtctgtggtggccctgagccccccagacctgctgcctgtgctgtacctgagcctgaaccacctgggccccccccagcagggcctggagctgggcgtgggagatggagtgctgctgaaggctgtggcccaggccaccggccgggagcggcgggagaccaggagccacaactgccaccccaggcacccccaccccaggagccccctgaaggtgggctcctggagccccagcggcctgcggcagcccaggaaggccacctggggctggtggcccaggacagctgctgccccccggggcagctgctgccaccacctgcggagcctgcccccaggcagcagcgccagcagcgccaccagccctggcagcctggccgtgctgccccagcccaggaggtag

SEQ ID NO: 295079 - DNA, 2499 bp, Artificial Sequence
  derived and/or modified sequence
gtgtgctgccccggcagcggggcccgggaccagaggaaggcccggctgacagatgaggagaagtgctggacaggaagagaaaattctgatgccaacatgcagaggagcatcatgtccttcttccaccccaagaaggagggcaaggccaagaagccagagaaggaggccagcaacagcagccgggagacagagcccccacccaaggccgccctgaaggagtggaatggagtggtgtctgagagtgacagccctgtgaagaggcctggcaggaaggccgcccgggtgctgggcagcgagggggaggaggaggatgaggccctgagccctgccaagggccagaagccagccctggactgcagccaggtgagcccccccaggcctgccaccagccctgagaacaatgccagcctgagtgacaccagccccatggacagcagccccagcggcatccccaagagaagaacagccaggaagcagctgcccaagaggaccatccaggaggtgctggaggagcagagtgaagatgaggaccgggaggccaagaggaagaaggaggaggaggaggagacccccaaggagagcctgacagaggccgaggtggccacagagaaggagggagaagatggagaccagcccaccaccccacccaagcccctgaagaccagcaaggccgagacccccacagagagcgtgtctgagcctgaggtggccaccaagcaggagctgcaggaggaggaggagcagaccaagcccccaagaagagcccccaagaccctgagcagcttcttcacccccaggaagccagctgtgaagaaggaggtgaaggaggaggagcccggggcccctgggaaggagggcgctgctgagggccccctggaccccagcggctacaacccagccaagaacaactaccaccctgtggaggatgcctgctggaagccaggccagaaggtgccctacctggccgtggcccggacctttgagaagattgaggaggtgtctgcccggctgaggatggtggagaccctgagcaacctgctgcggtctgtggtggccctgagccccccagacctgctgcctgtgctgtacctgagcctgaaccacctgggccccccccagcagggcctggagctgggcgtgggagatggagtgctgctgaaggctgtggcccaggccaccggccggcagctggagagcgtgcgggcagaggccgctgagaagggagatgtgggcctggtggccgagaacagccgcagcacccagaggctgatgctgcccccaccacccctgacagccagcggggtcttcagcaagttccgggacatcgcccggctgaccggcagcgccagcacagccaagaagattgacatcatcaagggcctgtttgtggcctgccgccacagcgaggcccgcttcatcgcccggagcctgagcggccgcctgcggctgggcctggccgagcagagcgtgctggccgccctgagccaggccgtgtccctgaccccacctggccaggagttccccccagccatggtggatgctgggaagggcaagacagctgaggccaggaagacctggctggaggagcagggcatgatcctgaagcagaccttctgtgaggtgcctgacctggaccgcatcatccctgtgctgctggagcacggcctggagcggctgcctgagcactgcaagctgagccctggcatccccctgaagcccatgctggcccaccccacccggggcatcagcgaggtgctgaagagatttgaggaggccgccttcacctgtgagtacaagtatgatggccagagggcccagatccacgccctggagggcggggaggtgaagatcttcagcaggaaccaggaggacaacacaggcaagtacccagacatcatcagccgcatccccaagatcaagctgcccagcgtgaccagcttcatcctggacacagaagctgtggcctgggaccgggagaagaagcagatccagcccttccaggtgctgaccaccaggaagaggaaggaggtggatgccagcgagatccaggtgcaggtgtgcctgtatgcctttgacctgatctacctgaatggagagagcctggtgcgggagcccctgagcagaagacggcagctgctgagagaaaattttgtggagacagaaggagaatttgtgtttgccaccagcctggacaccaaggacatcgagcagattgctgagttcctggagcagagcgtgaaggacagctgtgagggcctgatggtgaagaccctggatgtggatgccacctatgagatcgccaagaggagccacaactggctgaagctgaagaaggactacctggatggagtgggggacaccctggacctggtggtgattggagcctacctgggccggggcaagagagctggccgctatggaggcttcctgctggccagctatgatgaggacagcgaggagctgcaggccatctgcaaggtgctgggcaactggggctag

SEQ ID NO: 295080 - DNA, 1527 bp, Artificial Sequence
  derived and/or modified sequence
tggcgcgaacttgggactgcagaggcgcgcctggcggatctgagtgtgttgcccgggcagcggcgcgcgggaccaacgcaaggagcagctgacagacgaagaaaagtgctggacaggaagggagaattctgacgccaacatgcagcgaagtatcatgtcatttttccaccccaagaaagagggtaaagcaaagaagcctgagaaggaggcatccaatagcagcagagagacggagccccctccaaaggcggcactgaaggagtggaatggagtggtgtccgagagtgactctccggtgaagaggccagggaggaaggcggcccgggtcctgggcagcgaaggggaagaggaggatgaagcccttagccctgctaaaggccagaagcctgccctggactgctcacaggtctccccgccccgtcctgccacatctcctgagaacaatgcttccctctctgacacctctcccatggacagttccccatcagggattccgaagcgtcgcacagaagaggagaccccgaaagaaagcctcacagaggctgaagtggccacagagaaggaaggagaagacggggaccagcccaccacgcctcccaagcccctaaagacctccaaagcagagaccccgacggaaagcgtttcagagcctgaggtggccacgaagcaggaactgcaggaggaggaagagcagaccaagcctccccgcagagctcccaagacgctcagcagcttcttcaccccccggaagccagcagtcaaaaaagaagtgaaggaagaggagccaggggctccaggaaaggagggagctgctgagggacccctggatccatctggttacaatcctgccaagaacaactatcatcccgtggaagatgcctgctggaaaccgggccagaaggttccttacctggctgtggcccggacgtttgagaagatcgaggaggtgtctgctcggctccggatggtggagacgctgagcaacttgctgcgctccgtggtggccctgtcgcctccagacctcctccctgtcctctacctcagcctcaaccaccttgggccaccccagcagggcctggagcttggcgtgggtgatggtgtccttctcaaggcagtggcccaggccacaggccgcgagagaagggagacacgcagccacaactgtcaccctcgacacccccacccgcgctctcccctgaaggtcggcagctggagtccgtccgggctgaggcagccgagaaaggcgacgtggggctggtggccgagaacagccgcagcacccagaggctcatgctgccaccacctccgctcactgcctccggggtcttcagcaagttccgcgacatcgccaggctcactggcagtgcttccacagccaagaagatagacatcatcaaaggcctctttgtggcctgccgccactcagaagcccggttcatcgctaggtccctgagcggacggctgcgccttgggctggcagagcagtcggtgctggctgccctctcccaggcagtgagcctcacgccc

SEQ ID NO: 295081 - DNA, 4055 bp, Artificial Sequence
  derived and/or modified sequence
gtgtgttgcccgggcagcggcgcgcgggaccaacgcaaggcaagactgacagacgaagaaaagtgctggacaggaagggagaattctgacgccaacatgcagcgaagtatcatgtcatttttccaccccaagaaagagggtaaagcaaagaagcctgagaaggaggcatccaatagcagcagagagacggagccccctccaaaggcggcactgaaggagtggaatggagtggtgtccgagagtgactctccggtgaagaggccagggaggaaggcggcccgggtcctgggcagcgaaggggaagaggaggatgaagcccttagccctgctaaaggccagaagcctgccctggactgctcacaggtctccccgccccgtcctgccacatctcctgagaacaatgcttccctctctgacacctctcccatggacagttccccatcagggattccgaagcgtcgcacagctcggaagcagctcccgaaacggaccattcaggaagtcctggaagagcagagtgaggacgaggacagagaagccaagaggaagaaggaggaggaagaggagaccccgaaagaaagcctcacagaggctgaagtggccacagagaaggaaggagaagacggggaccagcccaccacgcctcccaagcccctaaagacctccaaagcagagaccccgacggaaagcgtttcagagcctgaggtggccacgaagcaggaactgcaggaggaggaagagcagaccaagcctccccgcagagctcccaagacgctcagcagcttcttcaccccccggaagccagcagtcaaaaaagaagtgaaggaagaggagccaggggctccaggaaaggagggagctgctgagggacccctggatccatctggttacaatcctgccaagaacaactatcatcccgtggaagatgcctgctggaaaccgggccagaaggttccttacctggctgtggcccggacgtttgagaagatcgaggaggtgtctgctcggctccggatggtggagacgctgagcaacttgctgcgctccgtggtggccctgtcgcctccagacctcctccctgtcctctacctcagcctcaaccaccttgggccaccccagcagggcctggagcttggcgtgggtgatggtgtccttctcaaggcagtggcccaggccacaggtcggcagctggagtccgtccgggctgaggcagccgagaaaggcgacgtggggctggtggccgagaacagccgcagcacccagaggctcatgctgccaccacctccgctcactgcctccggggtcttcagcaagttccgcgacatcgccaggctcactggcagtgcttccacagccaagaagatagacatcatcaaaggcctctttgtggcctgccgccactcagaagcccggttcatcgctaggtccctgagcggacggctgcgccttgggctggcagagcagtcggtgctggctgccctctcccaggcagtgagcctcacgcccccgggccaagaattcccaccagccatggtggatgctgggaagggcaagacagcagaggccagaaagacgtggctggaggagcaaggcatgatcctgaagcagacgttctgcgaggttcccgacctggaccgaattatccccgtgctgctggagcacggcctggaacgtctcccggagcactgcaagctgagcccagggattcccctgaaaccaatgttggcccatcccacccggggcatcagcgaggtcctgaaacgctttgaggaggcagctttcacctgcgaatacaaatatgacgggcagagggcacagatccacgccctggaaggcggggaggtgaagatcttcagcaggaatcaggaagacaacactgggaagtacccggacatcatcagccgcatccccaagattaaactcccatcggtcacatccttcatcctggacaccgaagccgtggcttgggaccgggaaaagaagcagatccagccattccaagtgctcaccacccgcaaacgcaaggaggtggatgcgtctgagatccaggtgcaggtgtgtttgtacgccttcgacctcatctacctcaatggagagtccctggtacgtgagcccctttcccggcgccggcagctgctccgggagaactttgtggagacagagggcgagtttgtcttcgccacctccctggacaccaaggacatcgagcagatcgccgagttcctggagcagtcagtgaaagactcctgcgaggggctgatggtgaagaccctggatgttgatgccacctacgagatcgccaagagatcgcacaactggctcaagctgaagaaggactaccttgatggcgtgggtgacaccctggacctggtggtgatcggcgcctacctgggccgggggaagcgggccggccggtacgggggcttcctgctggcctcctacgacgaggacagtgaggagctgcaggccatatgcaaggtcctggggaactggggctgatggcagaagcaggagggaaggagattagactcccgggggtatttcctattgcacaacccagaccgaggggtgctcacatccccctgtgaaggatccgttctccccagtttttatttactttttctggttctatgagcaactcttgcttcatatagaaaaacaggctgggatagaaagatgtcaggaatgtgtgtcagtgagagattgagattagctacaaatagtggtggctcacataagaaaagaatttttttgttatgaaatgagaagtgtggagggggcagtctgatgccattagggattcaggttcctcctctccccacatttttttttgtccccacattttttttttctgccatgtgcctctggcctcatcatcacaatgtggctgcaggagttccagccctcatggccatgcctgctccacgcaccagggaagagcaaagggggttggaccctgagtcagcctcagccagtgaacaccttctgctcaagttctgttgctcatcactttgctccatggctcacccctagctgcaaggaattctgggaaatgtaaagtgatttactttttttcaagttaaagtttttcttaaagctgtgcacattttggactagattttcttacgtatttcctatattcccctctccaacaaatttgggtcttttgccacagaaacagaacaaaatatcacctagaatcgtaccacccagagacacgcagtagtgacatttgagggaatgttttatttacatttttgcaaagttgtgatccttctctatgagtaattttcttttctgcctttttaccctggaagtactttgttttcagtgttgtatatgcccttaagcaatatggcaacaggacctgaatgcccgcacaagagttttcaagtgctgtgccccatagcacatagtgctgtgtcctgaaccagctccccgtggctgtgtggggaagttgttgccggctttgttctgatggcttggaactggcttcagtgatgaggagctggaggagcatcaccagagcctcaaggcgctggtgctgcccagcccacgcccttacgtgcggatagatggcgctgtgattcccgaccactggctggaccccagcgctgtgtgggaggtgaagtgcgctgacctctccctctctcccatctaccctgctgcgcggggcctggtggatagtgacaagggcatctcccttcgcttccctcggtttattcgagtccgtgaagacaagcagccggagcaggccaccaccagtgctcaggtggcctgtttgtaccggaagcaaagtcagattcagaaccaacaaggcgaggactcaggctctgaccctgaagatacctactaagccctcgccctcctagggcctgggtacagggcatgagttggacggaccccagggttattattgcctttgctttttagcaaatctgctgtggcaggctgtggattttgagagtcaggggaggggtgtgtgtgtgagggggtggcttactccggagtctgggattcatcccgtcatttctttcaataaataattattggat

SEQ ID NO: 295082 - DNA, 1248 bp, Artificial Sequence
  derived and/or modified sequence
atgcagcggagcatcatgagcttcttccaccccaagaaggagggcaaagctaaaaagcccgaaaaggaagcttctaatagtagtagagaaacagaacctccacccaaggccgccttgaaggaatggaacggtgtggtatcagaatccgatagccctgttaaacgccccggccgtaaggcggcccgagtgttaggttcagaaggggaggaggaggacgaggccctgagtccagccaaaggccaaaaaccagccctggattgctcacaggtttctccaccccgaccagccacttcaccagagaataatgctagtctttcggacactagccccatggactcgtccccttctgggatcccaaagcgccggactgaggaagagactccaaaggagagcctgaccgaagccgaggtggcgactgagaaggaaggggaggacggagaccagcccacgacccctccgaagcccttgaaaacttctaaggccgagaccccgacagagagcgtttcggaaccagaggtggccacaaagcaagaactccaggaagaggaagaacagacaaagccgcctcgccgggcccccaagaccctctcttcattctttactcccaggaaaccagccgtgaagaaggaggttaaggaggaggagccaggtgccccaggaaaggagggggccgcggaaggcccactcgatcccagcggctataaccctgccaaaaataattatcacccagtcgaggatgcatgctggaagccaggccagaaggtcccctacctggctgtagctagaacatttgagaagattgaggaagtgagcgcacggctgagaatggtggagacattgtccaatttgttaagaagtgtggtagctctgtcccccccagacttattgcctgtgctctacctgtcgttgaaccatcttgggcccccacagcagggcctggaacttggggtaggtgatggtgtattactcaaagcagtggcacaggccactggacgcgaacgtcgggaaaccaggagtcataactgccatccacggcacccacacccgaggagccctctgaaagtgggtagttggtcccctagcggactgagacagcctaggaaagccacctggggatggtggccgcgtacagctgccgcacccagaggctcttgctgtcaccaccttcgtagcctgccccccgggagttcagcatcatcagccacctcaccaggcagcctggcggtgttgccccagccacgcaggtag

SEQ ID NO: 295083 - DNA, 2499 bp, Artificial Sequence
  derived and/or modified sequence
gtgtgctgccccggcagcggcgcccgggaccagcggaaggcccggctgaccgatgaggaaaagtgttggacagggagagagaacagcgacgccaatatgcagagaagtattatgagctttttccaccctaagaaggaggggaaggctaaaaaacctgagaaagaagcttccaattcaagccgggaaacagagcctccacccaaggccgctctcaaggagtggaatggcgtggtatcagaaagcgactctcccgtgaagaggcccggcagaaaggcagcccgcgtcctcggctcagagggggaggaggaggacgaggctctctccccagcaaagggacagaaacccgcactggactgtagccaagtctcgccgcctagacccgccaccagccccgagaacaacgcgagtctaagtgacacgtccccaatggacagctccccgtctggaattccaaagcgccggaccgcccgtaagcagctgccgaagcggaccatccaggaggtgcttgaggaacagtctgaggacgaggatcgcgaggctaaacgaaagaaagaagaggaggaggagacccccaaggaaagcctgactgaagctgaggtggctacggagaaggaaggggaagatggagatcagcctaccaccccaccaaagcccctgaaaacatcgaaagcagaaacacctacagagtccgtgtctgagcctgaagtggccaccaagcaggagctgcaggaagaagaggagcagactaaaccccctcgcagagctccaaaaactctgtcttctttcttcacaccccgcaaacccgccgttaagaaggaggtcaaggaggaagagccaggcgccccgggtaaagagggcgctgccgaaggtccactcgaccctagcggttataaccccgcaaagaataattaccaccccgtggaggacgcatgctggaaacccgggcagaaggtgccctatttggctgttgcccgcacctttgaaaaaatcgaagaagttagcgcacggctgcgaatggttgagacactgtccaacctactgagaagcgtcgtggccctaagtcccccagacttgctccccgtgctttacctcagcttgaaccatcttggccccccccagcaaggcctcgagttgggtgttggcgatggcgtgctgctgaaggccgtggcgcaggcaactgggcgtcagttagagagtgttcgggcggaagccgcagagaagggggacgtcggtctcgtcgccgaaaatagcaggtctacccagcgtttgatgctgcccccaccgcctctcaccgcatcaggcgtattttctaaatttcgagacatcgccagactcactggatcagctagcacagcaaaaaagatcgacatcattaaaggtttgtttgtcgcctgtagacactccgaggcaagatttatcgcaagaagcctgagcgggcgtttgcgccttgggttagccgaacaaagcgtgctcgcggccttgtcccaggcagtatcattgactcctccaggtcaggagtttccccccgccatggtcgacgcaggtaagggcaagacagctgaggcgcgaaaaacgtggctggaagaacagggtatgatcctgaaacagaccttctgtgaagttcctgatcttgaccgcattatccccgtgctgctggagcacggcctcgagcgattgcctgagcattgtaaattgtcccccggtattccactcaaacccatgctcgcccatcccacacggggcatatccgaggtgctgaagagattcgaggaagccgcctttacctgcgagtataagtatgatggtcagcgcgcacaaatccatgctctcgagggcggagaggttaagattttcagcagaaaccaggaagataacaccgggaaataccccgatatcatatcccgcatccccaagatcaagctaccgtctgtcaccagcttcattctggatactgaagctgttgcctgggatagagagaagaaacagattcagccctttcaagtgcttacaactcggaaaaggaaagaggtggacgcctctgagatacaggtgcaggtgtgcctatacgcattcgatctgatttatctaaatggggaatctctggtcagagaacccctcagccgccgccgccagttgttaagggagaacttcgtggaaaccgagggagaatttgtgtttgccaccagtcttgacaccaaagatattgagcagattgctgagtttctggagcaatccgtgaaggactcatgtgagggcttgatggtcaaaacactcgacgtcgatgctacctacgagattgcgaagaggtcacacaactggctcaaactgaaaaaagactacttggacggcgtgggggacacactggatttagtggtaatcggggcgtatttgggtagggggaaacgcgccggccggtacggggggttcctgctggcatcctacgacgaggactctgaggagctgcaggcgatttgcaaagtgctggggaattggggttag

SEQ ID NO: 295084 - DNA, 1248 bp, Artificial Sequence
  derived and/or modified sequence
atgcaacggtccataatgagcttctttcatccgaagaaggagggcaaggcaaaaaaaccagagaaggaggcaagcaatagttcgcgcgaaactgagccaccacctaaggcggcactgaaagaatggaatggagttgtcagcgaatccgactctcctgtgaagcggcctgggaggaaggccgcacgggtgttgggtagcgaaggggaggaggaggatgaagccctttctcctgctaagggccagaagcctgccctggactgttcgcaggtgagccctcccagaccggcaacatctcccgagaataatgcctccttatccgacacctcccccatggattcttctcctagcggcatccctaagcggcgtacggaagaggaaactcccaaggagtcactgaccgaggccgaggtcgctaccgagaaagaaggtgaggatggagaccagccaactactccccctaagccattgaaaacatcaaaggccgagaccccaaccgagtctgtatccgaaccagaagtagccaccaaacaggaacttcaagaagaggaggagcagactaaacctcctcgacgcgctcccaaaacgctcagctctttcttcacccctcgaaagcccgctgtaaaaaaggaggtcaaggaagaggagcccggtgccccaggaaaagaaggagctgcagagggtccactggacccgagcggctacaatcccgcaaagaacaactaccatcctgtggaggacgcctgctggaaacctgggcaaaaggtcccctacctggccgtcgctcgtacattcgaaaagatcgaggaggtcagcgccaggcttagaatggtggagacactttctaacctgctgagatcagtcgtggctctctctccccctgatctgctaccagtgctttatctgagcctaaatcacctcgggcctccacagcagggtttagaactgggggtgggcgatggagtgttgctgaaggccgtcgcccaggccacaggccgagaaagacgtgagaccaggtcacataactgccaccctcggcacccacaccctcggagtccactaaaagtcggctcttggtccccatctggcttgcggcagccacgcaaagccacatggggatggtggcctaggaccgccgctgctccgagggggtcctgctgccatcatctgaggtcattgcccccaggctcttcagcgagttccgcgacaagtccaggctcccttgccgtgctacctcagcctcgccgatag

SEQ ID NO: 295085 - DNA, 2499 bp, Artificial Sequence
  derived and/or modified sequence
gtgtgttgccccggatccggtgcccgtgatcagcggaaagcccgtctaacagatgaagagaaatgctggactggcagggaaaattctgacgcaaacatgcaacgatcgatcatgtctttttttcatcccaagaaggaggggaaggccaagaaaccagagaaagaggcctctaactcctcacgcgaaacggagcccccaccgaaggcagcgctgaaggagtggaacggggtcgtgtccgagagcgatagtcccgtaaaacggcctgggaggaaggccgctagagtcttggggtcagagggtgaggaggaagatgaggccctgtctccagctaaaggacaaaaacctgcattagactgttcccaggtgtctcccccaagacctgccacctccccagaaaataacgccagcctaagtgacacaagccctatggattcgtccccatcaggaatccctaaacgccgaacagcaagaaagcagcttccaaaacgcaccattcaggaggtactggaggaacaaagcgaggatgaggaccgagaagctaagcgaaagaaggaagaagaggaagagactcctaaagagagcctgacagaggctgaagtcgcaactgagaaagagggcgaggatggagaccagccaactaccccgccaaagccactaaaaacaagtaaggcagaaacccctacagaatctgtcagcgaaccagaagtggctacaaaacaggaactccaggaagaggaagagcaaactaaacccccaagacgcgctcctaaaactctttctagctttttcacgccacgaaaacctgccgtcaaaaaggaagtgaaggaggaagagccaggagctccgggtaaggaaggtgccgcagagggacctctggatcctagcggctataacccagccaagaacaattaccacccagtggaagacgcctgttggaaaccagggcagaaagtgccatatcttgcggtggccagaacttttgaaaagatcgaggaggtgagtgcgaggctcaggatggtagaaacattgtcaaatttactgcgcagtgtcgtcgccctcagccctccggatctgctcccagtgctgtatctaagcctgaaccacttggggcctccccagcagggattggagctgggcgtgggagacggcgtgttactgaaggccgtagcacaggccaccgggaggcaactcgaatccgttcgagctgaggctgcggaaaagggcgacgtgggactagtggccgaaaattcccgtagtactcagcgcctcatgctaccacctcctcccctgaccgcgtcaggtgttttctctaaatttagggatattgctagactgaccggttccgctagcacagctaagaaaattgacatcattaagggcctttttgtggcatgcagacactccgaagcaaggttcattgctaggtcactctctgggagactccggcttggcctggccgagcagtccgtgctggctgccctgagtcaggcagttagtttgacgccacctgggcaagaatttcccccagccatggtcgacgccggtaaaggaaagacagctgaggcccgtaaaacttggctggaggagcagggaatgatcttgaaacagactttctgtgaggtacctgaccttgatcgaatcatccctgtgctgctggaacatgggctcgagcgcctgccagagcactgtaagctcagccccggtatccctctgaaaccgatgcttgctcacccaacgagaggtatctcggaggtgctgaagcggtttgaagaagcagcatttacctgtgagtacaaatatgacgggcagagagctcagattcacgctttggaaggcggtgaagtgaagattttctctaggaaccaggaggataataccggaaagtaccccgacatcattagcaggattcctaaaattaagctgcccagtgttacttccttcatactggacaccgaagcagtcgcctgggacagagaaaaaaaacagattcaaccattccaagtgttgacaactaggaagcgcaaggaggtcgatgcaagcgagatccaggtgcaagtttgtttatacgcttttgatctgatctacctgaacggggaatccctggtgagagagccactcagcaggcgtaggcagttgctgagggagaatttcgtcgaaacagaaggcgaatttgtctttgccacgtccttagatacaaaggatattgagcagattgccgagtttctagagcaatccgtgaaggattcctgcgagggtttaatggtcaaaacattagacgtggatgcgacttacgaaatcgccaagaggtcccacaactggctgaagttaaaaaaagattatctggacggcgtcggcgacactctggatctcgtcgtgatcggcgcttacctcggacgcggaaaacgcgctggccgatacggcggatttctgctcgctagctacgatgaggattcagaagagctgcaggcaatttgcaaggtactcggtaactgggggtag

SEQ ID NO: 295086 - protein, 919 aa, Artificial Sequence
  derived and/or modified sequence
MQRSIMSFFHPKKEGKAKKPEKEASNSSRETEPPPKAALKEWNGVVSESDSPVKRPGRKAARVLGSEGEEEDEALSPAKGQKPALDCSQVSPPRPATSPENNASLSDTSPMDSSPSGIPKRRTARKQLPKRTIQEVLEEQSEDEDREAKRKKEEEEEETPKESLTEAEVATEKEGEDGDQPTTPPKPLKTSKAETPTESVSEPEVATKQELQEEEEQTKPPRRAPKTLSSFFTPRKPAVKKEVKEEEPGAPGKEGAAEGPLDPSGYNPAKNNYHPVEDACWKPGQKVPYLAVARTFEKIEEVSARLRMVETLSNLLRSVVALSPPDLLPVLYLSLNHLGPPQQGLELGVGDGVLLKAVAQATGRQLESVRAEAAEKGDVGLVAENSRSTQRLMLPPPPLTASGVFSKFRDIARLTGSASTAKKIDIIKGLFVACRHSEARFIARSLSGRLRLGLAEQSVLAALSQAVSLTPPGQEFPPAMVDAGKGKTAEARKTWLEEQGMILKQTFCEVPDLDRIIPVLLEHGLERLPEHCKLSPGIPLKPMLAHPTRGISEVLKRFEEAAFTCEYKYDGQRAQIHALEGGEVKIFSRNQEDNTGKYPDIISRIPKIKLPSVTSFILDTEAVAWDREKKQIQPFQVLTTRKRKEVDASEIQVQVCLYAFDLIYLNGESLVREPLSRRRQLLRENFVETEGEFVFATSLDTKDIEQIAEFLEQSVKDSCEGLMVKTLDVDATYEIAKRSHNWLKLKKDYLDGVGDTLDLVVIGAYLGRGKRAGRYGGFLLASYDEDSEELQAICKLGTGFSDEELEEHHQSLKALVLPSPRPYVRIDGAVIPDHWLDPSAVWEVKCADLSLSPIYPAARGLVDSDKGISLRFPRFIRVREDKQPEQATTSAQVACLYRKQSQIQNQQGEDSGSDPEDTY

SEQ ID NO: 295087 - DNA, 2760 bp, Artificial Sequence
  derived and/or modified sequence
atgcagagaagcatcatgagcttcttccaccccaagaaggagggcaaggccaagaagcccgagaaggaggccagcaacagcagcagagagaccgagcccccccccaaggccgccctgaaggagtggaacggcgtggtgagcgagagcgacagccccgtgaagagacccggcagaaaggccgccagagtgctgggcagcgagggcgaggaggaggacgaggccctgagccccgccaagggccagaagcccgccctggactgcagccaggtgagcccccccagacccgccaccagccccgagaacaacgccagcctgagcgacaccagccccatggacagcagccccagcggcatccccaagagaagaaccgccagaaagcagctgcccaagagaaccatccaggaggtgctggaggagcagagcgaggacgaggacagagaggccaagagaaagaaggaggaggaggaggaggagacccccaaggagagcctgaccgaggccgaggtggccaccgagaaggagggcgaggacggcgaccagcccaccaccccccccaagcccctgaagaccagcaaggccgagacccccaccgagagcgtgagcgagcccgaggtggccaccaagcaggagctgcaggaggaggaggagcagaccaagccccccagaagagcccccaagaccctgagcagcttcttcacccccagaaagcccgccgtgaagaaggaggtgaaggaggaggagcccggcgcccccggcaaggagggcgccgccgagggccccctggaccccagcggctacaaccccgccaagaacaactaccaccccgtggaggacgcctgctggaagcccggccagaaggtgccctacctggccgtggccagaaccttcgagaagatcgaggaggtgagcgccagactgagaatggtggagaccctgagcaacctgctgagaagcgtggtggccctgagcccccccgacctgctgcccgtgctgtacctgagcctgaaccacctgggccccccccagcagggcctggagctgggcgtgggcgacggcgtgctgctgaaggccgtggcccaggccaccggcagacagctggagagcgtgagagccgaggccgccgagaagggcgacgtgggcctggtggccgagaacagcagaagcacccagagactgatgctgccccccccccccctgaccgccagcggcgtgttcagcaagttcagagacatcgccagactgaccggcagcgccagcaccgccaagaagatcgacatcatcaagggcctgttcgtggcctgcagacacagcgaggccagattcatcgccagaagcctgagcggcagactgagactgggcctggccgagcagagcgtgctggccgccctgagccaggccgtgagcctgaccccccccggccaggagttcccccccgccatggtggacgccggcaagggcaagaccgccgaggccagaaagacctggctggaggagcagggcatgatcctgaagcagaccttctgcgaggtgcccgacctggacagaatcatccccgtgctgctggagcacggcctggagagactgcccgagcactgcaagctgagccccggcatccccctgaagcccatgctggcccaccccaccagaggcatcagcgaggtgctgaagagattcgaggaggccgccttcacctgcgagtacaagtacgacggccagagagcccagatccacgccctggagggcggcgaggtgaagatcttcagcagaaaccaggaggacaacaccggcaagtaccccgacatcatcagcagaatccccaagatcaagctgcccagcgtgaccagcttcatcctggacaccgaggccgtggcctgggacagagagaagaagcagatccagcccttccaggtgctgaccaccagaaagagaaaggaggtggacgccagcgagatccaggtgcaggtgtgcctgtacgccttcgacctgatctacctgaacggcgagagcctggtgagagagcccctgagcagaagaagacagctgctgagagagaacttcgtggagaccgagggcgagttcgtgttcgccaccagcctggacaccaaggacatcgagcagatcgccgagttcctggagcagagcgtgaaggacagctgcgagggcctgatggtgaagaccctggacgtggacgccacctacgagatcgccaagagaagccacaactggctgaagctgaagaaggactacctggacggcgtgggcgacaccctggacctggtggtgatcggcgcctacctgggcagaggcaagagagccggcagatacggcggcttcctgctggccagctacgacgaggacagcgaggagctgcaggccatctgcaagctgggcaccggcttcagcgacgaggagctggaggagcaccaccagagcctgaaggccctggtgctgcccagccccagaccctacgtgagaatcgacggcgccgtgatccccgaccactggctggaccccagcgccgtgtgggaggtgaagtgcgccgacctgagcctgagccccatctaccccgccgccagaggcctggtggacagcgacaagggcatcagcctgagattccccagattcatcagagtgagagaggacaagcagcccgagcaggccaccaccagcgcccaggtggcctgcctgtacagaaagcagagccagatccagaaccagcagggcgaggacagcggcagcgaccccgaggacacctactag

SEQ ID NO: 295088 - DNA, 2760 bp, Artificial Sequence
  derived and/or modified sequence
atgcagagaagtatcatgtcattcttccatcccaagaaagagggcaaggccaaaaaacccgagaaggaagctagcaatagctctagggaaactgagcctcctccgaaggctgcgctgaaggaatggaatggtgtggtctctgaatccgacagccccgtgaaaagaccaggaaggaaggccgcgagggtcctggggtcagagggagaagaggaagatgaggcactgtctccagccaaggggcaaaaacctgctctggattgttcgcaggtctcccctccacggccagctacgagcccagaaaataacgcttcgctctcagatacaagcccgatggacagctctccatcaggaatccctaagaggagaacggcacgaaagcagctgcccaaacgaaccatccaggaggtgctggaggagcagtcagaggatgaggaccgcgaagctaagaggaaaaaggaggaagaagaagaagagactccaaaagagtccttaactgaggctgaagtggctactgaaaaagaaggagaagatggagaccagccgaccacaccccctaagcccctgaaaacctccaaagcagagacgccaaccgagtccgtaagtgaaccagaagtggccaccaagcaggagctgcaggaggaggaagagcagaccaagccgccacgacgcgccccgaaaacattatctagcttctttacccctcgtaagcccgccgtgaagaaagaagttaaagaagaggaaccgggagctccagggaaagaaggggctgcggaaggccccctggacccctctggctataacccggcaaaaaacaactaccacccggtggaggatgcttgctggaaacccgggcagaaggtcccttatctggctgtggccaggacatttgaaaagatcgaagaggtcagcgcccgtctccgtatggttgaaacccttagtaacctcctgaggtccgtggtggcactgagccccccagatctgctcccagtcctgtacctgtcactgaatcaccttgggccaccccagcaggggttggaacttggcgttggcgacggggtgctactgaaggccgtcgcccaggccacaggacgacagctggagtccgtgagggctgaggcggccgagaagggcgatgtaggattagtggcagagaactccaggagcactcagagactgatgttgcctccgcctcctctgactgcttctggcgttttttctaaatttcgtgacattgcacgcctgacaggaagcgcttcgacagccaagaagattgatattatcaagggtctcttcgtggcatgccgccattccgaggccaggtttatagccaggtccctgtcaggcaggttgcgcttaggtctggctgagcagtcggtgttagcagctctgtcacaggctgtctccctcacaccacccggccaggagtttccaccagccatggtggacgccggaaaaggaaagacggcagaggccaggaagacctggctggaggagcaaggtatgattctgaaacagacattttgcgaggtccccgatctggaccggatcataccggtgcttctggagcacgggctcgaacgattgcccgagcattgcaaactgagtccgggcatcccgctgaaacccatgctggctcaccccacgcgggggatcagcgaggtgcttaagagattcgaggaggccgcattcacttgtgaatacaaatacgacggccaacgcgcccagatccatgctcttgaagggggcgaagtaaagatcttcagccgtaatcaggaggataacactggtaaataccccgacatcatcagccggattcctaagatcaaactacctagcgttacaagcttcatcctcgatactgaggccgtcgcctgggatagagagaaaaagcaaattcaaccgttccaggtcctcacaacgcgtaagcggaaggaggttgacgcttcggagattcaggtgcaggtctgtctctatgccttcgacctcatttacctgaatggtgagagtctcgtccgcgagccactatccaggcgccgtcagctcctgagagagaattttgtggagacggagggtgagttcgtctttgccacttcactcgacacaaaagatatagagcagatagctgaatttttagaacagagtgtcaaagactcatgtgaggggctaatggtgaaaactcttgacgtggacgccacttacgaaatcgctaaacgcagtcataactggttgaaacttaagaaggactatctagatggcgttggcgataccctggacttagtggtaattggggcctacctgggtcgtggtaagagggctggcagatacgggggctttctcctggccagttatgatgaggactccgaggaacttcaggctatttgtaaactgggcactggcttttccgatgaggaattagaggagcaccatcagtccttgaaggctctggtcttaccttcaccaaggccatacgtacggatcgacggagctgtgatcccagaccactggttagaccccagtgcggtttgggaggtcaaatgcgccgatctcagcctcagtccgatctatcccgctgcaagaggtcttgtggactctgataaaggaatctctctgcggttcccacgcttcatcagagtgcgggaggacaagcagcctgagcaggcaacaaccagcgcccaggtcgcatgcctgtacagaaagcagagtcaaatccagaaccagcagggtgaagacagcggctcggaccccgaggacacatattag

SEQ ID NO: 295089 - DNA, 2760 bp, Artificial Sequence
  derived and/or modified sequence
atgcagaggagcatcatgtccttcttccaccccaagaaggagggcaaggccaagaagccagagaaggaggccagcaacagcagccgggagacagagcccccacccaaggccgccctgaaggagtggaatggagtggtgtctgagagtgacagccctgtgaagaggcctggcaggaaggccgcccgggtgctgggcagcgagggggaggaggaggatgaggccctgagccctgccaagggccagaagccagccctggactgcagccaggtgagcccccccaggcctgccaccagccctgagaacaatgccagcctgagtgacaccagccccatggacagcagccccagcggcatccccaagagaagaacagccaggaagcagctgcccaagaggaccatccaggaggtgctggaggagcagagtgaagatgaggaccgggaggccaagaggaagaaggaggaggaggaggaggagacccccaaggagagcctgacagaagctgaggtggccacagagaaggagggggaggatggagaccagcccaccaccccacccaagcccctgaagaccagcaaggccgagacccccacagaatctgtgtctgagcctgaggtggccaccaagcaggagctgcaggaggaggaggagcagaccaagccaccccggcgggcccccaagaccctgagcagcttcttcacccccaggaagccagctgtgaagaaggaggtgaaggaggaggagcccggggcccctgggaaggagggcgctgctgagggccccctggaccccagcggctacaacccagccaagaacaactaccaccctgtggaggatgcctgctggaagccaggccagaaggtgccctacctggccgtggcccggacctttgagaagattgaggaggtgtctgcccggctgaggatggtggagaccctgagcaacctgctgcggtctgtggtggccctgagccccccagacctgctgcctgtgctgtacctgagcctgaaccacctgggccccccccagcagggcctggagctgggcgtgggagatggagtgctgctgaaggctgtggcccaggccaccggccggcagctggagagcgtgcgggcagaggccgctgagaagggagatgtgggcctggtggccgagaacagccgcagcacccagaggctgatgctgcccccaccacccctgacagccagcggggtcttcagcaagttccgggacatcgcccggctgactggaagtgccagcacagccaagaagattgacatcatcaagggcctgtttgtggcctgccgccacagcgaggcccgcttcatcgcccggagcctgagcggccgcctgcggctgggcctggccgagcagagcgtgctggccgccctgagccaggccgtgtccctgaccccacctggccaggagttccccccagccatggtggatgctgggaagggcaagacagctgaggccaggaagacctggctggaggagcagggcatgatcctgaagcagaccttctgtgaggtgcctgacctggaccgcatcatccctgtgctgctggagcacggcctggagcggctgcctgagcactgcaagctgagccctggcatccccctgaagcccatgctggcccaccccacccggggcatcagcgaggtgctgaagagatttgaggaggccgccttcacctgtgagtacaagtatgatggccagagggcccagatccacgccctggagggcggggaggtgaagatcttcagcaggaaccaggaggacaacacaggcaagtacccagacatcatcagccgcatccccaagatcaagctgcccagcgtgaccagcttcatcctggacacagaggccgtggcctgggaccgggagaagaagcagatccagcccttccaggtgctgaccaccaggaagaggaaggaggtggatgccagcgagatccaggtgcaggtgtgcctgtatgcctttgacctgatctacctgaatggagagagcctggtgcgggagcccctgagcagaagacggcagctgctgcgggagaactttgtggagacagaaggagaatttgtgtttgccaccagcctggacaccaaggacatcgagcagattgctgagttcctggagcagagcgtgaaggacagctgtgagggcctgatggtgaagaccctggatgtggatgccacctatgaaattgccaagaggagccacaactggctgaagctgaagaaggactacctggatggagtgggggacaccctggacctggtggtgattggagcctacctgggccggggcaagagagctggccgctatggaggcttcctgctggccagctatgatgaagattctgaggagctgcaggccatctgcaagctgggcaccggcttcagtgatgaggagctggaggagcaccaccagagcctgaaggccctggtgctgcccagcccccggccctacgtgagaattgatggagctgtgatcccagaccactggctggaccccagcgctgtgtgggaggtgaagtgtgccgacctgagcctgagccccatctacccagctgcccggggcctggtggacagcgacaagggcatcagcctgcgcttcccccgcttcatccgggtgcgggaggacaagcagcctgagcaggccaccaccagcgcccaggtggcctgcctgtacaggaagcagagccagatccagaaccagcagggagaagattctggcagtgaccctgaggacacctactag

SEQ ID NO: 295090 - DNA, 3083 bp, Artificial Sequence
  derived and/or modified sequence
cagaggcgcgcctggcggatctgagtgtgttgcccgggcagcggcgcgcgggaccaacgcaaggagcagctgacagacgaagaaaagtgctggacaggaagggagaattctgacgccaacatgcagcgaagtatcatgtcatttttccaccccaagaaagagggtaaagcaaagaagcctgagaaggaggcatccaatagcagcagagagacggagccccctccaaaggcggcactgaaggagtggaatggagtggtgtccgagagtgactctccggtgaagaggccagggaggaaggcggcccgggtcctgggcagcgaaggggaagaggaggatgaagcccttagccctgctaaaggccagaagcctgccctggactgctcacaggtctccccgccccgtcctgccacatctcctgagaacaatgcttccctctctgacacctctcccatggacagttccccatcagggattccgaagcgtcgcacagctcggaagcagctcccgaaacggaccattcaggaagtcctggaagagcagagtgaggacgaggacagagaagccaagaggaagaaggaggaggaagaagaggagaccccgaaagaaagcctcacagaggctgaagtggccacagagaaggaaggagaagacggggaccagcccaccacgcctcccaagcccctaaagacctccaaagcagagaccccgacggaaagcgtttcagagcctgaggtggccacgaagcaggaactgcaggaggaggaagagcagaccaagcctccccgcagagctcccaagacgctcagcagcttcttcaccccccggaagccagcagtcaaaaaagaagtgaaggaagaggagccaggggctccaggaaaggagggagctgctgagggacccctggatccatctggttacaatcctgccaagaacaactatcatcccgtggaagatgcctgctggaaaccgggccagaaggttccttacctggctgtggcccggacgtttgagaagatcgaggaggtgtctgctcggctccggatggtggagacgctgagcaacttgctgcgctccgtggtggccctgtcgcctccagacctcctccctgtcctctacctcagcctcaaccaccttgggccaccccagcagggcctggagcttggcgtgggtgatggtgtccttctcaaggcagtggcccaggccacaggtcggcagctggagtccgtccgggctgaggcagccgagaaaggcgacgtggggctggtggccgagaacagccgcagcacccagaggctcatgctgccaccacctccgctcactgcctccggggtcttcagcaagttccgcgacatcgccaggctcactggcagtgcttccacagccaagaagatagacatcatcaaaggcctctttgtggcctgccgccactcagaagcccggttcatcgctaggtccctgagcggacggctgcgccttgggctggcagagcagtcggtgctggctgccctctcccaggcagtgagcctcacgcccccgggccaagaattcccaccagccatggtggatgctgggaagggcaagacagcagaggccagaaagacgtggctggaggagcaaggcatgatcctgaagcagacgttctgcgaggttcccgacctggaccgaattatccccgtgctgctggagcacggcctggaacgtctcccggagcactgcaagctgagcccagggattcccctgaaaccaatgttggcccatcccacccggggcatcagcgaggtcctgaaacgctttgaggaggcagctttcacctgcgaatacaaatatgacgggcagagggcacagatccacgccctggaaggcggggaggtgaagatcttcagcaggaatcaggaagacaacactgggaagtacccggacatcatcagccgcatccccaagattaaactcccatcggtcacatccttcatcctggacaccgaagccgtggcttgggaccgggaaaagaagcagatccagccattccaagtgctcaccacccgcaaacgcaaggaggtggatgcgtctgagatccaggtgcaggtgtgtttgtacgccttcgacctcatctacctcaatggagagtccctggtacgtgagcccctttcccggcgccggcagctgctccgggagaactttgtggagacagagggcgagtttgtcttcgccacctccctggacaccaaggacatcgagcagatcgccgagttcctggagcagtcagtgaaagactcctgcgaggggctgatggtgaagaccctggatgttgatgccacctacgagatcgccaagagatcgcacaactggctcaagctgaagaaggactaccttgatggcgtgggtgacaccctggacctggtggtgatcggcgcctacctgggccgggggaagcgggccggccggtacgggggcttcctgctggcctcctacgacgaggacagtgaggagctgcaggccatatgcaagcttggaactggcttcagtgatgaggagctggaggagcatcaccagagcctcaaggcgctggtgctgcccagcccacgcccttacgtgcggatagatggcgctgtgattcccgaccactggctggaccccagcgctgtgtgggaggtgaagtgcgctgacctctccctctctcccatctaccctgctgcgcggggcctggtggatagtgacaagggcatctcccttcgcttccctcggtttattcgagtccgtgaagacaagcagccggagcaggccaccaccagtgctcaggtggcctgtttgtaccggaagcaaagtcagattcagaaccaacaaggcgaggactcaggctctgaccctgaagatacctactaagccctcgccctcctagggcctgggtacagggcatgagttggacggaccccagggttattattgcctttgctttttagcaaatctgctgtggcaggctgtggattttgagagtcaggggaggggtgtgtgtgtgagggggtggcttactccggagtctgggattcatcccgtcatttctttcaataaataattattggatagct

SEQ ID NO: 295091 - DNA, 2760 bp, Artificial Sequence
  derived and/or modified sequence
atgcagcggagcatcatgagcttcttccaccccaagaaggagggcaaagcgaagaagccagagaaagaggctagcaattctagccgggaaaccgaacccccaccaaaggccgctctgaaggagtggaatggcgtagtgagcgaatcagactctcctgtcaaacggcctggccgaaaggcagcaagggtgttaggtagcgagggcgaagaagaagacgaggccctgtcacccgctaaaggccaaaaacccgcgctggactgcagtcaggtgagtcctcctagacctgccacatctccagagaataatgccagcctgtcggacaccagtcctatggatagtagccccagtgggatccctaagagacgaacagcgcggaagcaactccctaagcggaccattcaggaggtcttagaggaacagagtgaggacgaggaccgggaggccaagagaaaaaaggaggaggaggaggaggagacccccaaggaatccttaacagaagccgaggtggcaactgaaaaggagggcgaggatggtgatcagcccacaacccctcccaaacctcttaaaactagcaaggctgaaacaccaactgaaagcgtcagcgagcctgaggtcgccactaaacaagagctgcaagaagaggaagaacagacaaaaccaccgcggagggctcctaaaactctaagctccttcttcaccccccgcaagcccgccgtaaaaaaagaggtcaaggaggaagaacccggcgcaccaggtaaggagggggccgccgaaggacccttagacccttccggttacaaccctgcaaaaaacaactatcaccctgtggaagatgcctgttggaagcccggccagaaagtgccatatctcgctgtggcccgcaccttcgaaaagatcgaggaggtgagtgctaggcttcgaatggtcgaaactctctcaaatctgctccggagcgttgtggccctttccccacctgacttattgcccgttctgtacctgtctctgaaccatttaggccctccacagcaggggctggagttgggagtgggcgacggagtgcttctgaaagcggtggctcaggcaactggcaggcaactagagtcagttcgtgccgaggcagctgaaaaaggggatgtcggcctggtggctgaaaatagcagatctacacagcggcttatgttgccacctccaccacttaccgcatccggcgtgttctccaaatttcgagatatagcaaggctaacgggcagcgccagtacagccaagaagattgacattataaaaggcctcttcgtggcttgtcgccacagcgaggcgcggtttattgcccggtccttgagtgggaggttgaggctgggtcttgcggagcaatccgttcttgccgccttaagccaggcagtctccctgactcctcccgggcaagagttcccgcccgctatggtggacgccgggaaaggcaagactgccgaggcaagaaaaacttggttagaggagcagggtatgatactcaagcagacattttgcgaggtcccagatttggacagaatcattccagtgctgctggaacatggcctggaaaggcttccagaacattgcaagctttcaccaggtataccactcaaacctatgctggcccatcccacacgcgggatcagtgaggtgctgaaaaggttcgaggaggctgcctttacctgcgagtacaagtatgacggccagcgcgcgcagattcatgccctggagggcggggaggtgaagattttcagtagaaaccaagaggacaacactggtaagtacccggacatcatttccagaatccccaagatcaaactgccgtcagtgaccagctttatcctggacacagaagccgtggcctgggacagggaaaaaaaacagattcagccgtttcaagtcttgactacacgaaaaaggaaggaagttgatgcctctgaaattcaggtacaggtctgcctctacgccttcgacctgatttatttaaacggcgaatctctggttagagagccactgagtaggcggcgccaactcttgcgggaaaacttcgtcgaaacagagggagaattcgtcttcgcaacatcgctggatacaaaagacattgaacagatcgccgagttcctggaacagtccgttaaggattcctgcgaaggcctgatggtcaagaccctggatgttgacgccacctacgaaatagccaagcgcagtcacaattggctcaagcttaagaaggactatctggatggcgtcggcgatacattggatctggtcgtgatcggcgcctatcttggacggggaaaaagagctggacggtacggcggtttcctcctcgccagctacgacgaggatagcgaagagttacaagctatatgtaagctggggacggggttcagcgacgaagaacttgaagagcaccaccaatccctgaaggcacttgtcctgcccagcccaaggccttacgtgcgtatcgatggggcggtcattcccgaccattggttagacccctctgctgtatgggaagtgaagtgtgccgacttaagcctgtccccaatctatcccgcagctagggggcttgtcgattcagataagggaatttctttaaggttcccccgttttatcagagtgagggaggacaaacagcctgaacaggccaccactagcgcgcaagtggcctgtctgtataggaaacagtcccagatccagaaccagcagggtgaggacagtggttccgaccccgaggacacctactag

SEQ ID NO: 295092 - DNA, 2760 bp, Artificial Sequence
  derived and/or modified sequence
atgcagcgtagtattatgtccttttttcatccaaagaaagagggaaaggctaagaaacccgagaaagaggcttctaattcctccagggagacagagccaccaccgaaggcggctctaaaggagtggaacggcgtcgtgtccgaatctgactctcccgtaaagaggcccggtcggaaggccgcacgagtcctagggtccgaaggcgaagaggaggatgaagcactctctcctgcaaaggggcagaaacccgctctcgattgcagccaggtgtccccccctagacctgcgacctcacctgaaaacaatgcttcactgtcagatacctcaccgatggattcttcccctagcggtattccaaagaggaggactgcaagaaagcagctccccaaaaggaccatccaagaagtactggaagagcagtcagaggacgaagaccgcgaagccaaaagaaagaaagaggaagaggaggaagaaactcccaaggaatcactaacagaggctgaggtggctacagagaaagagggcgaagacggagaccagcccacaaccccccctaagcccctcaaaacttccaaggcggagacgcccaccgagagtgtctcggaacccgaagtagccactaagcaagagctgcaggaggaggaggaacagactaagccgccacgtcgagctccgaagacactgagttcattcttcacgccacggaagcctgcagtgaagaaggaagtgaaggaggaggaacctggagctcctggcaaggaaggtgccgcagaggggcctctagatccgtcgggatacaatcccgctaaaaacaactatcacccagtggaagacgcttgctggaagcctggccagaaggtgccgtacctcgctgtggccagaactttcgagaagatcgaagaagtgtccgcccgacttcggatggtggagacgctgtccaatctcctgagatcagtggtggcgctctccccccctgacctgctgcctgtgctctacctgtccctcaatcacctgggcccaccacaacaagggctagaactcggggtcggagatggggtgctgctgaaggcagtggcacaggccacaggaagacaattggagtccgttagagccgaagctgccgaaaagggcgatgtgggtctggtagcagaaaacagtagatccactcagagattaatgctgccaccaccccctctgactgcctcgggggtatttagcaagtttcgtgacattgcccgactcacgggctctgcttcaacggcaaaaaagatcgatataataaaaggcctgttcgtggcatgccgtcacagcgaagcaagatttatcgcaaggagcttgtccgggcgattgagactgggactcgccgaacagtctgtgttggccgcactctcacaggcagtgtccctgaccccacctggccaggagttccctcctgctatggtggatgcagggaagggcaaaaccgcagaggctcggaaaacttggctggaggaacagggcatgatccttaaacagacattctgcgaagttccagatctcgatagaatcatccccgtgctcctggaacacggcctggaaaggctgcctgaacattgtaagctgtctcctggaatcccccttaaaccgatgctggcccacccaactcggggaataagtgaagtgcttaagcgctttgaggaggcggctttcacctgcgagtacaagtatgatggccagagggctcagattcacgcactggaagggggagaggtcaagatttttagccggaatcaggaggataacacagggaagtatcctgatatcatcagcagaataccgaaaattaaactgccgtccgtgactagcttcatcctggataccgaggctgtagcatgggatagggagaaaaagcagatccagccttttcaggtgctcacgacgaggaaacggaaggaggtcgacgcgtccgagatccaggtgcaagtctgtctgtacgccttcgacctcatttatcttaatggagagagtctagtgcgggagcccctttcaaggcggagacaattgttacgtgagaactttgtggagactgagggcgagttcgtctttgcgacaagcttagacaccaaagatatcgagcagattgccgagttcctcgaacaatctgtgaaagacagctgtgagggtttgatggttaagacgctggatgtagacgcaacatacgaaatcgccaagcggtctcacaattggctgaagcttaagaaggactacttagatggggtcggcgatacattagacttggtggtcattggagcctacctggggaggggcaaacgggctggtcggtatggaggattccttcttgccagctatgatgaagatagtgaagagcttcaagctatttgtaagcttggaacgggatttagtgatgaagagctggaagagcaccaccagtctctgaaagcactcgttctaccaagtcctaggccctatgtccggatagacggggcagtcattccagaccattggcttgatccttccgctgtctgggaggttaaatgtgcagatctgtctctcagccctatctacccagccgcacgcggtttggtggattctgataagggcatctccctgcggttcccccgattcatccgggttcgcgaggataagcagcctgaacaggctacaacgtccgctcaggtagcttgcctataccgcaagcagtcccagattcagaatcaacagggagaggattccgggtccgatccagaggatacctattag

SEQ ID NO: 295093 - protein, 306 aa, Artificial Sequence
  derived and/or modified sequence
MNGATAAWAPWVRTQRPPEDLGWARSWARGCRGLPSSSATSLRMGTRFSAGTEYMDLQNDLGQTALHLAAILGETSTVEKLYAAGAGLCVAERRGHTALHLACRVGAHACARALLQPRPRRPREAPDTYLAQGPDRTPDTNHTPVALYPDSDLEKEEEESEEDWKLQLEAENYEGHTPLHVAVIHKDVEMVRLLRDAGADLDKPEPTCGRSPLHLAVEAQAADVLELLLRAGANPAARMYGGRTPLGSAMLRPNPILARLLRAHGAPEPEGEDEKSGPCSSSSDSDSGDEGVSQEERQGSPAGGSG

SEQ ID NO: 295094 - DNA, 921 bp, Artificial Sequence
  derived and/or modified sequence
atgaatggagccaccgccgcctgggccccttgggttcgcacacagcgaccacccgaggacttaggctgggcccgctcgtgggctcgcggatgccggggcctcccgtcttccagtgccacgtcactgcgtatgggcacacggttctctgcaggaactgagtacatggaccttcagaacgatctaggccaaaccgcactacatctcgctgctatcttgggggaaacgtcgactgtggagaagttgtacgcagcaggggccggtctgtgcgtagctgagcgaaggggtcacacggcacttcacctagcctgccgcgtcggcgcacatgcctgcgctagggcactcctgcagcccagaccccggcgcccaagggaagcccccgatacatacctcgcgcaaggccccgatcgtacacccgatacaaaccataccccggtagctttgtatccggatagcgacctcgagaaggaagaggaggagtcagaagaagattggaagctgcagttggaggccgagaactacgagggccacactcctttgcatgtcgcagtgattcataaggacgttgagatggtgcggcttctgcgtgacgctggggccgacttagataaacccgaaccaacctgtggccgctcacctctgcacctcgctgtggaagcgcaggccgctgatgtgctagagctcctcctgcgagctggcgcaaatccagctgcgcggatgtacggtggacgcacgccactgggcagcgccatgttgcgccctaacccaattctggcccgtctcctgcgggcccacggagcccccgaacccgagggcgaagacgagaagagtggaccatgctcttcaagctccgatagcgacagcggcgacgagggtgtgagccaggaagagcggcaggggagtcccgctggcggctcggggtag

SEQ ID NO: 295095 - DNA, 921 bp, Artificial Sequence
  derived and/or modified sequence
atgaatggagccacagctgcctgggccccctgggtgaggacccagaggcccccagaggacctgggctgggcccgctcctgggcccggggctgccggggcctgcccagcagcagcgccaccagcctgaggatgggcacccgcttctctgctggaacagagtacatggacctgcagaatgacctgggccagacagccctgcacctggccgccatcctgggggagaccagcacagtggagaagctgtatgctgctggggccggcctgtgtgtggccgagcggcggggccacacagccctgcacctggcctgccgggtgggcgcccacgcctgtgcccgggccctgctgcagccccggccccggcggccccgggaggccccagacacctacctggcccagggccctgacaggaccccagacaccaaccacacccctgtggccctgtacccagacagcgacctggagaaggaggaggaggagagcgaggaggactggaagctgcagctggaggctgaaaattatgagggccacacccccctgcacgtggccgtcatccacaaggatgtggagatggtgcggctgctgagagatgctggagctgacctggacaagccagagcccacctgtggccgcagccccctgcacctggccgtggaggcccaggccgcagatgtgctggagctgctgctgcgggccggggccaacccagctgccaggatgtatggaggccgcacccccctgggcagcgccatgctgcggcccaaccccatcctggcccggctgctgcgggcccacggggcccctgagcctgagggggaggatgagaagagcggcccctgcagcagcagcagtgacagcgacagcggagatgaaggagtgtcccaggaggagcggcagggcagccctgctgggggcagcggctag

SEQ ID NO: 295096 - DNA, 921 bp, Artificial Sequence
  derived and/or modified sequence
atgaacggcgccaccgccgcctgggccccctgggtgcggacccagaggccacctgaggacctgggctgggctagatcttgggcgaggggttgcagaggcctcccttcctctagcgctacctccttaagaatgggcacccggttctctgccgggaccgaatacatggatctgcaaaacgatctgggtcagacggccctgcacttagcggctatcttgggtgagacttccaccgttgaaaagctctatgctgcaggagccggtctttgcgtggccgaacggcgaggacatacagccctacacttggcatgcagggtgggggcgcatgcatgtgctcgtgccctgttgcaaccacgcccgcgacggcccagagaagcccccgacacttatcttgcccaggggcctgatcgcactcccgataccaaccatactcctgttgccctctaccctgatagcgatctggagaaggaagaagaggaatcggaggaggattggaaacttcaactggaggctgagaactatgagggccacactcccctgcacgtggctgtgatccataaggatgtggagatggtacgccttttgcgagacgcaggggccgatcttgataagccagaacccacttgcggccgctccccactgcatttagctgtggaggcccaggcagccgacgtgctcgaactgctcttgagggccggggcgaatccagctgccagaatgtacggcggaagaaccccactgggatccgccatgctgcggcctaacccaatcttagcacgacttcttcgggcccatggggcccctgagcccgagggtgaagacgaaaaaagcggtccctgctcctcctcatccgattccgacagcggagatgagggtgtgagccaagaggaaagacagggaagcccagcaggtggttctggatag

SEQ ID NO: 295097 - DNA, 2203 bp, Artificial Sequence
  derived and/or modified sequence
ccggcaaagcccagctacaggcgggcgactgcggggggcccctgaggcggcgggggccatggctggggtcgcgtgcttgggaaaagctgccgacgcagatgaatggtgcgacagcggcctgggctccctgggtccggacgcagcggcccccggaggacctgggttgggcgcggagttgggcccggggctgtcgtgggctcccctcgtcttcggctacgtcactgaggatggggacacgcttctcggccggcactgagtacatggacctgcagaatgacctaggccagacagccctgcacctggcagccatcctgggggagacatccacggtggagaagctgtacgcagcaggcgccgggctgtgtgtggcggagcgtaggggccacacggcgctgcacctggcctgccgtgtgggggcacacgcctgtgcccgtgccctgcttcagccccgcccccggcgccccagggaagcccccgacacctacctcgctcagggccctgaccgtactcccgacaccaaccatacccctgtcgccttgtaccccgattccgacttggagaaggaagaagaggagagtgaggaggactggaagctgcagctggaggctgaaaactacgagggccacaccccactccacgtggccgttatccacaaagatgtggagatggtccggctgctccgagatgctggagctgaccttgacaaaccggagcccacgtgcggccggagcccccttcatttggcagtggaggcccaggcagccgatgtgctggagcttctcctgagggcaggcgcgaaccctgctgcccgcatgtacggtggccgcaccccactcggcagtgccatgctccggcccaaccccatcctcgcccgcctcctccgtgcacacggagcccctgagcccgagggcgaggacgagaaatccggcccctgcagcagcagtagcgacagcgacagcggagacgagggcgtgagtcaggaggagagacagggcagcccagctggggggtcaggatagaccggcaggcaagaagcccaagaagataattaggcaccgaccttgggctgctgttagagaactcaggcagcagcgccagtgacacggggcactagtcaggagagacctggacaggggtggtgggaagagcttgggcagaagtggctgaaaaactaaggcagtggcaaaggtagaactcaggcaggggtggagaaaaggcgttggtcgcagtgattggtgaacacagcgggggtgggtggtagcgctgggggtgattttaggcagcaagaattggagaactcacactgcgaaaagaaaaccttgggtggcagtgatttgaacaccggcagtgctggggcaggacccgagccagcggtggggagagatatagtcagagaacccagcaatacagatccgtccttgggcaaggcgcggtgctggatgatgggtgcggaggaatttgggtaaaggcagagggaaggggtggaggagggccagctcagttgccgaaactctggagtggcggctggctagaaattggtctgtagaaatgaccttgaaaatggagttctggccaggtgcggtggctcacgcctgtaatcccagcactttgggaggccgaggcaggcagatcacgaggtcaggagttcgagaccagcctggccaacatggcaagaccctgtctctactaaaaatacaaaaattagctgggcgtggtggcgcatgcctataatcccagctacttgggaggctgaggtaggagaattgcttgaacctgggaggtggaggttgcagtgaacctagatcacgccactgcattccagcctgggcaacagagcgagactccatcttaaaaaaaaaaaaaaaaaaaagaaagaaaagaaaatggagttctgagagctaggaaactgggaggttgagccaggagcaggggaacttgggctttgaggcgagacctaattcttagggtgctctatgaggacatgggtggtgggcaaagtgacagccgcctgagcccctctgcctggtcccctttgcccccaggatgaatacgacgacattgtggttcacagcagccgcagccaaacccggctgcctcccaccccagcctcaaaacctcttcctgacgacccccgccccgtgtgatttgtttcattgttaatataatttccagtttaataaacaaaaccctagttctgacaacc

SEQ ID NO: 295098 - DNA, 921 bp, Artificial Sequence
  derived and/or modified sequence
atgaacggtgcgactgcagcttgggccccttgggtgaggactcaaaggcccccagaagatctgggttgggcccgatcgtgggcaaggggatgtcgcggactcccgagcagctccgcaacttcactccgaatgggcaccaggttttccgcgggaaccgagtacatggatctgcaaaacgaccttgggcagacagccttgcatctggcggctattctgggtgagacttcaacggtcgagaagttatacgccgctggtgctggtctgtgtgtggcagagagacgaggacacaccgctttgcatttggcctgcagggtcggcgctcacgcctgcgcgagggccctgctgcagccgcgtccacgccgacctcgtgaggcccctgatacatatcttgctcaaggacccgatcgaactccagacacgaaccacactcctgtggccttatatccagacagcgatctcgagaaagaggaggaggagtctgaagaagactggaaattacaactcgaggccgaaaattacgagggccatactccgctgcacgttgctgttattcacaaggatgtagagatggtgaggttgctcagagacgccggtgcggatcttgataagcccgaacccacatgcggtaggtcgccactccacctcgccgttgaggctcaagctgccgatgtgctggagttgcttttacgggcaggagctaatcctgcggcaagaatgtacggtgggaggaccccccttggcagtgccatgctcaggccaaacccgatccttgcacgcctgctcagggcccatggagctccagaacctgagggagaggatgaaaagtcaggaccttgtagcagctcatctgacagcgatagcggcgatgaaggagtatcgcaagaagagcgacagggaagcccggctgggggaagtggctag

SEQ ID NO: 295099 - DNA, 921 bp, Artificial Sequence
  derived and/or modified sequence
atgaacggcgccaccgccgcctgggccccctgggtgagaacccagagaccccccgaggacctgggctgggccagaagctgggccagaggctgcagaggcctgcccagcagcagcgccaccagcctgagaatgggcaccagattcagcgccggcaccgagtacatggacctgcagaacgacctgggccagaccgccctgcacctggccgccatcctgggcgagaccagcaccgtggagaagctgtacgccgccggcgccggcctgtgcgtggccgagagaagaggccacaccgccctgcacctggcctgcagagtgggcgcccacgcctgcgccagagccctgctgcagcccagacccagaagacccagagaggcccccgacacctacctggcccagggccccgacagaacccccgacaccaaccacacccccgtggccctgtaccccgacagcgacctggagaaggaggaggaggagagcgaggaggactggaagctgcagctggaggccgagaactacgagggccacacccccctgcacgtggccgtgatccacaaggacgtggagatggtgagactgctgagagacgccggcgccgacctggacaagcccgagcccacctgcggcagaagccccctgcacctggccgtggaggcccaggccgccgacgtgctggagctgctgctgagagccggcgccaaccccgccgccagaatgtacggcggcagaacccccctgggcagcgccatgctgagacccaaccccatcctggccagactgctgagagcccacggcgcccccgagcccgagggcgaggacgagaagagcggcccctgcagcagcagcagcgacagcgacagcggcgacgagggcgtgagccaggaggagagacagggcagccccgccggcggcagcggctag

SEQ ID NO: 295100 - protein, 2161 aa, Artificial Sequence
  derived and/or modified sequence
MTHSPATSEDEERHSASECPEGGSESDSSPDGPGRGPRGTRGQGSGAPGSLASVRGLQGRSMSVPDDAHFSMMVFRIGIPDLHQTKCLRFNPDATIWTAKQQVLCALSESLQDVLNYGLFQPATSGRDANFLEEERLLREYPQSFEKGVPYLEFRYKTRVYKQTNLDEKQLAKLHTKTGLKKFLEYVQLGTSDKVARLLDKGLDPNYHDSDSGETPLTLAAQTEGSVEVIRTLCLGGAHIDFRARDGMTALHKAACARHCLALTALLDLGGSPNYKDRRGLTPLFHTAMVGGDPRCCELLLFNRAQLGIADENGWQEIHQACQRGHSQHLEHLLFYGAEPGAQNASGNTALHICALYNKETCARILLYRGADKDVKNNNGQTPFQVAVIAGNFELGELIRNHREQDVVPFQESPKYAARRRGPPGTGLTVPPALLRANSDTSMALPDWMVFSAPGAASSGAPGPTSGSQGQSQPSAPTTKLSSGTLRSASSPRGARARSPSRGRHPEDAKRQPRGRPSSSGTPREGPAGGTGGSGGPGGSLGSRGRRRKLYSAVPGRSFMAVKSYQAQAEGEISLSKGEKIKVLSIGEGGFWEGQVKGRVGWFPSDCLEEVANRSQESKQESRSDKAKRLFRHYTVGSYDSFDAPSLMDGIGPGSDYIIKEKTVLLQKKDSEGFGFVLRGAKAQTPIEEFTPTPAFPALQYLESVDEGGVAWRAGLRMGDFLIEVNGQNVVKVGHRQVVNMIRQGGNTLMVKVVMVTRHPDMDEAVHKKAPQQAKRLPPPTISLRSKSMTSELEEMEYEQQPAPVPSMEKKRTVYQMALNKLDEILAAAQQTISASESPGPGGLASLGKHRPKGFFATESSFDPHHRAQPSYERPSFLPPGPGLMLRQKSIGAAEDDRPYLAPPAMKFSRSLSVPGSEDIPPPPTTSPPEPPYSTPPVPSSSGRLTPSPRGGPFNPGSGGPLPASSPASFDGPSPPDTRVGSREKSLYHSGPLPPAHHHPPHHHHHHAPPPQPHHHHAHPPHPPEMETGGSPDDPPPRLALGPQPSLRGWRGGGPSPTPGAPSPSHHGSAGGGGGSSQGPALRYFQLPPRAASAAMYVPARSGRGRKGPLVKQTKVEGEPQKGGGLPPAPSPTSPASPQPPPAVAAPSEKNSIPIPTIIIKAPSTSSSGRSSQGSSTEAEPPTQPEPTGGGGGGGSSPSPAPAMSPVPPSPSPVPTPASPSGPATLDFTSQFGAALVGAARREGGWQNEARRRSTLFLSTDAGDEDGGDGGLGTGAAPGPRLRHSKSIDEGMFSAEPYLRLESAGSGAGYGGYGAGSRAYGGGGGSSAFTSFLPPRPLVHPLTGKALDPASPLGLALAARERALKESSEGGGAPQPPPRPPSPRYEAPPPTPHHHSPHAHHEPVLRLWGASPPDPARRELGYRAGLGSQEKSLPASPPAARRSLLHRLPPTAPGVGPLLLQLGTEPPAPHPGVSKPWRSAAPEEPERLPLHVRFLENCQPRAPVTSGRGPPSEDGPGVPPPSPRRSVPPSPTSPRASEENGLPLLVLPPPAPSVDVEDGEFLFVEPLPPPLEFSNSFEKPESPLTPGPPHPLPDTPAPATPLPPVPPPAVAAAPPTLDSTASSLTSYDSEVATLTQGASAAPGDPHPPGPPAPAAPAPAAPQPGPDPPPGTDSGIEEVDSRSSSDHPLETISSASTLSSLSAEGGGSAGGGGGAGAGVASGPELLDTYVAYLDGQAFGGSSTPGPPYPPQLMTPSKLRGRALGASGGLRPGPSGGLRDPVTPTSPTVSVTGAGTDGLLALRACSGPPTAGVAGGPVAVEPEVPPVPLPTASSLPRKLLPWEEGPGPPPPPLPGPLAQPQASALATVKASIISELSSKLQQFGGSSAAGGALPWARGGSGGGGDSHHGGASYVPERTSSLQRQRLSDDSQSSLLSKPVSSLFQNWPKPPLPPLPTGTGVSPTAAAAPGATSPSASSSSTSTRHLQGVEFEMRPPLLRRAPSPSLLPASEHKVSPAPRPSSLPILPSGPLYPGLFDIRGSPTGGAGGSADPFAPVFVPPHPGISGGLGGALSGASRSLSPTRLLSLPPDKPFGAKPLGFWTKFDVADWLEWLGLAEHRAQFLDHEIDGSHLPALTKEDYVDLGVTRVGHRMNIDRALKFFLER

SEQ ID NO: 295101 - protein, 1548 aa, Artificial Sequence
  derived and/or modified sequence
MQLMALEQRFGSGLPGGGQPLCLMMSSPLPPPPPHFSCLPASDYIIKEKTVLLQKKDSEGFGFVLRGAKAQTPIEEFTPTPAFPALQYLESVDEGGVAWRAGLRMGDFLIEVNGQNVVKVGHRQVVNMIRQGGNTLMVKVVMVTRHPDMDEAVHKKAPQQAKRLPPPTISLRSKSMTSELEEMEYEQQPAPVPSMEKKRTVYQMALNKLDEILAAAQQTISASESPGPGGLASLGKHRPKGFFATESSFDPHHRAQPSYERPSFLPPGPGLMLRQKSIGAAEDDRPYLAPPAMKFSRSLSVPGSEDIPPPPTTSPPEPPYSTPPVPSSSGRLTPSPRGGPFNPGSGGPLPASSPASFDGPSPPDTRVGSREKSLYHSGPLPPAHHHPPHHHHHHAPPPQPHHHHAHPPHPPEMETGGSPDDPPPRLALGPQPSLRGWRGGGPSPTPGAPSPSHHGSAGGGGGSSQGPALRYFQLPPRAASAAMYVPARSGRGRKGPLVKQTKVEGEPQKGGGLPPAPSPTSPASPQPPPAVAAPSEKNSIPIPTIIIKAPSTSSSGRSSQGSSTEAEPPTQPEPTGGGGGGGSSPSPAPAMSPVPPSPSPVPTPASPSGPATLDFTSQFGAALVGAARREGGWQNEARRRSTLFLSTDAGDEDGGDGGLGTGAAPGPRLRHSKSIDEGMFSAEPYLRLESAGSGAGYGGYGAGSRAYGGGGGSSAFTSFLPPRPLVHPLTGKALDPASPLGLALAARERALKESSEGGGAPQPPPRPPSPRYEAPPPTPHHHSPHAHHEPVLRLWGASPPDPARRELGYRAGLGSQEKSLPASPPAARRSLLHRLPPTAPGVGPLLLQLGTEPPAPHPGVSKPWRSAAPEEPERLPLHVRFLENCQPRAPVTSGRGPPSEDGPGVPPPSPRRSVPPSPTSPRASEENGLPLLVLPPPAPSVDVEDGEFLFVEPLPPPLEFSNSFEKPESPLTPGPPHPLPDTPAPATPLPPVPPPAVAAAPPTLDSTASSLTSYDSEVATLTQGASAAPGDPHPPGPPAPAAPAPAAPQPGPDPPPGTDSGIEEVDSRSSSDHPLETISSASTLSSLSAEGGGSAGGGGGAGAGVASGPELLDTYVAYLDGQAFGGSSTPGPPYPPQLMTPSKLRGRALGASGGLRPGPSGGLRDPVTPTSPTVSVTGAGTDGLLALRACSGPPTAGVAGGPVAVEPEVPPVPLPTASSLPRKLLPWEEGPGPPPPPLPGPLAQPQASALATVKASIISELSSKLQQFGGSSAAGGALPWARGGSGGGGDSHHGGASYVPERTSSLQRQRLSDDSQSSLLSKPVSSLFQNWPKPPLPPLPTGTGVSPTAAAAPGATSPSASSSSTSTRHLQGVEFEMRPPLLRRAPSPSLLPASEHKVSPAPRPSSLPILPSGPLYPGLFDIRGSPTGGAGGSADPFAPVFVPPHPGISGGLGGALSGASRSLSPTRLLSLPPDKPFGAKPLGFWTKFDVADWLEWLGLAEHRAQFLDHEIDGSHLPALTKEDYVDLGVTRVGHRMNIDRALKFFLER

SEQ ID NO: 295102 - DNA, 6486 bp, Artificial Sequence
  derived and/or modified sequence
atgacccacagccccgccaccagcgaggacgaggagagacacagcgccagcgagtgccccgagggcggcagcgagagcgacagcagccccgacggccccggcagaggccccagaggcaccagaggccagggcagcggcgcccccggcagcctggccagcgtgagaggcctgcagggcagaagcatgagcgtgcccgacgacgcccacttcagcatgatggtgttcagaatcggcatccccgacctgcaccagaccaagtgcctgagattcaaccccgacgccaccatctggaccgccaagcagcaggtgctgtgcgccctgagcgagagcctgcaggacgtgctgaactacggcctgttccagcccgccaccagcggcagagacgccaacttcctggaggaggagagactgctgagagagtacccccagagcttcgagaagggcgtgccctacctggagttcagatacaagaccagagtgtacaagcagaccaacctggacgagaagcagctggccaagctgcacaccaagaccggcctgaagaagttcctggagtacgtgcagctgggcaccagcgacaaggtggccagactgctggacaagggcctggaccccaactaccacgacagcgacagcggcgagacccccctgaccctggccgcccagaccgagggcagcgtggaggtgatcagaaccctgtgcctgggcggcgcccacatcgacttcagagccagagacggcatgaccgccctgcacaaggccgcctgcgccagacactgcctggccctgaccgccctgctggacctgggcggcagccccaactacaaggacagaagaggcctgacccccctgttccacaccgccatggtgggcggcgaccccagatgctgcgagctgctgctgttcaacagagcccagctgggcatcgccgacgagaacggctggcaggagatccaccaggcctgccagagaggccacagccagcacctggagcacctgctgttctacggcgccgagcccggcgcccagaacgccagcggcaacaccgccctgcacatctgcgccctgtacaacaaggagacctgcgccagaatcctgctgtacagaggcgccgacaaggacgtgaagaacaacaacggccagacccccttccaggtggccgtgatcgccggcaacttcgagctgggcgagctgatcagaaaccacagagagcaggacgtggtgcccttccaggagagccccaagtacgccgccagaagaagaggcccccccggcaccggcctgaccgtgccccccgccctgctgagagccaacagcgacaccagcatggccctgcccgactggatggtgttcagcgcccccggcgccgccagcagcggcgcccccggccccaccagcggcagccagggccagagccagcccagcgcccccaccaccaagctgagcagcggcaccctgagaagcgccagcagccccagaggcgccagagccagaagccccagcagaggcagacaccccgaggacgccaagagacagcccagaggcagacccagcagcagcggcacccccagagagggccccgccggcggcaccggcggcagcggcggccccggcggcagcctgggcagcagaggcagaagaagaaagctgtacagcgccgtgcccggcagaagcttcatggccgtgaagagctaccaggcccaggccgagggcgagatcagcctgagcaagggcgagaagatcaaggtgctgagcatcggcgagggcggcttctgggagggccaggtgaagggcagagtgggctggttccccagcgactgcctggaggaggtggccaacagaagccaggagagcaagcaggagagcagaagcgacaaggccaagagactgttcagacactacaccgtgggcagctacgacagcttcgacgcccccagcctgatggacggcatcggccccggcagcgactacatcatcaaggagaagaccgtgctgctgcagaagaaggacagcgagggcttcggcttcgtgctgagaggcgccaaggcccagacccccatcgaggagttcacccccacccccgccttccccgccctgcagtacctggagagcgtggacgagggcggcgtggcctggagagccggcctgagaatgggcgacttcctgatcgaggtgaacggccagaacgtggtgaaggtgggccacagacaggtggtgaacatgatcagacagggcggcaacaccctgatggtgaaggtggtgatggtgaccagacaccccgacatggacgaggccgtgcacaagaaggccccccagcaggccaagagactgcccccccccaccatcagcctgagaagcaagagcatgaccagcgagctggaggagatggagtacgagcagcagcccgcccccgtgcccagcatggagaagaagagaaccgtgtaccagatggccctgaacaagctggacgagatcctggccgccgcccagcagaccatcagcgccagcgagagccccggccccggcggcctggccagcctgggcaagcacagacccaagggcttcttcgccaccgagagcagcttcgacccccaccacagagcccagcccagctacgagagacccagcttcctgccccccggccccggcctgatgctgagacagaagagcatcggcgccgccgaggacgacagaccctacctggccccccccgccatgaagttcagcagaagcctgagcgtgcccggcagcgaggacatcccccccccccccaccaccagcccccccgagcccccctacagcaccccccccgtgcccagcagcagcggcagactgacccccagccccagaggcggccccttcaaccccggcagcggcggccccctgcccgccagcagccccgccagcttcgacggccccagcccccccgacaccagagtgggcagcagagagaagagcctgtaccacagcggccccctgccccccgcccaccaccaccccccccaccaccaccaccaccacgccccccccccccagccccaccaccaccacgcccaccccccccacccccccgagatggagaccggcggcagccccgacgaccccccccccagactggccctgggcccccagcccagcctgagaggctggagaggcggcggccccagccccacccccggcgcccccagccccagccaccacggcagcgccggcggcggcggcggcagcagccagggccccgccctgagatacttccagctgccccccagagccgccagcgccgccatgtacgtgcccgccagaagcggcagaggcagaaagggccccctggtgaagcagaccaaggtggagggcgagccccagaagggcggcggcctgccccccgcccccagccccaccagccccgccagcccccagcccccccccgccgtggccgcccccagcgagaagaacagcatccccatccccaccatcatcatcaaggcccccagcaccagcagcagcggcagaagcagccagggcagcagcaccgaggccgagccccccacccagcccgagcccaccggcggcggcggcggcggcggcagcagccccagccccgcccccgccatgagccccgtgccccccagccccagccccgtgcccacccccgccagccccagcggccccgccaccctggacttcaccagccagttcggcgccgccctggtgggcgccgccagaagagagggcggctggcagaacgaggccagaagaagaagcaccctgttcctgagcaccgacgccggcgacgaggacggcggcgacggcggcctgggcaccggcgccgcccccggccccagactgagacacagcaagagcatcgacgagggcatgttcagcgccgagccctacctgagactggagagcgccggcagcggcgccggctacggcggctacggcgccggcagcagagcctacggcggcggcggcggcagcagcgccttcaccagcttcctgccccccagacccctggtgcaccccctgaccggcaaggccctggaccccgccagccccctgggcctggccctggccgccagagagagagccctgaaggagagcagcgagggcggcggcgccccccagcccccccccagaccccccagccccagatacgaggcccccccccccaccccccaccaccacagcccccacgcccaccacgagcccgtgctgagactgtggggcgccagcccccccgaccccgccagaagagagctgggctacagagccggcctgggcagccaggagaagagcctgcccgccagcccccccgccgccagaagaagcctgctgcacagactgccccccaccgcccccggcgtgggccccctgctgctgcagctgggcaccgagccccccgccccccaccccggcgtgagcaagccctggagaagcgccgcccccgaggagcccgagagactgcccctgcacgtgagattcctggagaactgccagcccagagcccccgtgaccagcggcagaggcccccccagcgaggacggccccggcgtgcccccccccagccccagaagaagcgtgccccccagccccaccagccccagagccagcgaggagaacggcctgcccctgctggtgctgcccccccccgcccccagcgtggacgtggaggacggcgagttcctgttcgtggagcccctgcccccccccctggagttcagcaacagcttcgagaagcccgagagccccctgacccccggccccccccaccccctgcccgacacccccgcccccgccacccccctgccccccgtgcccccccccgccgtggccgccgccccccccaccctggacagcaccgccagcagcctgaccagctacgacagcgaggtggccaccctgacccagggcgccagcgccgcccccggcgacccccacccccccggcccccccgcccccgccgcccccgcccccgccgccccccagcccggccccgaccccccccccggcaccgacagcggcatcgaggaggtggacagcagaagcagcagcgaccaccccctggagaccatcagcagcgccagcaccctgagcagcctgagcgccgagggcggcggcagcgccggcggcggcggcggcgccggcgccggcgtggccagcggccccgagctgctggacacctacgtggcctacctggacggccaggccttcggcggcagcagcacccccggccccccctaccccccccagctgatgacccccagcaagctgagaggcagagccctgggcgccagcggcggcctgagacccggccccagcggcggcctgagagaccccgtgacccccaccagccccaccgtgagcgtgaccggcgccggcaccgacggcctgctggccctgagagcctgcagcggcccccccaccgccggcgtggccggcggccccgtggccgtggagcccgaggtgccccccgtgcccctgcccaccgccagcagcctgcccagaaagctgctgccctgggaggagggccccggccccccccccccccccctgcccggccccctggcccagccccaggccagcgccctggccaccgtgaaggccagcatcatcagcgagctgagcagcaagctgcagcagttcggcggcagcagcgccgccggcggcgccctgccctgggccagaggcggcagcggcggcggcggcgacagccaccacggcggcgccagctacgtgcccgagagaaccagcagcctgcagagacagagactgagcgacgacagccagagcagcctgctgagcaagcccgtgagcagcctgttccagaactggcccaagccccccctgccccccctgcccaccggcaccggcgtgagccccaccgccgccgccgcccccggcgccaccagccccagcgccagcagcagcagcaccagcaccagacacctgcagggcgtggagttcgagatgagaccccccctgctgagaagagcccccagccccagcctgctgcccgccagcgagcacaaggtgagccccgcccccagacccagcagcctgcccatcctgcccagcggccccctgtaccccggcctgttcgacatcagaggcagccccaccggcggcgccggcggcagcgccgaccccttcgcccccgtgttcgtgcccccccaccccggcatcagcggcggcctgggcggcgccctgagcggcgccagcagaagcctgagccccaccagactgctgagcctgccccccgacaagcccttcggcgccaagcccctgggcttctggaccaagttcgacgtggccgactggctggagtggctgggcctggccgagcacagagcccagttcctggaccacgagatcgacggcagccacctgcccgccctgaccaaggaggactacgtggacctgggcgtgaccagagtgggccacagaatgaacatcgacagagccctgaagttcttcctggagagatag

SEQ ID NO: 295103 - DNA, 6486 bp, Artificial Sequence
  derived and/or modified sequence
atgacccactcccccgctacatccgaggacgaagagagacacagtgccagcgaatgcccggaaggtggatccgagagcgattcttctcctgatggccccggcagaggacctcgcgggactcgtggacaaggatccggcgctccaggctctctcgctagcgtccggggcctacaaggtcgatcaatgagtgtgccagacgacgcccacttttccatgatggtctttcggattggtattcctgacctacaccagactaagtgtctccgcttcaaccccgatgccactatttggacagccaagcagcaagttttatgcgcactgagcgagtctctgcaggatgtgttgaattatgggctgtttcagcctgctacttctggtagggacgctaactttctggaagaggaaagactcctgagagaatacccccaaagtttcgaaaaaggcgtcccctatttagagttccggtataaaacaagggtctataagcagactaacctggatgaaaaacagctggccaaactgcacaccaaaaccggcctaaagaagtttctggagtatgtccagctaggcaccagcgacaaggtggcccgacttctggataagggattagaccctaattatcacgactcagacagcggcgagacacctctgactctggcagcccagactgagggctccgtggaggtgatccgaacactgtgcttgggtggagctcacatcgacttccgagctcgggacggtatgaccgccttgcataaggcagcctgtgctaggcactgcctagcgctgacagccctcctcgatttaggaggcagccctaattataaggaccgaagaggcctgaccccgctatttcacactgccatggtgggtggcgacccgaggtgctgcgagctgctgttgtttaatcgggcccagttgggcattgctgatgaaaacgggtggcaggaaatccaccaggcatgtcagcggggccacagccagcacctggagcatctcctcttttatggcgcagaacccggcgctcagaatgcctccgggaacactgcgcttcatatctgtgctctttataacaaggagacctgcgccagaattctgctgtaccgtggtgctgacaaagacgtgaaaaacaacaacgggcagaccccgtttcaggtcgccgtcattgccggcaattttgagcttggcgagctgatccgcaaccatcgcgaacaggacgtggtcccctttcaggagtcacccaagtatgccgcacggaggagaggaccgcccggcacaggtctgactgtgccaccggccctactgcgggcgaattctgatacatctatggccctccccgactggatggtcttcagcgcccctggcgctgcatccagtggcgcccccggtcctacatcaggttcccagggccagtctcagcccagtgcaccaaccacaaaactttctagtggcacactgcgttcagcctcgagccctcggggcgcccgtgcacgatcaccttctagagggaggcaccccgaagacgctaaaaggcagcccaggggaaggccctctagtagtggaaccccacgcgagggccctgccggcgggaccggagggtcaggagggcctggggggtcacttggatctagaggacggcgtaggaaattatattccgcggtaccaggcaggagtttcatggccgtgaagagttatcaggcccaggctgagggagagatcagtctgtctaagggagaaaaaatcaaggtgctgtccatcggggaagggggcttctgggagggccaggtcaagggcagggttggatggtttccttcagactgtctagaggaggtggctaacaggagtcaggagtctaaacaggagtctaggtccgacaaggcaaaacggctgttcagacactacaccgtaggcagctatgattccttcgacgccccatcactcatggacgggataggaccaggctccgactacattataaaagagaaaacagttctcctgcaaaagaaggactcagaaggctttgggttcgtgcttcgtggggctaaagcccagacacccatcgaagagtttacacctacccctgccttccccgcgctgcagtacttagaatcagtggatgaggggggtgtcgcttggagggctggcctgcggatgggtgacttcctgatcgaagtgaacgggcagaacgtggtgaaagtgggtcaccgtcaggttgttaacatgatccggcagggcggaaacaccctgatggtgaaggtggtcatggtgactcggcacccggacatggatgaggcagtccataagaaggctccacagcaggccaagaggttaccgccccctacgattagcctcagatcaaagtcaatgacaagcgagttggaggagatggagtatgagcagcagcccgcacccgtgccctccatggagaagaagcgtaccgtatatcagatggctcttaataagctggacgagatattagctgccgcccagcaaactatcagcgccagtgagagcccagggccaggggggctggcttctttgggtaaacacaggccgaagggattcttcgccaccgaatcatcttttgacccgcaccatagggcgcagccgagctatgaacgcccctcctttcttcctcctgggccggggctgatgctccgccagaagtccatcggcgctgccgaggacgacagaccataccttgctccacccgccatgaaattttccagatctctttctgtgcccgggtccgaggatatccctcccccgcccacaacatcgccaccggaacctccctatagcacaccacctgtgccttcatctagtggacgccttactccctcccctagggggggcccttttaatcccggcagtggcggacccttgcctgcttccagtccagcatcttttgacggaccctcccctccagacactcgggtaggctctcgggagaagagcctatatcactccgggcccctgccccctgcgcaccaccaccctccgcatcatcatcatcaccacgccccacccccccagccccaccatcatcacgcccacccgccccatcctcccgaaatggagaccggcggatcccccgatgaccctcccccacgcctcgctctcggaccgcaaccatcacttcgcggttggcggggaggaggacccagtccgacacccggcgctccaagtccttcacatcacggctctgcaggcggggggggtggatcatctcaaggccccgctctcaggtacttccagttgccacctagggccgccagcgccgcaatgtacgtccctgcaaggtcaggaagaggacgcaaaggacctctggtgaagcaaacaaaagtggagggcgagcctcagaagggaggcggcttaccccctgcacccagtccgacaagccctgcaagtccccaacctccacccgcagtggcagctccgagtgaaaagaacagtattccgattcccacaattatcatcaaagctccatctaccagctcttctgggagatcttcacaaggctcgtctacagaggccgaacctcccacacagcctgaacccaccgggggtggaggcggcggaggatcgtccccatctcctgctcctgctatgtcccctgtgcctccgtctccatccccagtccccacacccgccagtccaagcggacctgccacactggatttcacatcccaatttggagcagccctggtgggcgctgccagacgggagggcggatggcaaaatgaggctaggcggagaagcactctgttcctctcaaccgatgcaggcgatgaggatggaggcgatggaggactggggaccggggccgctcctggcccaagactccgccattcaaaatccatagacgaagggatgtttagtgccgagccctatctgcggctggagtccgcagggtctggtgcaggttacgggggctacggtgccgggagcagggcttacggaggtggagggggctccagcgcctttacgtcattcctccccccgagacctctcgtgcacccactgactgggaaagcccttgaccccgccagccccttaggcttggctctggcagcccgcgagagagctctcaaagagagttcagagggaggaggagctcctcagcctcccccgcgcccgccctccccaagatatgaggctccgcccccaactccgcaccatcactccccacacgcccaccacgagccggtcctccggctttggggagccagtccacctgacccggctagaagagagctcggctacagggccgggctgggatcacaggaaaagagtctgccggccagcccccccgcagcaagacgctccctgcttcatcggctgccccccaccgccccaggggtcggcccattactgctgcagctaggcaccgagccacctgctcctcaccctggagtttcaaagccatggagaagtgcagcccccgaggagccggagcggctgccattgcacgtgagatttttggaaaattgtcagcctcgcgcccccgtaactagcgggcgtggccctccgtccgaagacggacctggagtgcctcctccctcaccgcgcaggtccgtccccccgagcccgacttccccaagagcctcggaagagaacgggctgcccctgctcgtcctgccgcctccagccccgagcgtggacgtcgaggatggggaatttctgtttgtggaaccactacctcctcccttggagttttccaatagcttcgaaaaaccagaaagccccctaacaccgggacccccccaccctcttcccgatactcccgctcctgctactccgctcccccccgtccctcctcccgccgtcgccgcagccccgccaaccttggacagtactgcaagctccttgactagttatgatagcgaagtggctacactgacacagggagcctctgctgctccaggagatcctcaccccccaggaccccctgcccccgctgccccagccccagcagctcctcaacccggcccagatcctcctccaggcaccgatagcggtattgaggaggtcgattcccgtagcagcagcgatcaccctcttgaaaccatctcttctgctagtacgctctccagcctgtccgccgagggtggcggttccgcaggcggagggggcggcgcgggagctggggtcgcatcgggcccagaactcttagacacgtatgtagcctacttggacggacaggcgttcggcgggtcatcgacccccggccctccttatccaccccagcttatgacgccctccaagctgcgaggtagagccctgggcgcgtccggaggcttgagacccggtcccagcggcggattgcgggaccctgtcactcctactagcccaactgttagcgtgacaggtgcaggaaccgacggcctcttggctctccgtgcctgtagtggaccaccaacagccggagtggccggcggtcccgtcgccgttgagcctgaggtgccacctgttcctttgcccacagcgtcatctctcccacggaagctgctgccttgggaggaggggccagggccaccacctccgcccctgccaggcccattggcacagccccaggcctcagccttggctaccgttaaggcctcaattatcagcgaactgtcctccaagttgcagcagtttggcgggtcatccgcggcaggtggcgcactcccctgggcaaggggggggtcgggcgggggaggagatagccatcatggaggcgcaagttatgtgcctgagaggacaagttcgctacaaagacaaagactcagcgatgatagccaatccagtttactgagcaaaccagtgtccagcttatttcagaattggcctaaaccaccccttccccctctcccgactggcactggcgtgtccccaaccgccgctgccgcaccgggcgcaacatccccttccgctagttcatcgtccacatctacaagacatcttcagggcgtcgagttcgagatgcgcccacctctcttgagacgggctccctctcctagtctgctcccagccagcgaacacaaggtcagcccggcccctcggccttcaagtttgcccattctgccctcagggcctctgtatcctggtcttttcgacatcaggggctcacctacaggaggtgccggcggctctgccgatcctttcgctcccgtgttcgtgccaccccatcctggaatctccggagggctagggggggctctaagcggcgccagtcggagcctcagcccaacaaggctcctctcactgcctcctgataagcctttcggcgcaaaacccttgggcttttggacaaagtttgatgtagcagattggttagagtggctcggtctcgctgaacacagggcacaatttttagatcatgagatcgacggctcacacctcccagcactgacgaaagaggactatgtcgatcttggcgttacacgggttggtcacagaatgaatatagacagggcgctgaagttcttcttagagagatag

SEQ ID NO: 295104 - DNA, 6486 bp, Artificial Sequence
  derived and/or modified sequence
atgacccacagccctgccaccagtgaagatgaggagcggcacagcgccagcgagtgcccagagggcggcagcgagagtgacagcagcccagatggccctggccggggcccccggggcacccggggccagggcagcggggcccctggcagcctggcctctgtgcggggcctgcagggccgctccatgtctgtgcctgatgatgcccacttctccatgatggtgttcagaattggcatcccagacctgcaccagaccaagtgcctgcgcttcaacccagatgccaccatctggacagccaagcagcaggtgctgtgtgccctgtctgagagcctgcaggatgtgctgaactacggcctcttccagcctgccaccagcggcagagatgccaacttcctggaggaggagcggctgctgcgggagtacccccagagctttgagaagggcgtgccctacctggagttccgctacaagaccagggtgtacaagcagaccaacctggatgagaagcagctggccaagctgcacaccaagacaggcctgaagaagttcctggagtatgtgcagctgggcaccagtgacaaggtggcccggctgctggacaagggcctggaccccaactaccatgacagcgacagcggggagacccccctgaccctggccgcccagacagagggctctgtggaggtgatccgcaccctgtgcctgggcggggcccacatcgacttccgggccagagatggcatgacagccctgcacaaggccgcctgtgcccggcactgcctggccctgacagccctgctggacctgggcggcagccccaactacaaggaccggcggggcctgacccccctcttccacacagccatggtgggcggggacccccgctgctgtgagctgctgctcttcaacagagcccagctgggcattgctgatgaaaatggctggcaggagatccaccaggcctgccagaggggccacagccagcacctggagcacctgctcttctacggggctgagcccggggcccagaatgccagcggcaacacagccctgcacatctgtgccctgtacaacaaggagacctgtgcccgcatcctgctgtacagaggagctgacaaggatgtgaagaacaacaacggccagacccccttccaggtggccgtgattgctggcaactttgagctgggggagctgatccggaaccaccgggagcaggatgtggtgcccttccaggagagccccaagtatgctgcccggcggcggggccccccaggcaccggcctgactgtgcccccagccctgctgcgggccaacagcgacacctccatggccctgcctgactggatggtgttcagcgcccctggggccgccagcagcggggcccctggccccaccagcggcagccagggccagagccagcccagcgcccccaccaccaagctgagcagcggcaccctgcggagcgccagcagccccaggggggcccgggcccggagccccagccggggccgccacccagaagatgccaagaggcagccccggggccggcccagcagcagcggcaccccccgggagggccctgctgggggcactggaggcagcggcggccctgggggcagcctgggcagccggggcagaagaaggaagctgtacagcgctgtgcccggccgctccttcatggctgtgaagagctaccaggcccaggccgagggggagatcagcctgagcaaaggagagaagatcaaggtgctgagcatcggggagggcggcttctgggagggccaggtgaagggccgggtgggctggttccccagcgactgcctggaggaggtggccaacagaagccaggagagcaagcaggagagcagaagtgacaaggccaagaggctcttccgccactacacagtgggcagctatgacagctttgatgcccccagcctgatggatggcatcggccctggcagtgactacatcatcaaggagaagacagtgctgctgcagaagaaggacagcgagggcttcggctttgtgctgcggggggccaaggcccagacccccatcgaggagttcacccccaccccagccttccctgccctgcagtacctggagagcgtggatgagggcggcgtggcctggagggctggcctgaggatgggagacttcctgattgaggtgaatggccagaatgtggtgaaggtgggccaccggcaggtggtgaacatgatccggcagggcggcaacaccctgatggtgaaggtggtgatggtgaccaggcacccagacatggatgaagctgtgcacaagaaggccccccagcaggccaagaggctgcccccacccaccatcagcctgcggagcaagtccatgaccagcgagctggaggagatggagtatgagcagcagcctgcccctgtgcccagcatggagaagaagaggacagtgtaccagatggccctgaacaagctggatgagatcctggccgccgcccagcagaccatcagcgccagcgagagccctggccctgggggcctggccagcctgggcaagcaccggcccaagggcttctttgccacagagagcagctttgacccccaccaccgggcccagcccagctatgaaagacccagcttcctgcccccaggccctggcctgatgctgcggcagaagagcattggagctgctgaagatgaccggccctacctggcccccccagccatgaagttcagccgcagcctgtctgtgcccggcagcgaggacatccccccaccacccaccaccagccccccagagcccccctacagcaccccacctgtgcccagcagcagcggccgcctgacccccagcccccggggcggccccttcaaccctggcagcggcggccccctgcctgccagcagccctgccagctttgatggccccagccccccagacaccagggtgggcagccgggagaagagcctgtaccacagcggccccctgcccccagcccaccaccaccccccccaccaccaccaccaccacgcccccccaccccagccccaccaccaccacgcccaccccccccaccccccagagatggagaccggcggcagcccagatgatcctccaccccggctggccctgggcccccagcccagcctgcggggctggaggggcggcggccccagccccacccctggggcccccagccccagccaccacggcagcgctgggggcggcggcggcagcagccagggccctgccctgcgctacttccagctgccccccagggctgccagcgctgccatgtatgtgcctgcccggagcggccggggcaggaagggccccctggtgaagcagaccaaggtggagggggagccccagaagggcggcggcctgcccccagcccccagccccaccagccctgccagcccccagcccccacctgctgtggccgcccccagcgagaagaacagcatccccatccccaccatcatcatcaaggcccccagcaccagcagcagcggccgcagcagccagggcagcagcacagaagctgagccccccacccagcctgagcccaccggcggcggcggcggcggcggcagcagccccagccctgccccagccatgagccctgtgccccccagccccagccctgtgcccaccccagccagccccagcggccctgccaccctggacttcaccagccagtttggagctgccctggtgggcgccgcccggcgggagggcggctggcagaatgaggcccggcggcgcagcaccctcttcctgagcacagatgctggagatgaagatggaggagatggcggcctgggcaccggggccgcccctggcccccggctgcggcacagcaagagcattgatgagggcatgttttctgctgagccctacctgcggctggagagcgctggcagcggggccggctacggcggctatggagctggcagccgggcctacggcggcggcggcggcagcagcgccttcaccagcttcctgcccccccggcccctggtgcaccccctgaccgggaaggccctggaccctgccagccccctgggcctggccctggccgcccgggagcgggccctgaaggagagcagcgagggcggcggggccccccagcccccaccccggccccccagccccaggtatgaggcccccccacccaccccccaccaccacagcccccacgcccaccacgagcctgtgctgcggctgtggggcgccagccccccagaccctgcccggcgggagctgggctaccgggccggcctgggcagccaggagaagagcctgcctgccagccccccagctgcccggcgcagcctgctgcaccggctgcccccaacagcccctggggtgggccccctgctgctgcagctgggcacagagcccccagccccccaccctggggtgtccaagccctggaggtctgctgcccctgaggagcctgagcggctgcccctgcacgtgcgcttcctggagaactgccagccccgggcccctgtgaccagcggccggggccccccatctgaagatggccctggggtgcccccacccagcccccggcgctctgtgccccccagccccaccagcccccgggcctctgaagaaaatggcctgcccctgctggtgctgcccccaccagcccccagcgtggatgtggaggatggagagttcctgtttgtggagcccctgcccccacccctggagttcagcaacagctttgagaagccagagagccccctgaccccaggccccccccaccccctgcctgacaccccagccccagccacccccctgccccctgtgcccccacctgctgtggccgccgccccacccaccctggacagcacagccagcagcctgaccagctatgattctgaggtggccaccctgacccagggcgccagcgctgcccctggggacccccaccccccaggccccccagccccagctgccccagccccagctgccccccagcccggccctgaccccccacctggaacagattctggaattgaggaggtggacagccgcagcagcagtgaccaccccctggagaccatcagcagcgccagcaccctgagcagcctgtctgctgagggcggcggcagcgctgggggcggcggcggggccggggccggcgtggccagcggccctgagctgctggacacctacgtggcctacctggatggccaggcctttggaggcagcagcaccccaggccccccctacccaccccagctgatgacccccagcaagctgcggggccgggccctgggcgccagcggcggcctgcggcccggccccagcggcggcctgcgggaccctgtgacccccaccagccccaccgtgtctgtgactggagctggaacagatggcctgctggccctgcgggcctgcagcggccccccaacagctggggtggccggcggccctgtggccgtggagcctgaggtgccccctgtgcccctgcccacagccagcagcctgcccaggaagctgctgccctgggaggagggccctggccccccacctccacccctgcccggccccctggcccagccccaggccagcgccctggccaccgtgaaggccagcatcatcagcgagctgagcagcaagctgcagcagtttggaggcagcagcgctgctggaggagccctgccctgggcccggggcggcagcggcggcggcggggacagccaccacggcggggccagctatgtgcctgagaggaccagcagcctgcagaggcagaggctgagtgatgacagccagagcagcctgctgagcaagcctgtgagcagcctcttccagaactggcccaagccacccctgccccccctgcccaccggcaccggggtgagccccacagctgctgctgcccctggggccaccagccccagcgccagcagcagcagcaccagcaccaggcacctgcagggcgtggagtttgagatgaggcctcccctgctgcggcgggcccccagccccagcctgctgcctgccagcgagcacaaggtgtccccagccccccggcccagcagcctgcccatcctgcccagcggccccctgtacccaggcctgtttgacatccggggcagccccaccggcggggccggcggcagcgctgacccctttgcccctgtgtttgtgcccccccaccctggcatcagcggcggcctgggcggggccctgagcggggccagccgcagcctgagccccacccggctgctgagcctgcccccagacaagccctttggagccaagcccctgggcttctggaccaagtttgatgtggccgactggctggagtggctgggcctggccgagcaccgggcccagttcctggaccacgagattgatggcagccacctgcctgccctgaccaaggaggactatgtggacctgggcgtgaccagggtgggccacaggatgaacatcgaccgggccctgaagttcttcctggagaggtag

SEQ ID NO: 295105 - DNA, 6486 bp, Artificial Sequence
  derived and/or modified sequence
atgacccacagccccgccaccagcgaggacgaggagcggcacagcgcaagtgaatgccccgaaggcggcagtgagtcagatagctccccggacggcccaggcagagggccacggggcacaagggggcagggaagtggcgcgccaggatctctggcgtccgttagggggctgcaaggacgttctatgtctgtgccggacgatgcccactttagcatgatggtgtttaggatcgggatcccggacttgcaccaaactaaatgcctcaggttcaaccccgatgcaacaatctggactgcgaaacagcaggtgctgtgcgcattgtcagagagcttgcaagatgttctgaattacgggctgtttcaacccgccaccagcggcagggatgctaactttcttgaggaggaacggctgctgcgtgagtatccccagtccttcgagaaaggcgtaccatacctagagttccgctacaagactcgggtctacaaacaaactaatctggacgaaaagcagctagcaaagctccacaccaagaccggattaaagaagttcttagagtacgtacagctcggcaccagcgacaaggttgctagactgctagataaagggttggacccgaattaccatgactccgactcgggggagaccccccttactctggcggctcaaactgagggatctgtggaagtcattcgcaccctctgcctgggaggagcccatattgacttcagggcacgcgacgggatgacagcgctgcataaagctgcctgtgcccgccattgtctcgcactgaccgcactactggacctgggcggcagcccgaattacaaagaccgcagagggctgaccccgttattccatacagcaatggtcggtggtgacccgagatgttgtgagcttctgttgttcaacagagcccagctcggaattgcagacgaaaacgggtggcaggagattcaccaggcttgccagcggggacattcccagcatctggaacacctgctcttctatggtgccgaacctggcgctcagaatgcctctgggaacacagcacttcacatctgtgcgctgtataacaaagagacttgcgcacgaatcctcctgtatcggggtgcagacaaagatgtgaagaataacaacggtcagacgccctttcaggttgctgtgatcgccggcaatttcgagctcggagaactgattcgtaatcatcgcgagcaggatgtggtccccttccaggagagtccaaaatatgccgcaagacggagggggccgccaggaactggactgacagtcccaccagcccttcttcgagctaatagcgacacatccatggccctacctgattggatggtgttctcagcacctggggcggcatctagcggtgccccgggacctacgagtggctcccagggccagtctcagcccagcgctcccaccaccaagctgagcagcgggaccctgaggtctgctagcagcccaaggggagctagagccagaagcccctccaggggccgtcaccccgaggatgccaagcggcagccccgcggtcgtccaagcagcagcggtactcctcgggagggacccgccgggggaaccggaggaagcggcggccccggcggttcattaggttcccggggaaggagacggaagctgtactcagctgtgcccggaagatcttttatggcggtcaaaagctaccaggcccaggccgagggagagatctctctcagcaaaggagagaagattaaggtcctgagcatcggcgagggtgggttctgggaagggcaggtaaagggaagggtcggttggttccccagcgattgccttgaagaagtggccaacagatcacaggagtcaaaacaggagtcaaggagtgacaaagcaaagagactgttccggcactacacggtcgggtcttacgatagttttgacgcccccagtctgatggacggcatcggcccaggatccgactacattataaaagaaaagaccgtcctcctccagaagaaagattctgaagggttcggattcgtgttaaggggggcgaaagctcaaacccctatcgaggagttcactccgacaccggcttttccagccctccagtatctggaatctgtcgatgagggaggagtggcctggcgtgcgggcctccgcatgggcgacttcttaatcgaggtgaatgggcagaacgtcgtgaaagttggtcatagacaggtcgtgaatatgattagacagggcggcaataccctaatggtgaaggtggtcatggtaacccggcatccagacatggacgaggctgtccacaaaaaagcgccgcagcaggcaaagcgcctcccaccacctacaatctccttgcgcagtaaatccatgacctctgaattggaggaaatggagtatgagcagcagccggcaccagtgccctcaatggagaagaaacgtacagtgtaccagatggctctgaacaagcttgacgagatcctggccgcagctcagcaaactatatccgcttctgagtccccagggcctggcgggctcgccagcctgggtaagcaccggcctaaggggttcttcgccacagagtcctcgtttgacccgcaccaccgagctcagccatcctacgagcgcccttcattcttgcctccaggccctggtttaatgctgcgacagaagagcattggcgccgcagaagacgacagaccgtacctggcgcctcccgccatgaaattcagtagaagcctgagtgttccaggttctgaggatatcccaccacctcccacgacatcccccccagagcctccatatagcacacctcccgttccaagtagttctggcaggctgactcctagtccccgaggaggccctttcaacccgggcagtggtggacccctgcccgcatctagcccggcctcctttgacggcccatctccccccgacacaagagtggggagcagggaaaagagcctgtatcacagtggtcccctgccacctgcgcaccatcacccacctcaccaccaccaccatcatgctcccccccctcagccacatcaccaccatgcccaccccccgcaccccccggagatggaaacaggaggctcacctgatgatcccccgcccagactcgcccttggcccgcagccctcgctcagagggtggagaggcggtgggccgtctcccactcctggtgcgccctctccgagccatcacgggagcgccggtggggggggcggcagcagtcagggccctgcgctacggtacttccagctgcccccaagagcggcaagtgctgcaatgtatgtcccggcccggtcaggacgagggcgcaaaggaccacttgtgaaacaaaccaaagttgaaggcgaaccccagaaagggggcggcctgcccccagccccctcccccacttcccccgcttccccgcaaccaccccccgctgtcgccgcccctagcgagaagaatagcattcctatccctactataataattaaagcccccagtactagcagttccggccggtccagccaggggagtagtaccgaagccgaacctccaactcagccagaacctaccggcggtggcggggggggtggctctagtccgtcgcctgcccccgcgatgagtccggtccccccttcaccatctccagttccgacgccggcctccccaagcggccccgcgacgctggattttactagtcagtttggagctgcactggttggagcggccaggcgggaaggtggttggcagaacgaagcacggcgccgctctactctcttcctatctacagacgcaggcgatgaagacgggggggacggcggtttagggaccggagctgctccaggacctagactgcgacatagcaagagtattgatgagggcatgttcagcgcggagccttatctgaggctggagagcgctggctctggagccgggtacgggggttacggcgctgggagtcgtgcctacgggggaggtggtggatcaagcgctttcacctccttcctgccacccaggccacttgtgcacccgctcaccggaaaagcactggaccccgcttctcctttgggcttggctctcgccgcacgcgagagggcgctaaaggagtcgtccgagggcggaggcgctcctcagcccccccccagaccccccagtcctagatatgaggctccacccccgacccctcatcatcactccccacacgcgcaccacgagccagtgttacggctctggggggcttctcccccggatcccgcacgccgggagctgggctaccgggcaggactaggctcgcaggagaagtctctgccagccagtcccccagcagcccgtcgctccctgctccataggctgccacctacagcacctggagtcggcccactcctgttacagctcgggacagaaccacctgctcctcaccctggcgtgagcaaaccctggagaagtgcggctcctgaagagcctgaaagactgcctctccacgtgcgttttctggagaattgccagcctcgggcccccgttacctccggaagagggccaccatctgaagacgggccgggagtgcccccaccctcacctaggcgaagcgtaccgcctagcccaacttccccgcgcgcttcggaggaaaacggactccctctgttagttcttcctcctcctgctccttctgtcgacgtggaggatggggagtttctgtttgtcgagcctcttccccccccactggaatttagtaactcttttgaaaagcccgagtcaccactgactccaggcccgccccatccattgcccgatacccctgccccggccacgcctcttccaccagtcccaccccctgccgttgcagcagccccccctacccttgattctaccgcgagtagcctgactagctatgattctgaggtggccaccctgacacagggtgccagcgcagcaccaggtgatcctcacccgcccgggccaccagcgcccgctgcccctgcacccgccgcgcctcagcccggtcctgacccaccaccgggtaccgattccggcattgaagaggttgatagcagaagtagttcagatcaccctctggaaacaatctcatccgctagtacactctcatccctttccgctgaaggcggtgggagtgccggcgggggcgggggagcaggggctggagtcgcatcggggcccgaactgctagacacttatgtggcctatctagacggccaggcatttggaggatctagcactcccggaccgccgtatcctccgcagcttatgacccccagcaaactcagaggaagggctctcggggcatcgggaggactgcgtcccggtccgtctggtggcctacgggatcccgtcacacctacttctcctacggtgtcagtgacgggcgctgggacagatggtctgttagcactccgggcctgttccggcccacctaccgccggggtggctggagggcctgtagctgtcgaaccggaagtcccgcccgttccgctgccgactgcctcaagtcttcctcgtaaactgctcccctgggaggagggccccggccctcctccccctcccctcccaggacccctcgcgcagccccaggcatccgcactggcaactgtcaaagcatctattatttctgaactttcttcgaaactgcagcagttcggtggctcatcagcagctgggggggccctcccatgggcccgaggtggctctggcggcggaggcgattcacaccatggcggggcaagctacgtgcccgagagaacctcatccttacagcggcagcggctgagcgacgattcacagagtagtcttctgagcaaaccggtctcatccttattccagaactggcctaagccgcccctgccacccctgcccaccggcacaggggtatctcctacagctgctgccgcgccaggggctacatcccccagcgcttcctcaagctctacatctacaagacacctgcagggagtggagttcgaaatgcgccctcccctgttaaggcgggccccatccccctcactgcttcccgccagtgaacacaaggtgagtcccgcccccagaccttctagcctgcccattctgccctctgggcctctctaccctggactgtttgacattcggggatctcctaccggcggagcgggaggaagcgcggatcccttcgcgccagtcttcgtgccaccccacccaggcatttctggaggcctagggggcgcactctccggtgccagtcgttctttatccccaacacgactcctgtctctcccgccggataagccttttggcgctaagccattggggttttggacaaaatttgatgtggcagactggctcgaatggctaggcctggccgagcatagagcacagtttcttgatcatgagattgacggctcccatctgccagctcttacaaaggaggactatgtcgacttgggcgtaacgcgtgtaggccaccggatgaacattgacagagccctgaaattctttctggagcgctag

SEQ ID NO: 295106 - DNA, 6486 bp, Artificial Sequence
  derived and/or modified sequence
atgacacactcacccgctaccagcgaggatgaagaaaggcatagcgcctctgagtgccccgagggaggctccgagtccgatagttcccctgacggccctggcagaggacctagaggaacccgaggacagggaagcggggcacctggatcgctggctagcgttcggggattgcagggcaggtcaatgtccgtgcctgatgatgcccacttctccatgatggtgtttcgaatcgggatcccagacctgcaccagactaagtgcctccggttcaatcccgacgcgaccatttggactgccaagcagcaggtgctgtgcgccctctcagagtccctgcaggatgtgcttaactatggactgttccagcctgctactagcggaagagacgcaaatttcctggaggaggaaaggctcctgagagaataccctcagtcattcgagaagggagtgccatatctcgagttcaggtacaagacccgggtgtacaagcagacaaatctggatgagaaacagctagcgaagctccacaccaagacaggcctgaaaaaattcttggagtacgtgcagctcggtacatccgacaaagtggcacggctgctcgacaagggtctcgatcctaactaccacgatagcgatagcggggagacacccttgacccttgccgcacagaccgaagggagcgtcgaagtcattcgtaccctgtgtttaggtggagcccacatcgattttagagctagagatggaatgacggccctgcacaaggctgcctgtgcacgccactgtcttgccttgacagctctcctcgacctgggcggtagtcctaactataaggataggaggggattgacgcccctgtttcataccgcaatggtcggtggggaccctcggtgctgcgaactgctgctttttaacagagctcaattaggaattgccgacgaaaacggttggcaagaaatccatcaagcatgccagcgcggtcattcccagcatctggagcatctgctgttctacggagccgaacccggtgcccagaatgcatcgggaaacactgccctgcacatatgcgccctatacaataaagagacctgcgccagaatcctgctctacagaggggctgataaggacgttaagaataataacggccaaactcccttccaggtggcagttattgcgggtaactttgaactaggcgaactcattaggaatcaccgtgaacaagatgtcgtcccttttcaggagtcccccaaatatgcagcccgacgcagggggccaccgggaaccgggttgacagttcctcctgccctcctgagggccaattccgatacctccatggcactgccagactggatggtttttagcgccccaggcgctgctagttccggggcacccggtcccacttcgggctcacaggggcaatcgcaacccagcgcccctaccacaaagctctcgtcgggaacacttcgctccgcatcaagccctcggggagccagagcaagaagcccttcccgaggtcgacaccctgaagacgccaaacgacagccgagggggagacctagtagcagtggaaccccccgtgaagggcctgccggagggactggcggatccggaggtccaggtggttctcttgggagtcgcggtcgacgcaggaaactttattctgccgtgccaggtcggagtttcatggccgttaaatcctatcaagcccaggcagagggggagatcagtttatctaaaggagaaaagatcaaagtgctgagtattggggagggtggtttttgggaggggcaagtgaaggggagggtgggctggttcccaagtgactgtctagaggaagtcgccaatcgatcacaggaaagcaagcaggagtccagaagtgataaggccaagaggctctttcggcattacacagtgggaagttatgacagttttgatgcaccatccctgatggatggtatcgggcctggtagcgactacataataaaggaaaagaccgtcctcctgcagaagaaggactctgagggctttggcttcgtgctcaggggcgctaaagcccagacccccatcgaagaattcacccccaccccagcttttccggctcttcagtatcttgagagcgtagatgaggggggagtggcttggagggccggactcagaatgggggattttttgatcgaagtcaatggacagaacgttgtgaaggtgggccatcggcaggtagtcaacatgattcgtcaaggcggaaacaccttgatggttaaggttgttatggtgactcgccacccagatatggacgaagcagtgcacaaaaaagcaccccaacaggctaagcgtctaccccctcccacaatcagcttacgcagtaagtcaatgacttcagagctggaagaaatggagtatgaacagcaacccgctccggtccctagcatggagaagaagcgcacagtctaccaaatggcactcaacaaactggacgagatcctggccgctgcccagcaaactatctcggccagcgaatcccccggtcctggagggcttgcctctttaggaaagcaccggccaaagggcttctttgcaacagaatcgtcgttcgacccccaccatagggcccagccttcctatgagaggccaagcttcctccccccagggccaggcttgatgttgcgtcaaaagtccattggagctgctgaggacgatagaccatatctcgcccctcccgctatgaagtttagtaggagtttgtcagtgccgggatccgaagacatcccccctcctcccaccacctcgcccccagagcccccatacagcacccccccagtcccctcctcctccggacgtctcaccccctcaccacggggaggtccttttaacccaggatcaggcggtccgctgcccgctagttctccagcctcatttgatggtccctcgccacctgacactcgcgtcggctcccgggaaaagtctctgtatcacagtggacccctccctccggcacaccatcatcctccccaccaccaccaccaccacgcgccaccaccccagccacaccaccaccacgctcaccctcctcatccccctgagatggagactggtgggtcaccagacgatccaccacccaggctggctctggggcctcagccttccttaagaggctggagagggggtggaccctcacctacacccggagctccctctccatcccatcatggatcagctggcggtggcggtgggtcatctcagggcccagcgctccgatattttcagctaccacctcgcgctgcatccgcggcaatgtatgtgccagcccgatctgggagaggcaggaagggccctctggtgaaacagacaaaggtggaaggcgaaccgcagaaaggaggtggcctgccacccgctcccagccctacctcacctgcgtcacctcaaccaccaccagccgtggccgcaccttccgaaaaaaactcaatccctattccaacgattatcatcaaagcgccatccacatcttctagtggcagatcaagccaggggagcagcactgaagccgaaccacccacccagccagaacctacgggtggcggtggaggcggagggtcctcaccctctccggcaccagccatgagccccgtccccccatccccgtcccccgtgccgacgccagcctccccctccggacctgctacgctcgactttactagccagtttggtgcagcactggtaggtgccgcaagacgcgagggaggttggcagaatgaggcaagaaggaggtccacgctgttcctgtctacagatgcaggggacgaggacggtggcgatggcggactgggtactggtgctgcccctggcccaagactgaggcactctaagagtatcgatgaggggatgtttagtgcagagccttacctgaggctggagagcgctggctccggggctggctatgggggatatggggcagggtcccgggcttatggcggaggaggcggttccagtgctttcaccagttttctgccacccaggcccctggtccatccactgactggcaaagcactggacccggcaagccccctggggctggccctggcagcgcgtgagagagcgttaaaggagtccagcgagggaggtggagctccacagccacctcctcgacccccatcacctcggtatgaggcacctccgcctacccctcatcatcactccccacatgctcatcacgagcctgtcctgcggctctggggcgcatcaccacctgaccctgcaagacgtgaactcggttacagagcaggtttagggtctcaggagaaaagtctgcctgcctcaccccctgcggctcgaaggagcctgctgcaccgtctgcccccaacagcaccgggagtggggcctctgctactccagctggggactgaacctcccgcacctcaccctggggtctcgaagccatggagaagcgcggctcccgaagagcccgaacgcctccccttgcacgtgaggttccttgaaaactgccaacccagggctcccgtgactagcggacgcggaccaccgtccgaggacgggcctggcgtgcctccgccatctccccgacgttccgtgccccctagccccacaagcccaagagccagtgaggagaacggactcccgctcctggtcctcccgcctcccgcaccaagcgtggacgttgaggacggggagttcctattcgtagagcccctcccccctcccctggagttcagcaactcattcgagaagcccgagtcccctctcactccaggacctccccacccccttccggacactccggctcccgctacacccctaccccctgtcccgccaccagcagttgccgctgctcctccaacactcgactctacggcctcatctctcacctcctacgatagtgaagtggctaccctaacgcagggtgctagtgcagcgcctggcgacccccaccccccaggccctccagcacccgcagcacccgctcccgctgcgccacagcccggaccggaccctccaccagggacagattctgggatcgaggaagtggactcccgatcctcctctgaccaccccctagagaccatctcgagcgcatccaccctgtctagtctcagtgccgagggcggtgggtcagcaggagggggaggcggtgccggagctggggtagctagcgggccagagctactggacacatacgttgcttacctcgacggccaagccttcgggggttcatctaccccaggacccccttatccaccacagctgatgacccctagcaagctgcgcggaagggcgctcggcgcttccggcggtctgcggcctggacccagtggaggactccgggatcctgtgacacccacatcccccacagtctctgttacaggcgctggcactgacgggcttctagcccttcgggcttgctctggtcctcccacggccggtgtggctggcggacctgtggcggttgagcctgaagtcccccctgtgcccctccctaccgccagcagtttgcccaggaagcttttgccttgggaggagggacccggaccccctccaccgccactcccagggcctcttgcccagccccaagccagcgctctggcaacagtgaaggctagtatcatatctgagctgtcctccaaacttcaacagttcggtggaagtagtgcagccggaggtgctctgccctgggccagggggggtagcggcggaggcggtgacagtcaccacggaggagcttcatatgtgccagaacgcacaagttctttgcagaggcagcgcttgagcgatgacagtcagtcttcactgctgagcaaacccgtgtctagccttttccaaaactggccgaagccgccactcccccctctgcctacaggaacaggcgtgagccccaccgccgctgctgcccctggggcaaccagcccttccgcaagctcttccagtacatctactcgtcatctacagggggttgagtttgagatgagacccccactcctccgtagagcaccaagccccagcctgctcccggcatcagagcacaaggtgtcaccggcaccaaggccatcctccttgccaatactaccatctggaccgctgtaccctggactgtttgatattcggggaagccccacggggggtgcaggaggctccgcagatccctttgccccagtctttgtcccccctcaccccggaatctcaggtggacttggcggagctctgagcggcgcatcacgcagcctgagcccaacgcggttgctttccctgccccctgacaagccttttggcgcaaagccactgggattctggaccaagttcgacgtagccgattggttggagtggctcggccttgccgaacaccgggctcagttcctcgaccacgagatcgatggtagccatttgccagccttgaccaaggaagactatgttgatctcggcgtgacgagggtcggacaccggatgaatatcgatcgagcgctcaagtttttcttagagcgctag

SEQ ID NO: 295107 - DNA, 6643 bp, Artificial Sequence
  derived and/or modified sequence
gtcgccccgtggccccacaatgacccacagccccgcgacaagcgaggacgaggaacgccacagtgccagcgagtgtcccgaggggggctcagagtccgacagctccccagacgggccaggtcgaggcccccgggggacccggggccagggcagtggggcacctggtagcctggcctctgttagaggcctccagggccgctcaatgtccgtcccagacgacgcccacttcagcatgatggtcttcaggattggcatcccggacctgcaccagacaaaatgccttcgcttcaaccccgatgccaccatctggacggccaagcagcaggtgctctgtgccctgagcgagagcctgcaggatgtgctcaactatggcctgttccaaccggccacctccggccgcgatgccaacttcctggaggaggagaggctgctgcgggagtacccccagtcctttgagaagggggtcccctacctggagttccgatacaagacccgagtttacaaacagaccaacctggatgagaagcagctggccaagttgcacacgaagacggggttgaagaagttcctggagtatgtgcagctcgggacatctgacaaggtggcgcggctgctggacaaggggctggaccccaattaccatgactcggattcgggagagacccccttgacactggcggcccagaccgaaggctctgtagaggtgattcgaaccctgtgcctgggcggggcccacattgacttccgggcccgggatggcatgaccgcactgcataaggccgcatgcgcccgacactgcctggcactcacggcgctcctggaccttgggggttcccccaactacaaggaccgtcgggggctgacccctctgttccacacggccatggtgggtggtgacccccgatgctgcgagctgctcctgttcaacagggcccagctgggcatagctgatgagaacggctggcaggaaatccaccaggcctgccagcggggtcactctcagcacctggagcatctgcttttctacggggctgagcctggagcccagaacgcctcggggaacacggctctgcacatctgcgccctctacaacaaggagacctgtgccaggatcctcctgtatcgaggtgccgacaaggatgtgaagaacaacaacggacagacccccttccaggtggcagtgattgctgggaattttgagctgggggagctgatccgaaaccaccgagaacaggatgtggtgcccttccaggagtcccccaagtacgcggcccggcgacgggggcccccaggcacagggctgacggtgcccccggcgctgctgcgggccaacagtgacaccagcatggcgctgcccgactggatggtgttctccgccccgggggccgcgtcctctggggcccctggccctacctcagggtcccagggccagtcgcagccctcggcccccaccaccaagctcagcagcgggaccctccgaagtgccagcagcccccggggtgccagggcccgctctccatcccgagggaggcaccctgaggacgccaagaggcagccccgaggccggcccagctccagcgggacaccccgggaagggccagccgggggcacggggggctcagggggccccgggggctccctgggcagccgcgggaggcggaggaagctctactcagcggtacccggacgctccttcatggctgtgaagtcctaccaggcccaagccgagggggagatctccctgagcaagggcgagaagatcaaagtacttagcatcggggaaggaggcttctgggaaggccaggtcaaaggtcgtgttggctggttcccctctgactgcctggaagaagtggcgaatcgctctcaggagagcaagcaagaaagccgcagtgacaaggcaaagagactcttccggcattataccgtgggctcctacgacagctttgatgccccaagcttaatggatgggattggcccagggagcgattacatcattaaggagaagacagtcttgctgcagaagaaggacagtgaggggtttgggttcgtgctccggggggccaaggcgcagacccccatcgaggagttcacccccaccccggccttcccggcgctgcagtacctggagtcggtggacgagggtggcgtggcatggcgagctggactgcgaatgggagacttcctcatcgaggtgaacgggcagaatgtggtgaaggtcggccaccgacaggtggtgaacatgatccgccaagggggcaacacgctgatggtgaaggtggtgatggtcaccaggcacccggacatggatgaggcagtgcacaagaaagcaccccagcaggccaagcggctgccgcccccaaccatctccctgcgttccaaatctatgacctcagagctggaggagatggagtacgagcagcagccggcgccggtgcccagcatggagaaaaagcggaccgtgtatcagatggctctcaacaaactggacgaaatcctggccgcagctcaacagaccatcagtgcaagcgaaagccctggtcccggtggcctcgcgtccctgggcaaacaccgacccaaaggtttctttgccactgagtcgagcttcgatccccaccaccgtgcccagccaagttacgagcgtccttctttcctgcctccaggacctgggttgatgctccggcaaaaatctatcggtgcggcagaagatgacagaccttacctagcacccccagccatgaaattcagccgcagcctgtctgtgcctggttcggaggacattcccccgccacccaccacgtccccaccggagcctccctacagcacacctccagtcccctcctcctcagggcgcctcaccccctcccctcggggagggcccttcaaccctggctctggtggccccctccccgcctcctcccctgcatcctttgacgggccctcccctcccgacactcgcgtggggagccgcgagaagagcctgtaccacagtgggcccctgcccccggcccaccaccacccgccccaccaccaccaccaccacgccccgccccctcagccccaccaccaccacgcccacccccctcatcctcccgagatggagacaggcggctctcccgacgaccctccaccccgcctggctctggggccccagcccagcctgcgaggctggaggggcggcgggcccagcccgaccccgggggccccgtccccatcgcaccacggcagcgcgggcgggggcggcggctcctcccagggcccggctctacgctatttccagctgcccccgcgggcggccagcgcagccatgtacgtgcccgcccgctcgggccgcggccgcaagggcccgctggtcaagcagaccaaggtggaaggcgagccccagaagggcggcggcctcccgcccgcgccgtcgcccacgtccccggcctccccgcagccgccgcccgccgtggccgcgccctcggagaagaactccatccccatccccaccatcatcatcaaggccccgtccaccagtagcagcggccgcagcagccagggcagcagcaccgaggcggagccccccacccagccggagcccacgggaggcggcggcggcggcggctcctcgcccagccccgccccggccatgtcacccgtgcccccgtccccctcgcccgtgcccacccccgcctcgcccagcggcccggccacgctggacttcacgagccagttcggggccgccctggtgggggcggcccggagggaggggggctggcagaatgaggcgcgccggcgctccacgctgttcctgtccaccgacgcgggggacgaggacggcggggacggcgggctgggcacaggggcggccccgggcccgcggctgcgccactccaaatccatcgacgagggcatgttctccgccgagccctacctccgactggagtctgcgggcagcggcgcgggctacggcggctacggggccggtagccgagcctacgggggtggcgggggcagcagcgccttcaccagcttcctgcccccgcgacccctggtgcacccgctgaccggcaaggccctggatcccgcctccccgctggggctggccctggccgcccgcgagcgagcgctgaaggagtcctcggagggcggcggggccccccagccgcctcccaggcccccatcgccccgctacgaggccccgccgcccaccccgcaccaccactcgccccacgcccaccacgagccagtgctgcgtctctggggggcctccccgccggaccctgcgcgccgggagctggggtacagggccgggctgggcagccaggagaagtcccttcccgccagcccgcccgccgcccggcgttccctgctacaccgcctgccgcccaccgctcccggggtggggcccctcctgctgcagctggggacggagcccccggccccgcaccccggagtaagcaagccctggaggtccgcagcccccgaagaacccgagcggctgccgctgcacgtgcggttccttgaaaactgccagccccgggcccctgtgacgagcggaaggggtcccccctcggaggacgggccgggggtcccgccgcccagcccacgccggtccgtgcccccctccccgacctccccgagggccagcgaagagaacgggctgcccctgctggtcctgccgcctcccgccccctcggtggatgtggaagatggcgaattccttttcgtggaaccgctgcctccgcctctggaattctccaacagcttcgaaaagccagagtcgcccctcacgcctgggcctccccacccgctgcccgacacacctgcccctgccaccccgttaccccctgtgccacccccggctgtggccgcagcccctcccaccctggactccaccgcatccagcctgacatcctatgacagcgaggtggccaccctgacccagggggcctccgccgctcctggggacccccatccaccaggcccgcctgccccagcagcaccggctcccgctgccccacagcctggcccggaccctccgcctggcacggattctggcatcgaggaggtggacagtcggagcagcagtgaccacccactggagaccatcagcagcgcctccacgctgagcagcctatctgccgaaggtggtggcagcgcagggggtgggggcggggctggggccggtgtggccagtgggccggagcttctggacacctatgtggcctacctggacggccaggcctttgggggcagcagtactcccggcccgccataccctcctcagctcatgactccctctaagctccggggccgggcgctaggagccagcggaggcctgcggcctggccccagcgggggactccgagaccctgttacccccaccagccccaccgtctcggtgacaggggctggaaccgatgggctgctggccctgcgtgcttgttcaggaccccccacggcaggcgtggcggggggtccggtggctgtagagccagaagtcccaccggtgcccttgccgacggcctcctctctgccccggaagctgctgccctgggaggagggcccgggcccaccgccaccacctctgcccgggcccttggcccagcctcaggcctcagccttggccacagtaaaagccagcatcatcagtgaactcagctccaagcttcagcagtttgggggctcctcggcagctggcggcgctctgccctgggcccgaggaggcagtgggggaggcggagacagccaccacgggggagccagctatgtccccgagaggacctcctccctgcagcggcagagactctccgacgactcccagtcctcactcctctccaagcctgtcagcagcctgtttcagaactggcccaaaccacctctgccgccactccccaccggaacaggggtctcccctacagccgctgcggccccaggggccacctcaccctcagcctcctcctcctccacgtccacccgccacctccagggcgtggagttcgagatgcggccccctctgctccgccgggcccccagcccctcgctgctgcccgcctcggagcacaaggtcagccctgcgcccaggccctcgtccctgcccatcctgccttccggacccctctacccaggcctctttgacatccgtggctccccaactggaggggcaggaggctcggctgaccccttcgccccagtctttgtgccgccacacccggggatatccggggggctcgggggagccttgtcaggggcctcgcgctccctctcaccgacccgcctgctctcgctgcccccggacaagccgtttggcgctaaacctctggggttctggaccaagttcgacgtggctgattggctggagtggctgggtttggcggagcaccgagcccagttcctggaccacgagatcgatggctcccacctgcccgccttgaccaaggaggactacgtcgatctaggtgtgaccagggtgggccaccgcatgaacatcgaccgggctctcaaattcttcctggagaggtgatggctggcctggacggaccagccccgtccacagaactcttgagcctgctggcctcttgacctctgacccctgactgtcattctctccccgggccagggactctgttcaaactgcgccctgccctcatctcccaaggcc

SEQ ID NO: 295108 - protein, 197 aa, Artificial Sequence
  derived and/or modified sequence
MLVLPSPCPQPLAFSSVETMEGPPRRTCRSPEPGPSSSIGSPQASSPPRPNHYLLIDTQGVPYTVLVDEESQREPGASGAPGQKKCYSCPVCSRVFEYMSYLQRHSITHSEVKPFECDICGKAFKRASHLARHHSIHLAGGGRPHGCPLCPRRFRDAGELAQHSRVHSGERPFQCPHCPRRFMEQNTLQKHTRWKHP

SEQ ID NO: 295109 - DNA, 1258 bp, Artificial Sequence
  derived and/or modified sequence
ctagaccctcttctctcccttcggcttctctctttcggccggcgccgccagttcctggggcacacccagaggtccccttctcgccgccgcctgcaactgcgagggtagcccggggccgcttggagtcgcccggacctgagaggctgctgcactgggcctcagccagccctccggatgctggtgctgccatccccctgccctcagcctctggcattttcctccgttgagaccatggagggccctccccgtcggacttgccgctccccagaacctggaccttcctcctccatcggatctccccaggcttcatctcctccaaggcccaaccactacctgcttattgacactcagggtgtcccctacacagtgctggtggacgaggagtcacagagggagccaggggccagtggggctccaggccagaaaaagtgctacagctgccccgtgtgctcaagggtcttcgagtacatgtcctaccttcagcgacacagcatcacccactcggaggtaaagcccttcgagtgtgacatctgtgggaaggcattcaagcgcgccagccacttggcacggcaccattccattcacctggcgggtggtgggcggccccacggctgcccgctctgccctcgccgcttccgggatgcgggtgagctggcccagcacagccgggtgcactctggggaacgcccgtttcagtgtccacactgccctcgccgctttatggagcagaacacactgcagaaacacacgcggtggaagcatccatgagccgggctgccgggtgccccaggtaccacaggactttgcagggagcctggactcctgtccagacacctggtgagagcctgaggctggtgttcagggccctggacacagacacagagcagccgcatctcaaaggcagagccctgcctgaaggaggaatccgtgagtaatcttcaggtcctccgtgttctggagctgagatgggaatgagcccctacacagaatggagtcctctagcctaaagatatcagctgttccatggcagagccttgactggatggaggtggggagtgtggtgtgtaaagtctctggcctcataaaaggtggctgtgggtcgtcaggaatctgcgccatcttcctggggcttctgcgctgttgttggggaagggaccccagtcctgccttccaccccccaaccaggcctgagactgatcaaacaataaacacgtttcccactctgaaaaaaaaaaaaaaaaaaaaaaaaaaaaaaaaa

SEQ ID NO: 295110 - DNA, 594 bp, Artificial Sequence
  derived and/or modified sequence
atgctggtgctgcccagcccctgcccccagcccctggccttcagcagcgtggagaccatggagggcccccccagaagaacctgcagaagccccgagcccggccccagcagcagcatcggcagcccccaggccagcagcccccccagacccaaccactacctgctgatcgacacccagggcgtgccctacaccgtgctggtggacgaggagagccagagagagcccggcgccagcggcgcccccggccagaagaagtgctacagctgccccgtgtgcagcagagtgttcgagtacatgagctacctgcagagacacagcatcacccacagcgaggtgaagcccttcgagtgcgacatctgcggcaaggccttcaagagagccagccacctggccagacaccacagcatccacctggccggcggcggcagaccccacggctgccccctgtgccccagaagattcagagacgccggcgagctggcccagcacagcagagtgcacagcggcgagagacccttccagtgcccccactgccccagaagattcatggagcagaacaccctgcagaagcacaccagatggaagcacccctag

SEQ ID NO: 295111 - DNA, 594 bp, Artificial Sequence
  derived and/or modified sequence
atgctggtgctaccatccccttgtccccagcctctggctttctcctccgttgagaccatggaaggacctccaagacgcacttgccggtcacctgagccaggtccatcatcttctattggctcaccccaggcgagctcaccacctcgacctaaccattacttgctgattgacactcagggggtaccatacaccgtgctggtggatgaggaaagccagagagaacccggtgcctctggggccccagggcaaaaaaagtgctattcctgtccagtctgttcacgggtgttcgagtatatgagctatttgcagcgccacagtattacccacagtgaagtgaaacctttcgaatgcgacatttgtggcaaggctttcaagagagcatcacatttagctcgtcatcattctatccatctcgcaggtgggggccggccgcacgggtgtcctctgtgccctcgccgctttcgggacgcgggcgaattggcccaacattcccgagtgcattctggagaaaggccatttcaatgtccccattgtccccgccgcttcatggagcaaaacaccctccagaagcacacacgctggaaacacccttag

SEQ ID NO: 295112 - DNA, 594 bp, Artificial Sequence
  derived and/or modified sequence
atgctggtgctgcccagcccctgcccccagcccctggccttcagctctgtggagaccatggagggcccccccaggaggacctgccgcagccctgagcccggccccagcagcagcatcggcagcccccaggccagcagccccccccggcccaaccactacctgctgattgacacccagggcgtgccctacacagtgctggtggatgaggagagccagcgggagcccggggccagcggggcccctggccagaagaagtgctacagctgccctgtgtgcagccgggtgtttgagtacatgagctacctgcagaggcacagcatcacccacagcgaggtgaagccctttgaatgtgacatctgtgggaaggccttcaagagggccagccacctggcccggcaccacagcatccacctggccggcggcggccggccccacggctgccccctgtgcccccggcgcttcagagatgctggggagctggcccagcacagccgggtgcacagcggggagcggcccttccagtgcccccactgcccccggcgcttcatggagcagaacaccctgcagaagcacacccgctggaagcacccctag

SEQ ID NO: 295113 - DNA, 594 bp, Artificial Sequence
  derived and/or modified sequence
atgctggtgctgcccagcccctgcccccagcccctggccttcagcagcgtggaaacaatggaggggccgcctagaagaacgtgtcgctcgccggaacctggcccttcctctagcatcgggagcccacaggcctcatcaccacctcgaccaaaccactacctgctaattgacacccaaggcgtgccgtacaccgtcctggttgacgaggagtcacagcgcgagcccggggcgagcggcgctccgggtcaaaaaaaatgctacagttgtccggtctgtagccgagtgttcgaatacatgtcctatctacagagacactccataacgcacagtgaggtgaaacctttcgaatgcgacatttgcggtaaggcattcaaacgtgccagccatctggcccggcaccatagcattcacctagctggcggcggtcggcctcacggctgccccctgtgtcctaggcgatttcgtgatgcaggggaactggcgcagcacagcagggtacactccggagagcgtcctttccagtgcccgcattgcccccgacggtttatggagcaaaatacactgcagaaacacaccaggtggaagcatccgtag

SEQ ID NO: 295114 - DNA, 594 bp, Artificial Sequence
  derived and/or modified sequence
atgctcgtcctgccttccccctgccctcaacccctggccttcagttctgtggagacaatggagggccctccaaggaggacttgcaggagccctgaacccggaccttcctcctccattggctccccccaggcgtcttctccaccacgcccaaaccactatctgctcatcgatacacagggtgttccatacacagttctcgtagatgaggaaagccagcgcgagccaggcgcaagtggagctcccggtcagaagaaatgctattcatgtccagtgtgtagccgtgtgtttgaatacatgagttatctgcaaagacactctatcactcattcagaagtgaagccattcgaatgtgacatttgcggtaaagccttcaagagggctagtcatctcgctagacaccatagtatccacttggcaggtggaggtcgcccacatggctgtccactgtgccctcgaagatttagagatgccggagaattagcccagcacagcagagtgcacagcggcgagaggcctttccaatgtcctcactgccccaggaggtttatggagcagaatactctccagaagcatacccggtggaagcacccttag

SEQ ID NO: 295115 - DNA, 1225 bp, Artificial Sequence
  derived and/or modified sequence
ctagaccctcttctctcccttcggcttctctctttcggccggcgccgccagttcctggggcacacccagaggtccccttctcgccgccgcctgcaactgcgagggtagcccggggccgcttggagtcgcccggacctgagaggctgctgcactgggcctcagccagccctccggatgctggtgctgccatccccctgccctcagcctctggcattttcctccgttgagaccatggagggccctccccgtcggacttgccgctccccagaacctggaccttcctcctccatcggatctccccaggcttcatctcctccaaggcccaaccactacctgcttattgacactcagggtgtcccctacacagtgctggtggacgaggagtcacagagggagccaggggccagtggggctccaggccagaaaaagtgctacagctgccccgtgtgctcaagggtcttcgagtacatgtcctaccttcagcgacacagcatcacccactcggaggtaaagcccttcgagtgtgacatctgtgggaaggcattcaagcgcgccagccacttggcacggcaccattccattcacctggcgggtggtgggcggccccacggctgcccgctctgccctcgccgcttccgggatgcgggtgagctggcccagcacagccgggtgcactctggggaacgcccgtttcagtgtccacactgccctcgccgctttatggagcagaacacactgcagaaacacacgcggtggaagcatccatgagccgggctgccgggtgccccaggtaccacaggactttgcagggagcctggactcctgtccagacacctggtgagagcctgaggctggtgttcagggccctggacacagacacagagcagccgcatctcaaaggcagagccctgcctgaaggaggaatccgtgagtaatcttcaggtcctccgtgttctggagctgagatgggaatgagcccctacacagaatggagtcctctagcctaaagatatcagctgttccatggcagagccttgactggatggaggtggggagtgtggtgtgtaaagtctctggcctcataaaaggtggctgtgggtcgtcaggaatctgcgccatcttcctggggcttctgcgctgttgttggggaagggaccccagtcctgccttccaccccccaaccaggcctgagactgatcaaacaataaacacgtttcccactctg

SEQ ID NO: 295116 - protein, 194 aa, Artificial Sequence
  derived and/or modified sequence
MSPSGRLCLLTIVGLILPTRGQTLKDTTSSSSADSTIMDIQVPTRAPDAVYTELQPTSPTPTWPADETPQPQTQTQQLEGTDGPLVTDPETHKSTKAAHPTDDTTTLSERPSPSTDVQTDPQTLKPSGFHEDDPFFYDEHTLRKRGLLVAAVLFITGIIILTSENWGWVGRTPRPGGGLMTEGWVLKGPWAILF

SEQ ID NO: 295117 - DNA, 585 bp, Artificial Sequence
  derived and/or modified sequence
atgagccccagcggcagactgtgcctgctgaccatcgtgggcctgatcctgcccaccagaggccagaccctgaaggacaccaccagcagcagcagcgccgacagcaccatcatggacatccaggtgcccaccagagcccccgacgccgtgtacaccgagctgcagcccaccagccccacccccacctggcccgccgacgagaccccccagccccagacccagacccagcagctggagggcaccgacggccccctggtgaccgaccccgagacccacaagagcaccaaggccgcccaccccaccgacgacaccaccaccctgagcgagagacccagccccagcaccgacgtgcagaccgacccccagaccctgaagcccagcggcttccacgaggacgaccccttcttctacgacgagcacaccctgagaaagagaggcctgctggtggccgccgtgctgttcatcaccggcatcatcatcctgaccagcgagaactggggctgggtgggcagaacccccagacccggcggcggcctgatgaccgagggctgggtgctgaagggcccctgggccatcctgttctag

SEQ ID NO: 295118 - DNA, 585 bp, Artificial Sequence
  derived and/or modified sequence
atgagcccatccggtcggctgtgcctgctaacgattgtgggcttgatactccccactcgcgggcagacgttgaaagacacaactagcagcagctctgctgatagcactataatggacattcaggtacctactcgggctcccgacgcagtgtacaccgaattacagcccacatcccccactcctacatggcctgcagacgagactcctcagcctcagactcagacccagcaattggaaggaacggacgggccattagtgacagacccggaaacacacaagagcaccaaggctgcccacccaacagacgacacaacgacgctgtcggagcgcccctcaccttccaccgatgtgcagaccgatccacagaccctgaaacctagtggctttcacgaggacgaccctttcttttatgacgaacataccctcaggaaaagggggctcctggtagccgcagttctgtttattactgggatcatcattctgacctcagagaattggggctgggtggggaggacacctcgccccgggggtggcctgatgaccgaggggtgggtactaaaaggcccttgggctatattgttttag

SEQ ID NO: 295119 - DNA, 1003 bp, Artificial Sequence
  derived and/or modified sequence
acaccctccgcctggacgcagcagccaccgccgcgtccctctctccacgaggctgccggcttaggacccccagctccgacatgtcgccctctggtcgcctgtgtcttctcaccatcgttggcctgattctccccaccagaggacagacgttgaaagataccacgtccagttcttcagcagactcaactatcatggacattcaggtcccgacacgagccccagatgcagtctacacagaactccagcccacctctccaaccccaacctggcctgctgatgaaacaccacaaccccagacccagacccagcaactggaaggaacggatgggcctctagtgacagatccagagacacacaagagcaccaaagcagctcatcccactgatgacaccacgacgctctctgagagaccatccccaagcacagacgtccagacagacccccagaccctcaagccatctggttttcatgaggatgaccccttcttctatgatgaacacaccctccggaaacgggggctgttggtcgcagctgtgctgttcatcacaggcatcatcatcctcaccagtgagaactggggttgggtgggaaggacaccaagaccaggagggggacttatgacggagggctgggttctcaaaggtccctgggcaattttgttttaaatgaggtatctattagctgcatatacatacaaaccaccacagaattcagtggtttaaaataatgaccatttattgagctctcaataccacagtttggaaacataggctgggctcagctgggtgattcttctggtctcaactggatttactcttgcatctgagttcagttgtgggtcagcaggaaactttgtttctggggtgccttggctctttgccacatcatcttatccttcactaagctagcctgggcttgttcgcatggtggtggcagggatctaagatagagtgaatgcatgcaggctcagaactggccattatcacttctgcctcattccata

SEQ ID NO: 295120 - DNA, 585 bp, Artificial Sequence
  derived and/or modified sequence
atgagccccagcggccgcctgtgcctgctgaccatcgtgggcctcatcctgcccacccggggccagaccctgaaggacaccaccagcagcagcagcgctgacagcaccatcatggacatccaggtgcccacccgggccccagatgctgtgtacacagagctgcagcccaccagccccacccccacctggccagcagatgagaccccccagccccagacccagacccagcagctggagggcacagatggccccctggtgacagatcctgagacccacaagagcaccaaggccgcccaccccacagatgacaccaccaccctgtctgagcggcccagccccagcacagatgtgcagacagacccccagaccctgaagcccagcggcttccatgaagatgaccccttcttctatgatgagcacaccctgaggaagaggggcctgctggtggccgctgtgctcttcatcaccggcatcatcatcctgaccagcgagaactggggctgggtgggccgcacccccaggcctgggggcggcctgatgacagagggctgggtgctgaagggcccctgggccatcctcttctag

SEQ ID NO: 295121 - DNA, 585 bp, Artificial Sequence
  derived and/or modified sequence
atgagccccagcggccggctgtgcctgctgaccatcgtgggcctgatactgccaacacgaggccagaccctgaaagacaccacctcaagctcatccgccgactctaccatcatggacatccaggtgcctacccgggccccagacgcggtctacaccgaactgcagccaacgagccccacccccacgtggccggccgacgagactcctcagccacagactcaaacccagcaactggaaggcaccgacggtccactggtgacagacccagagacgcacaagagtactaaggccgctcacccgacagatgataccactaccctctccgagcggccctccccctctactgatgtgcaaaccgatcctcaaacattaaagccttctggatttcatgaggacgacccatttttctacgacgagcatacactgcgtaagcggggtctgctggtcgctgccgtcctcttcatcacgggaattatcatactgaccagtgaaaactggggctgggtgggtcgaacaccccgcccaggggggggactcatgacagaaggatgggtgctaaaggggccatgggccatcctgttttag

SEQ ID NO: 295122 - DNA, 585 bp, Artificial Sequence
  derived and/or modified sequence
atgagccctagcggcagactgtgcctgctaacgatagtgggtctgatccttccgacccggggacagaccctgaaagataccactagctcaagctcagcggactctacgataatggacattcaagtgccaacgcgcgcaccagacgctgtctacacagagctgcaacctacttcccccaccccaacctggcctgccgacgagaccccacaacctcagacacaaacccagcaactcgaggggacagatggcccactggtaaccgatccagagactcacaaatctactaaggctgctcatcccacggatgacacaactaccctcagcgagcgtccgtcccctagcacagatgtccagactgatccccaaactctgaagccgtccggttttcacgaagacgacccattcttctacgacgagcacaccttgaggaaacggggactgctggtcgccgcagtgctgtttatcaccgggatcataatccttactagcgaaaactggggttgggttggacgaactcccaggcctggaggtggattgatgaccgaagggtgggtgctaaagggtccttgggctatactgttttag

SEQ ID NO: 295123 - DNA, 291 bp, Artificial Sequence
  derived and/or modified sequence
atgagccccagcggcagactgtgcctgctgaccatcgtgggcctgatcctgcccaccagaggccagaccctgaaggacaccaccagcagcagcagcgccgacagcaccatcatggacatccaggtgcccaccagagcccccgacgccgtgtacaccgagctgcagcccaccagccccacccccacctggcccgccgacggcgcctacatcaccgcctacggcgtgacccacttcctgatgaacatgctggccgtgagcagcttcttctgcctgcacaccgccccccagtag

SEQ ID NO: 295124 - DNA, 291 bp, Artificial Sequence
  derived and/or modified sequence
atgtctcccagtggacggctttgtctactgaccatcgtgggattgattttaccaacaagaggtcaaactctgaaggatacgacatcttcctcatctgctgacagcacgattatggatatccaagtcccaacacgggcgcctgacgccgtgtacacggagctgcaacccacaagccctacacctacttggcccgcagacggcgcttatatcacagcctacggtgtgactcacttcctgatgaatatgctggccgtgagtagctttttttgtttgcatacggcgcctcagtag

SEQ ID NO: 295125 - DNA, 752 bp, Artificial Sequence
  derived and/or modified sequence
ctggacgcagcagccaccgccgcgtccctctctccacgaggctgccggcttaggacccccagctccgacatgtcgccctctggtcgcctgtgtcttctcaccatcgttggcctgattctccccaccagaggacagacgttgaaagataccacgtccagttcttcagcagactcaactatcatggacattcaggtcccgacacgagccccagatgcagtctacacagaactccagcccacctctccaaccccaacctggcctgctgatggcgcctatatcacagcttatggagtcacacacttcttgatgaacatgttggctgtttccagctttttctgtctacacacagcaccacaatgagcaactttgtcccttcctccttgagcaaacgcacttggaatatgtactgactatgtgctggtcatggttctaaatattttgcgtatgttaactcattcaaccttcacgcaaaccctaagaggcagaaattaccattgtccccattttacagacaaggaaacagaggctgtgagtaactggttcaaggtctcacaacaagtcagggacgcagctggaatcgaagtccaggaatctggcaccagagcctgtgcttttatccaagacaatacagggcaaaggacatgcatgcttaatgttttaaaatttgccctcctgccgcccaggcacagtggctcatgcctgtcatcccagcacttttggaggctgaggcgggtggatcgcttgagcccagg

SEQ ID NO: 295126 - DNA, 291 bp, Artificial Sequence
  derived and/or modified sequence
atgagccccagcggccgcctgtgcctgctgaccatcgtgggcctcatcctgcccacccggggccagaccctgaaggacaccaccagcagcagcagcgctgacagcaccatcatggacatccaggtgcccacccgggccccagatgctgtgtacacagagctgcagcccaccagccccacccccacctggccagcagatggagcctacatcacagcctatggagtgacccacttcctgatgaacatgctggccgtgtcctccttcttctgcctgcacacagccccccagtag

SEQ ID NO: 295127 - DNA, 291 bp, Artificial Sequence
  derived and/or modified sequence
atgagccccagcggccggctgtgcctgctgaccatcgtgggcctgatcctgccaactcgaggacagactctgaaagatacaacctctagttcctccgctgactccacaattatggacattcaggtccctacccgagcacccgacgccgtgtacactgagctccaaccaactagccccacccctacctggcctgccgacggcgcctacattaccgcttacggtgtcacgcacttcctgatgaacatgctggccgtgagcagcttcttttgcttgcatacagccccacagtag

SEQ ID NO: 295128 - DNA, 291 bp, Artificial Sequence
  derived and/or modified sequence
atgagcccatccgggaggctgtgcctgcttacaattgtgggcctgattttgccaactagagggcaaactctgaaggacactacaagttcctcaagtgcagattctactataatggacattcaggttccaaccagagcacccgatgcggtgtacacagagctacaaccaacaagtcctacaccaacgtggcctgcagatggagcctatatcactgcctacggcgttacccactttctgatgaacatgctggccgtgtcgtcctttttctgtctacacactgctccccagtag

SEQ ID NO: 295129 - protein, 555 aa, Artificial Sequence
  derived and/or modified sequence
MAFTQLTFRDVAIEFSQDEWKCLNSTQRTLYRDVMLENYRNLVSLDLSRNCVIKELAPQQEGNPGEVFHTVTLEQHEKHDIEEFCFREIKKKIHDFDCQWRDDERNCNKVTTAPKENLTCRRDQRDRRGIGNKSIKHQLGLSFLPHPHELQQFQAEGKIYECNHVEKSVNHGSSVSPPQIISSTIKTHVSNKYGTDFICSSLLTQEQKSCIREKPYRYIECDKALNHGSHMTVRQVSHSGEKGYKCDLCGKVFSQKSNLARHWRVHTGEKPYKCNECDRSFSRNSCLALHRRVHTGEKPYKCYECDKVFSRNSCLALHQKTHIGEKPYTCKECGKAFSVRSTLTNHQVIHSGKKPYKCNECGKVFSQTSSLATHQRIHTGEKPYKCNECGKVFSQTSSLARHWRIHTGEKPYKCNECGKVFSYNSHLASHRRVHTGEKPYKCNECGKAFSVHSNLTTHQVIHTGEKPYKCNQCGKGFSVHSSLTTHQVIHTGEKPYKCNECGKSFSVRPNLTRHQIIHTGKKPYKCSDCGKSFSVRPNLFRHQIIHTKEKPYKRN

SEQ ID NO: 295130 - DNA, 2269 bp, Artificial Sequence
  derived and/or modified sequence
aaacggatcgcgttgggtgaaggtgacggcgtcgagccattgacttccaaagactcctggcacatgaggaagaaacccagaagaggagagcaaaggagtcaggaatggcttttactcagttgacattcagggacgtggccatcgaattctctcaagatgagtggaaatgcctgaactctacacagaggactttatacagggatgtgatgttggagaactacaggaacctggtctccctggatctgtctcgtaactgtgtaatcaaggaactagcaccacaacaggaaggtaacccaggagaagtattccacacagtgacattggaacaacatgaaaaacatgacattgaagagttttgcttcagggaaatcaagaaaaaaatacacgactttgactgtcagtggagagatgatgaaagaaattgcaacaaagtgactacggccccaaaagaaaatcttacttgtaggagagaccaacgcgatagaagaggtataggaaacaagtctattaaacatcagcttggattaagctttctaccacatccccatgaactgcagcagtttcaagctgaagggaaaatttatgaatgtaaccatgttgagaagtctgtcaaccatggttcctcagtttcaccaccccaaataatttcttctaccatcaaaacccatgtttctaataaatatgggactgatttcatctgttcttcattactcacacaagaacagaaatcatgcattagggaaaaaccttacagatatattgagtgcgacaaagccttgaatcatggctcacacatgactgtacgtcaggtaagtcattctggagagaaaggatataaatgtgatctgtgtggcaaggtctttagtcaaaaatcaaaccttgcgcgtcattggagagttcatactggagagaaaccatacaaatgtaatgaatgtgacagaagtttcagtcgcaactcatgccttgcactacatcggagagttcacactggagagaaaccttacaaatgttatgagtgtgacaaggtcttcagtcgaaattcatgccttgcactacatcagaaaactcatattggagagaaaccttacacatgtaaagagtgtggcaaagcctttagtgtgaggtcaacacttaccaaccatcaggtaattcatagtggcaagaaaccttacaaatgcaatgaatgtggcaaggtgttcagtcagacttcaagccttgcaactcatcagagaattcacactggggagaaaccatacaagtgtaatgaatgtggtaaagtcttcagtcagacttcaagccttgcaaggcattggagaattcatactggagagaaaccttacaaatgcaatgaatgtggtaaggttttcagttacaattcacaccttgcgagtcatcggagagttcatactggagagaaaccttacaagtgtaatgagtgtgggaaagcctttagtgtgcattcgaacttaactacccatcaggtcatccatactggagagaagccttacaaatgtaatcaatgtggcaaaggcttcagtgtgcattcaagcctaactacccatcaggtcatccatactggagaaaaaccttacaaatgtaatgagtgtggcaaatcctttagtgtgcgcccaaacctcactagacatcagataatccatactggaaagaaaccttacaaatgtagtgattgtgggaagtcctttagtgtgcgcccaaacctcttcagacatcaaattatccatactaaggagaaaccttataaaagaaattaatatggcaaggtcttcagtcaaagtttaaatcctgtgagtcatcaaagaatttatatcagagagaaaccatacaagtataataaatgtggcaaggttttcagtcacaattcactcctacacagcatcagagaatttcattcttgagagaatccttacgagtacagcaaacccttcatcacaagttcaagcattcattgacatcagagtccatgctaaagagaaatcatatacacctaactgtgtggcagaggcttcatttaggtctcacaactcactagacatcaaaatgtgtaaacatctttgtatattttgtgcatgttgaagctattaaccaaggatcaaaactgtaacacatccaaggatttatgtgaggaataattcagtctagttgtgctgataaacttttcatattacacattgtagaacaaatgcaagcccaaatatgttaaaactcacacaacatgatatatattaaaggttgcaggatgtttgaagtc

SEQ ID NO: 295131 - DNA, 2380 bp, Artificial Sequence
  derived and/or modified sequence
cggaaacggatcgcgttgggtgaaggtgacggcgtcgagccattgacttccaaagactcctggcacatgaggaagaaacccagaagaggagagcaaaggagtcaggaatggcttttactcagttgacattcagggacgtggccatcgaattctctcaagatgagtggaaatgcctgaactctacacagaggactttatacagggatgtgatgttggagaactacaggaacctggtctccctggagtattatcctatgtgggagcacaggaaagagccctggaccatagaaagccaagtacgagtagcaagaaaaccaaaagggtgggaatggatcaaaggtgtgaaaacagatctgtctcgtaactgtgtaatcaaggaactagcaccacaacaggaaggtaacccaggagaagtattccacacagtgacattggaacaacatgaaaaacatgacattgaagagttttgcttcagggaaatcaagaaaaaaatacacgactttgactgtcagtggagagatgatgaaagaaattgcaacaaagtgactacggccccaaaagaaaatcttacttgtaggagagaccaacgcgatagaagaggtataggaaacaagtctattaaacatcagcttggattaagctttctaccacatccccatgaactgcagcagtttcaagctgaagggaaaatttatgaatgtaaccatgttgagaagtctgtcaaccatggttcctcagtttcaccaccccaaataatttcttctaccatcaaaacccatgtttctaataaatatgggactgatttcatctgttcttcattactcacacaagaacagaaatcatgcattagggaaaaaccttacagatatattgagtgcgacaaagccttgaatcatggctcacacatgactgtacgtcaggtaagtcattctggagagaaaggatataaatgtgatctgtgtggcaaggtctttagtcaaaaatcaaaccttgcgcgtcattggagagttcatactggagagaaaccatacaaatgtaatgaatgtgacagaagtttcagtcgcaactcatgccttgcactacatcggagagttcacactggagagaaaccttacaaatgttatgagtgtgacaaggtcttcagtcgaaattcatgccttgcactacatcagaaaactcatattggagagaaaccttacacatgtaaagagtgtggcaaagcctttagtgtgaggtcaacacttaccaaccatcaggtaattcatagtggcaagaaaccttacaaatgcaatgaatgtggcaaggtgttcagtcagacttcaagccttgcaactcatcagagaattcacactggggagaaaccatacaagtgtaatgaatgtggtaaagtcttcagtcagacttcaagccttgcaaggcattggagaattcatactggagagaaaccttacaaatgcaatgaatgtggtaaggttttcagttacaattcacaccttgcgagtcatcggagagttcatactggagagaaaccttacaagtgtaatgagtgtgggaaagcctttagtgtgcattcgaacttaactacccatcaggtcatccatactggagagaagccttacaaatgtaatcaatgtggcaaaggcttcagtgtgcattcaagcctaactacccatcaggtcatccatactggagaaaaaccttacaaatgtaatgagtgtggcaaatcctttagtgtgcgcccaaacctcactagacatcagataatccatactggaaagaaaccttacaaatgtagtgattgtgggaagtcctttagtgtgcgcccaaacctcttcagacatcaaattatccatactaaggagaaaccttataaaagaaattaatatggcaaggtcttcagtcaaagtttaaatcctgtgagtcatcaaagaatttatatcagagagaaaccatacaagtataataaatgtggcaaggttttcagtcacaattcactcctacacagcatcagagaatttcattcttgagagaatccttacgagtacagcaaacccttcatcacaagttcaagcattcattgacatcagagtccatgctaaagagaaatcatatacacctaactgtgtggcagaggcttcatttaggtctcacaactcactagacatcaaaatgtgtaaacatctttgtatattttgtgcatgttgaagctattaaccaaggatcaaaactgtaacacatccaaggatttatgtgaggaataattcagtctagttgtgctgataaacttttcatattacacattgtagaacaaatgcaagcccaaatatgttaaaactcacacaacatgatatatattaaaggttgcaggatgtttgaagtc

SEQ ID NO: 295132 - protein, 567 aa, Artificial Sequence
  derived and/or modified sequence
MPELYTEDFIQGCDVGELQEPGLPGLECNGAISAHCNLRLPDSNDSPASASRVAGITDLSRNCVIKELAPQQEGNPGEVFHTVTLEQHEKHDIEEFCFREIKKKIHDFDCQWRDDERNCNKVTTAPKENLTCRRDQRDRRGIGNKSIKHQLGLSFLPHPHELQQFQAEGKIYECNHVEKSVNHGSSVSPPQIISSTIKTHVSNKYGTDFICSSLLTQEQKSCIREKPYRYIECDKALNHGSHMTVRQVSHSGEKGYKCDLCGKVFSQKSNLARHWRVHTGEKPYKCNECDRSFSRNSCLALHRRVHTGEKPYKCYECDKVFSRNSCLALHQKTHIGEKPYTCKECGKAFSVRSTLTNHQVIHSGKKPYKCNECGKVFSQTSSLATHQRIHTGEKPYKCNECGKVFSQTSSLARHWRIHTGEKPYKCNECGKVFSYNSHLASHRRVHTGEKPYKCNECGKAFSVHSNLTTHQVIHTGEKPYKCNQCGKGFSVHSSLTTHQVIHTGEKPYKCNECGKSFSVRPNLTRHQIIHTGKKPYKCSDCGKSFSVRPNLFRHQIIHTKEKPYKRN

SEQ ID NO: 295133 - protein, 603 aa, Artificial Sequence
  derived and/or modified sequence
MPELYTEDFIQGCDVGELQEPGLPGVLSYVGAQERALDHRKPSTSSKKTKRVGMDQRCENRLECNGAISAHCNLRLPDSNDSPASASRVAGITDLSRNCVIKELAPQQEGNPGEVFHTVTLEQHEKHDIEEFCFREIKKKIHDFDCQWRDDERNCNKVTTAPKENLTCRRDQRDRRGIGNKSIKHQLGLSFLPHPHELQQFQAEGKIYECNHVEKSVNHGSSVSPPQIISSTIKTHVSNKYGTDFICSSLLTQEQKSCIREKPYRYIECDKALNHGSHMTVRQVSHSGEKGYKCDLCGKVFSQKSNLARHWRVHTGEKPYKCNECDRSFSRNSCLALHRRVHTGEKPYKCYECDKVFSRNSCLALHQKTHIGEKPYTCKECGKAFSVRSTLTNHQVIHSGKKPYKCNECGKVFSQTSSLATHQRIHTGEKPYKCNECGKVFSQTSSLARHWRIHTGEKPYKCNECGKVFSYNSHLASHRRVHTGEKPYKCNECGKAFSVHSNLTTHQVIHTGEKPYKCNQCGKGFSVHSSLTTHQVIHTGEKPYKCNECGKSFSVRPNLTRHQIIHTGKKPYKCSDCGKSFSVRPNLFRHQIIHTKEKPYKRN

SEQ ID NO: 295134 - DNA, 1704 bp, Artificial Sequence
  derived and/or modified sequence
atgcccgagctgtacaccgaggacttcatccagggctgcgacgtgggcgagctgcaggagcccggcctgcccggcctggagtgcaacggcgccatcagcgcccactgcaacctgagactgcccgacagcaacgacagccccgccagcgccagcagagtggccggcatcaccgacctgagcagaaactgcgtgatcaaggagctggccccccagcaggagggcaaccccggcgaggtgttccacaccgtgaccctggagcagcacgagaagcacgacatcgaggagttctgcttcagagagatcaagaagaagatccacgacttcgactgccagtggagagacgacgagagaaactgcaacaaggtgaccaccgcccccaaggagaacctgacctgcagaagagaccagagagacagaagaggcatcggcaacaagagcatcaagcaccagctgggcctgagcttcctgccccacccccacgagctgcagcagttccaggccgagggcaagatctacgagtgcaaccacgtggagaagagcgtgaaccacggcagcagcgtgagccccccccagatcatcagcagcaccatcaagacccacgtgagcaacaagtacggcaccgacttcatctgcagcagcctgctgacccaggagcagaagagctgcatcagagagaagccctacagatacatcgagtgcgacaaggccctgaaccacggcagccacatgaccgtgagacaggtgagccacagcggcgagaagggctacaagtgcgacctgtgcggcaaggtgttcagccagaagagcaacctggccagacactggagagtgcacaccggcgagaagccctacaagtgcaacgagtgcgacagaagcttcagcagaaacagctgcctggccctgcacagaagagtgcacaccggcgagaagccctacaagtgctacgagtgcgacaaggtgttcagcagaaacagctgcctggccctgcaccagaagacccacatcggcgagaagccctacacctgcaaggagtgcggcaaggccttcagcgtgagaagcaccctgaccaaccaccaggtgatccacagcggcaagaagccctacaagtgcaacgagtgcggcaaggtgttcagccagaccagcagcctggccacccaccagagaatccacaccggcgagaagccctacaagtgcaacgagtgcggcaaggtgttcagccagaccagcagcctggccagacactggagaatccacaccggcgagaagccctacaagtgcaacgagtgcggcaaggtgttcagctacaacagccacctggccagccacagaagagtgcacaccggcgagaagccctacaagtgcaacgagtgcggcaaggccttcagcgtgcacagcaacctgaccacccaccaggtgatccacaccggcgagaagccctacaagtgcaaccagtgcggcaagggcttcagcgtgcacagcagcctgaccacccaccaggtgatccacaccggcgagaagccctacaagtgcaacgagtgcggcaagagcttcagcgtgagacccaacctgaccagacaccagatcatccacaccggcaagaagccctacaagtgcagcgactgcggcaagagcttcagcgtgagacccaacctgttcagacaccagatcatccacaccaaggagaagccctacaagagaaactag

SEQ ID NO: 295135 - DNA, 1812 bp, Artificial Sequence
  derived and/or modified sequence
atgcccgagctgtacaccgaggacttcatccagggctgcgacgtgggcgagctgcaggagcccggcctgcccggcgtgctgagctacgtgggcgcccaggagagagccctggaccacagaaagcccagcaccagcagcaagaagaccaagagagtgggcatggaccagagatgcgagaacagactggagtgcaacggcgccatcagcgcccactgcaacctgagactgcccgacagcaacgacagccccgccagcgccagcagagtggccggcatcaccgacctgagcagaaactgcgtgatcaaggagctggccccccagcaggagggcaaccccggcgaggtgttccacaccgtgaccctggagcagcacgagaagcacgacatcgaggagttctgcttcagagagatcaagaagaagatccacgacttcgactgccagtggagagacgacgagagaaactgcaacaaggtgaccaccgcccccaaggagaacctgacctgcagaagagaccagagagacagaagaggcatcggcaacaagagcatcaagcaccagctgggcctgagcttcctgccccacccccacgagctgcagcagttccaggccgagggcaagatctacgagtgcaaccacgtggagaagagcgtgaaccacggcagcagcgtgagccccccccagatcatcagcagcaccatcaagacccacgtgagcaacaagtacggcaccgacttcatctgcagcagcctgctgacccaggagcagaagagctgcatcagagagaagccctacagatacatcgagtgcgacaaggccctgaaccacggcagccacatgaccgtgagacaggtgagccacagcggcgagaagggctacaagtgcgacctgtgcggcaaggtgttcagccagaagagcaacctggccagacactggagagtgcacaccggcgagaagccctacaagtgcaacgagtgcgacagaagcttcagcagaaacagctgcctggccctgcacagaagagtgcacaccggcgagaagccctacaagtgctacgagtgcgacaaggtgttcagcagaaacagctgcctggccctgcaccagaagacccacatcggcgagaagccctacacctgcaaggagtgcggcaaggccttcagcgtgagaagcaccctgaccaaccaccaggtgatccacagcggcaagaagccctacaagtgcaacgagtgcggcaaggtgttcagccagaccagcagcctggccacccaccagagaatccacaccggcgagaagccctacaagtgcaacgagtgcggcaaggtgttcagccagaccagcagcctggccagacactggagaatccacaccggcgagaagccctacaagtgcaacgagtgcggcaaggtgttcagctacaacagccacctggccagccacagaagagtgcacaccggcgagaagccctacaagtgcaacgagtgcggcaaggccttcagcgtgcacagcaacctgaccacccaccaggtgatccacaccggcgagaagccctacaagtgcaaccagtgcggcaagggcttcagcgtgcacagcagcctgaccacccaccaggtgatccacaccggcgagaagccctacaagtgcaacgagtgcggcaagagcttcagcgtgagacccaacctgaccagacaccagatcatccacaccggcaagaagccctacaagtgcagcgactgcggcaagagcttcagcgtgagacccaacctgttcagacaccagatcatccacaccaaggagaagccctacaagagaaactag

SEQ ID NO: 295136 - DNA, 1704 bp, Artificial Sequence
  derived and/or modified sequence
atgccggaactgtatacagaagatttcatacaaggctgcgatgtgggagaactacaggaacctggcctcccaggactggagtgcaacggtgcgatttcagcccactgcaacctccgcctccctgatagcaatgattctcccgccagcgcttcacgcgtggcgggcattaccgacctgagccgcaactgtgttattaaggaactcgccccacagcaggaagggaatccgggggaagtgtttcacaccgtgacacttgaacagcatgaaaaacacgatatagaagagttctgtttccgggaaatcaagaaaaaaatccacgacttcgactgccagtggcgcgatgatgaacggaactgcaacaaagtcacaacggcacccaaggagaatctaacatgtcgcagggaccaacgtgacaggcgagggattggaaacaagtcgattaaacaccagctgggcttatcttttttgccacatcctcatgaactccaacagtttcaggccgaaggtaaaatctacgagtgcaaccatgtggaaaaaagcgtgaaccacggcagcagcgttagccccccacagataataagctcaacaatcaaaactcatgtatctaataaatacggcaccgattttatctgtagctctctgttaacccaagagcagaagagctgtatccgcgagaaaccatacaggtacatcgagtgtgataaagcgctgaatcacgggagccacatgaccgtccgtcaggtgtctcattctggtgaaaaaggttacaagtgtgacttgtgtggtaaagttttttcccagaagagtaacctggcccgccactggcgggttcacacgggggaaaagccctataaatgcaacgagtgtgacaggagctttagtaggaattcttgtttggcactgcaccgacgggtgcacaccggagaaaagccatataagtgctacgagtgcgataaggttttcagccgtaatagttgcctggcgctccaccagaagacacatataggtgaaaaaccctatacttgtaaagaatgcggtaaagccttttctgtgaggagcactctgactaatcaccaggtgatccacagtgggaagaagccctacaagtgcaatgagtgcgggaaagtgttttcccaaacatctagtctggcaacccaccagcggatccatactggggagaaaccatacaaatgtaacgagtgcggaaaagtgttttcccagaccagtagcttggccagacattggcgtatacacacaggtgagaagccctataagtgtaacgagtgcgggaaagtgttttcatataactcccacttggcatctcatcgacgggtgcatacaggagagaagccatataagtgtaacgagtgcgggaaagccttctccgtgcattccaacctgacaacccatcaggtgatccacaccggggagaaaccctataagtgtaatcaatgcggaaaaggattttccgttcattcctcgctgacaacccatcaggtcattcacacaggcgagaagccgtataagtgtaatgaatgcggcaagagctttagtgtgaggcccaatttgacacgacaccagataatccatactggcaaaaaaccttataaatgcagtgactgtgggaaatcattcagcgtgaggcctaatctctttcgtcatcagataatccacactaaggagaaaccctataagcgtaattag

SEQ ID NO: 295137 - DNA, 1812 bp, Artificial Sequence
  derived and/or modified sequence
atgcccgagctctacaccgaagactttattcaagggtgcgacgttggagaattgcaggagcccggtcttccaggggtcctgtcatatgtgggagctcaggagagagcccttgaccaccgcaaaccatcgacgagcagcaaaaaaacaaaaagagtgggcatggaccagcgatgcgagaacagattggaatgcaatggtgctatcagtgcccattgcaaccttcggctgcctgactcgaatgactcacccgcgtcagcaagccgcgttgccgggattaccgatctctcccgtaactgtgtgattaaagagctcgccccgcagcaggaagggaatcccggcgaggtttttcacacagttacactggaacagcacgagaagcatgatatcgaagaattctgtttccgggagatcaaaaaaaaaatccacgattttgactgtcagtggcgggatgacgagcgtaactgcaataaagtgacgactgctcccaaggaaaacctgacgtgtagaagagatcagagggacagaagagggatcggcaataaatccatcaagcaccagctgggactcagttttctcccccacccacacgagctgcagcaatttcaggcagagggtaagatttacgaatgcaatcatgttgagaagtcagtgaatcatggatctagtgtgtccccaccacaaatcatcagcagcaccattaagacccacgtgagcaacaagtacgggacggacttcatttgcagttcactgctcacccaggaacagaaaagctgcattcgagagaagccttatcgatatatagagtgtgacaaggccctgaatcacggcagccatatgaccgtgagacaagttagccacagcggcgaaaaaggctacaagtgtgatctgtgcggaaaagtgttttcacagaagtctaacctggctagacactggcgggttcataccggcgaaaaaccatataaatgcaatgaatgcgaccgctcattctctagaaacagctgcctcgccctgcatagacgagtgcatactggcgagaagccctacaaatgttacgaatgcgataaggtattttcaagaaactcctgtttagcgctgcaccagaaaacccatattggagagaaaccttacacctgcaaagaatgcggcaaggccttcagcgtgcggagcaccttaaccaaccatcaagtgatccattcaggaaaaaagccgtacaaatgcaacgagtgcggcaaggtgttttcgcaaacaagtagccttgccacacaccagagaatccacacaggcgaaaaaccctacaaatgtaatgaatgtggaaaagtgttctcacagactagcagcttggctagacactggagaatccacactggagagaagccctacaagtgtaacgaatgcggcaaagttttttcgtataatagccatttggctagtcatcgaagagtccacaccggcgagaagccttataagtgtaacgaatgtggaaaagccttttcggtccactccaatcttacgacccaccaggtcattcatactggtgaaaaaccttataaatgtaatcagtgtggcaaagggttctctgtacattcgagcctcacaacccaccaggtgatccacacaggggaaaaaccttataaatgcaacgaatgcggcaagtctttctcagttaggcctaatcttactcggcaccagataatccataccgggaagaagccatacaagtgttcagactgcggcaagtccttttccgtcagaccaaacctgtttcggcaccagattatccacacaaaggaaaagccatataagcgcaactag

SEQ ID NO: 295138 - DNA, 1812 bp, Artificial Sequence
  derived and/or modified sequence
atgcccgagctctacactgaagattttatccaagggtgcgatgttggagaactgcaggagcccggactccctggggtgctctcttacgtcggagcacaggaacgggcattggatcatcggaagccctcaacttcaagcaagaagactaaacgcgtgggcatggatcagcggtgtgaaaatagacttgagtgcaacggcgccatctcagcacattgtaatttgcgtctgccggactccaatgactcccccgcctcagcgtctagagtggccggtattaccgacctctctcgtaattgcgtgataaaagagctggccccacaacaggagggtaacccaggtgaggtctttcacactgtgaccctggagcagcacgaaaagcacgacattgaggaattttgttttagggagattaaaaagaagattcacgacttcgattgccaatggcgagatgacgagcgcaactgcaacaaggtgactaccgctcccaaggagaacttgacttgtcgccgcgaccaacgtgacagacggggcatcggaaataagtctattaagcatcagctgggcctaagcttcttacctcatcctcacgaactgcagcaattccaggccgaagggaagatatatgagtgcaatcacgtggaaaagagcgttaatcacggcagttccgtaagtccaccccagataatctcatcaacaattaagacccacgtctcaaataaatatgggacagattttatttgtagcagccttctgacccaagaacaaaagtcttgtatacgggagaaaccctataggtatatagaatgtgacaaggctcttaaccacggttctcatatgacagtgagacaggtttctcactcgggggaaaaggggtataagtgtgacttatgcggcaaagtgttcagccagaaatccaacctggcacgacattggagagtgcacacgggtgagaagccttacaaatgtaacgagtgcgacagatctttctcaagaaatagctgcctcgctctgcatagacgggtgcacacgggcgaaaagccatataaatgttatgaatgtgataaggtgttttctcgcaattcatgcctggccctgcatcaaaagacccatatcggagagaagccttatacatgcaaggaatgcggcaaggcattttctgtgaggtcaacactcacaaaccatcaggtcatccactccgggaaaaaaccctataagtgcaacgagtgtggcaaggttttcagccaaacttcatcccttgctacccaccagaggattcataccggcgaaaaaccgtataagtgtaatgaatgcgggaaagtcttcagtcagacctcctccttggctaggcactggagaatccacactggggagaagccttacaagtgtaatgaatgtggcaaagtctttagctacaactcacatcttgcttcccatcgacgggtgcacactggggagaaaccttataaatgtaacgagtgtgggaaggctttctctgtgcattcaaacctgaccacccatcaagtcatccatactggagagaaaccttataagtgcaaccagtgtgggaaaggtttttcggttcatagctcactaacaacgcaccaagtgatccacacaggagaaaagccatataaatgtaatgaatgcggcaagagcttctccgtgcgcccgaacctgacccgacaccagattatccacacagggaagaagccctacaagtgcagcgactgcggaaagtcattctcagtacggccaaacctgttccggcatcagataatccacacaaaggagaagccctataaacgtaattag

SEQ ID NO: 295139 - DNA, 1704 bp, Artificial Sequence
  derived and/or modified sequence
atgcctgagctgtacacagaggacttcatccagggctgtgatgtgggggagctgcaggagcccggcctgcccggcctggagtgcaatggagccatcagcgcccactgcaacctgcggctgcctgacagcaatgacagccctgccagcgccagccgggtggccggcatcacagacctgagcaggaactgtgtgatcaaggagctggccccccagcaggagggcaaccctggagaggtgttccacacagtgaccctggagcagcacgagaagcatgacatcgaggagttctgcttccgggagatcaagaagaagatccatgactttgactgccagtggagagatgatgaaagaaactgcaacaaggtgaccacagcccccaaggagaacctgacctgcagaagagaccagagggacagaagaggcatcggcaacaagagcatcaagcaccagctgggcctgtccttcctgccccacccccatgagctgcagcagttccaggccgagggcaagatctatgagtgcaaccacgtggagaagtctgtgaaccacggcagctctgtgtccccaccccagatcatcagcagcaccatcaagacccacgtgagcaacaagtatggaacagacttcatctgcagcagcctgctgacccaggagcagaagagctgcatccgggagaagccctaccgctacattgaatgtgacaaggccctgaaccacggcagccacatgacagtgcggcaggtgagccacagcggggagaagggctacaagtgtgacctgtgtgggaaggtgttcagccagaagagcaacctggcccggcactggagggtgcacactggagagaagccctacaagtgcaatgaatgtgacaggagcttcagcaggaacagctgcctggccctgcacagaagagtgcacactggagagaagccctacaagtgctatgaatgtgacaaggtgttcagcaggaacagctgcctggccctgcaccagaagacccacatcggggagaagccctacacctgcaaggaatgtgggaaggccttctctgtgcgcagcaccctgaccaaccaccaggtgatccacagcggcaagaagccctacaagtgcaatgaatgtgggaaggtgttcagccagaccagcagcctggccacccaccagaggatccacactggagagaagccctacaagtgcaatgaatgtgggaaggtgttcagccagaccagcagcctggcccggcactggaggatccacactggagagaagccctacaagtgcaatgaatgtgggaaggtgttctcctacaacagccacctggccagccacagaagagtgcacactggagagaagccctacaagtgcaatgaatgtgggaaggccttctctgtgcacagcaacctgaccacccaccaggtgatccacactggagagaagccctacaagtgcaaccagtgtgggaagggcttctctgtgcacagcagcctgaccacccaccaggtgatccacactggagagaagccctacaagtgcaatgaatgtgggaagagcttctctgtgcggcccaacctgaccaggcaccagatcatccacacaggcaagaagccctacaagtgcagcgactgtgggaagagcttctctgtgcggcccaacctcttccgccaccagatcatccacaccaaggagaagccctacaagaggaactag

SEQ ID NO: 295140 - DNA, 1812 bp, Artificial Sequence
  derived and/or modified sequence
atgcctgagctgtacacagaggacttcatccagggctgtgatgtgggggagctgcaggagcccggcctgcccggggtgctgtcctatgtgggcgcccaggagcgggccctggaccacaggaagcccagcaccagcagcaagaagaccaagagggtgggcatggaccagagatgtgaaaatcggctggagtgcaatggagccatcagcgcccactgcaacctgcggctgcctgacagcaatgacagccctgccagcgccagccgggtggccggcatcacagacctgagcaggaactgtgtgatcaaggagctggccccccagcaggagggcaaccctggagaggtgttccacacagtgaccctggagcagcacgagaagcatgacatcgaggagttctgcttccgggagatcaagaagaagatccatgactttgactgccagtggagagatgatgaaagaaactgcaacaaggtgaccacagcccccaaggagaacctgacctgcagaagagaccagagggacagaagaggcatcggcaacaagagcatcaagcaccagctgggcctgtccttcctgccccacccccatgagctgcagcagttccaggccgagggcaagatctatgagtgcaaccacgtggagaagtctgtgaaccacggcagctctgtgtccccaccccagatcatcagcagcaccatcaagacccacgtgagcaacaagtatggaacagacttcatctgcagcagcctgctgacccaggagcagaagagctgcatccgggagaagccctaccgctacattgaatgtgacaaggccctgaaccacggcagccacatgacagtgcggcaggtgagccacagcggggagaagggctacaagtgtgacctgtgtgggaaggtgttcagccagaagagcaacctggcccggcactggagggtgcacactggagagaagccctacaagtgcaatgaatgtgacaggagcttcagcaggaacagctgcctggccctgcacagaagagtgcacactggagagaagccctacaagtgctatgaatgtgacaaggtgttcagcaggaacagctgcctggccctgcaccagaagacccacatcggggagaagccctacacctgcaaggaatgtgggaaggccttctctgtgcgcagcaccctgaccaaccaccaggtgatccacagcggcaagaagccctacaagtgcaatgaatgtgggaaggtgttcagccagaccagcagcctggccacccaccagaggatccacactggagagaagccctacaagtgcaatgaatgtgggaaggtgttcagccagaccagcagcctggcccggcactggaggatccacactggagagaagccctacaagtgcaatgaatgtgggaaggtgttctcctacaacagccacctggccagccacagaagagtgcacactggagagaagccctacaagtgcaatgaatgtgggaaggccttctctgtgcacagcaacctgaccacccaccaggtgatccacactggagagaagccctacaagtgcaaccagtgtgggaagggcttctctgtgcacagcagcctgaccacccaccaggtgatccacactggagagaagccctacaagtgcaatgaatgtgggaagagcttctctgtgcggcccaacctgaccaggcaccagatcatccacacaggcaagaagccctacaagtgcagcgactgtgggaagagcttctctgtgcggcccaacctcttccgccaccagatcatccacaccaaggagaagccctacaagaggaactag

SEQ ID NO: 295141 - DNA, 1704 bp, Artificial Sequence
  derived and/or modified sequence
atgcccgagctgtacaccgaggacttcatccagggctgcgacgtgggggaactgcaagagcctgggttgcctggcctagagtgtaacggggctatttccgcacactgcaacctcagacttcctgactcaaacgactctcctgcaagcgcttcccgggtggcaggcatcaccgacttgtctcgaaactgtgttattaaagaacttgcgccgcaacaggaaggtaacccgggagaagtgttccataccgtgacactggaacagcacgagaaacacgatatagaggagttttgtttcagggagatcaaaaagaagattcacgacttcgactgccagtggcgagatgatgaaagaaactgtaataaggtgaccaccgcccctaaggagaatctgacttgtagacgtgaccagcgggacagaaggggcatcggcaacaagagtatcaagcaccagctcggtttatccttcttaccccatcctcatgagctgcagcaatttcaggccgagggcaagatctacgaatgtaatcacgtcgaaaagtctgtcaatcatgggtcatctgtgtcccctccgcagatcatatcatccaccatcaagactcacgtgagtaataaatatggcactgactttatttgcagttcattgttgacccaggagcagaaaagctgtatccgagaaaagccataccggtacatcgagtgtgacaaggctctcaaccacgggtcacatatgaccgtgaggcaagtatcacactcgggcgagaaaggctataaatgtgatctatgtggaaaggttttcagtcagaaatccaatctcgccaggcattggcgggtgcatactggcgagaagccatataaatgcaacgaatgtgacagatctttttctagaaacagttgcctcgctctgcatcgcagagtccataccggcgagaaaccatataagtgttatgagtgtgacaaggtcttttctagaaactcctgcctagctttacaccagaagactcacattggcgagaagccctatacctgcaaggagtgcgggaaagccttctcggtccgatccactctcaccaatcatcaggttattcactccgggaaaaaaccctataagtgcaatgaatgcggtaaggtgttctcccagacttcctctttggcaacgcaccagagaatccacacaggtgagaaaccttataaatgtaatgagtgtggcaaggtcttttcacagacgagttcgctcgcccggcactggcgaatacacaccggagagaaaccatacaaatgcaacgagtgtggcaaagtatttagttataacagtcatctggcaagtcacaggagggtacatactggggaaaaaccatataaatgcaacgagtgtggaaaagctttttccgtgcatagcaatcttacaacgcaccaggtgatacacaccggggaaaagccttataagtgcaaccagtgtggcaaagggttcagtgtccactcgtccctgaccacacatcaggtgatccatacaggagagaaaccatataaatgtaacgaatgcgggaagtcatttagcgtcaggcccaatctcacacggcaccagattatccataccgggaagaaaccctataagtgctcggattgcggcaagagtttctccgttagacctaacttgtttcgccatcagattattcatactaaggaaaaaccttataagcgtaattag

SEQ ID NO: 295142 - DNA, 1812 bp, Artificial Sequence
  derived and/or modified sequence
atgcccgagctgtacaccgaggacttcatccagggctgcgacgtgggagaactgcaagaacctggtctgcctggcgtcttaagttatgtgggtgcacaagagcgagcattagatcaccggaaacctagcacaagctcaaagaaaacaaaaagagtgggcatggaccaacgctgtgaaaacagactggaatgtaacggagcgatctcggcccactgcaatttgcgacttccagacagcaatgactccccagccagcgcatctcgcgttgccggaatcaccgacctgtcccgaaactgcgttataaaggagctcgcaccgcagcaggagggcaatccaggagaggtgttccatacagtcactctggagcagcacgaaaagcacgacattgaggaattttgcttccgagaaatcaagaaaaagatccacgatttcgactgtcagtggcgggacgacgaaagaaactgcaacaaggtgaccaccgccccgaaagaaaacctgacttgtcggcgagatcagagagatcggcgtggcatcggtaataaatcaatcaaacaccagctgggattaagctttctcccccacccacacgagctccagcaattccaggccgagggtaaaatctacgaatgtaatcacgtggaaaaaagcgtgaatcatgggagttcagtgagccctccccagattatctcatccacgattaaaacccacgtgagcaataagtatggaacagactttatttgctctagcctgttaacacaggagcagaagtcatgtattagagagaagccctacaggtacattgaatgcgataaggcattaaaccatgggtctcacatgactgtgagacaggtctcacacagcggagagaaggggtacaagtgtgatttgtgcggaaaggtcttctctcagaaaagcaacttagcccgccattggcgggtgcacactggggagaaaccctacaaatgtaatgagtgtgatcgcagtttcagtaggaacagttgcttagcgcttcatagacgggtccatactggcgaaaagccttataagtgttacgaatgcgacaaggtgttctcccggaatagttgcctggccctacaccagaagactcacatcggggaaaagccttacacgtgcaaggaatgtgggaaggccttctctgtcaggagtactctgaccaatcatcaagtgatccactccggaaagaaaccatacaagtgcaatgagtgcggtaaagtatttagtcagacttctagtctggccactcatcagcggatccacaccggcgagaaaccttacaagtgcaatgagtgcggaaaggttttctctcagacttccagtctggcccgtcattggaggatccatactggcgagaagccctacaaatgcaatgagtgcggcaaggtttttagttacaatagccacctggcctcacatcggcgagttcacacaggagagaagccttacaaatgcaacgagtgtggcaaagctttctcagttcactctaacttgacaactcaccaggttatacataccggcgagaagccatacaagtgtaatcagtgtgggaagggcttttccgtacactcatcactgactacccatcaggtcatccacacgggggagaaaccttataagtgtaacgaatgtggaaagagcttctccgtcagaccgaatttaactcgtcaccagattatacataccggcaagaagccgtacaagtgtagcgactgcgggaagagtttttctgtgaggcccaacttattcagacatcagattattcacacaaaagagaaaccttacaagaggaattag

SEQ ID NO: 295143 - DNA, 1812 bp, Artificial Sequence
  derived and/or modified sequence
atgcccgagctgtacaccgaggacttcatccagggctgcgacgtgggggagttgcaggagccgggcctccctggggttctgtcatacgtaggcgctcaagaacgggctctcgatcacaggaaaccctctacaagtagcaaaaaaactaagcgggtgggaatggatcagcgctgcgagaacagattggaatgcaatggcgctattagcgctcactgtaacctgaggctgccagactcaaatgacagcccagcaagcgccagccgagttgcaggaatcaccgacctgagccggaactgcgtcatcaaagaactagctccacagcaggaagggaacccgggtgaagtcttccacacggtcacactggagcagcacgagaagcacgatatcgaagagttttgctttagggagatcaagaagaaaattcacgacttcgattgtcaatggagggacgacgagcggaactgtaacaaagtcactaccgcacctaaggaaaatctgacatgccgcagagatcaacgagaccggaggggcatcggaaataaatcaattaagcaccaattgggcctgagcttcctccctcatcctcatgagctgcaacagtttcaggcagaagggaagatttacgagtgtaaccacgtggagaagtccgtgaatcacggcagttcagtgagtcccccccagattatctcctctaccataaagactcacgtgagtaacaagtatggcacagacttcatctgtagcagtctgctgacccaagagcagaaaagctgtatcagagagaaaccatacagatacatagagtgtgacaaagcacttaaccacgggtcccacatgacagtacggcaggtgagccactccggcgagaagggatataagtgtgatctgtgcggaaaggtgttcagccaaaagtccaatctagcccgccattggcgcgtccacaccggggaaaagccctacaagtgtaacgagtgtgataggtccttctcacgcaacagttgtttggccttgcaccgcagagttcacactggtgagaagccctacaaatgttatgagtgcgataaagtgttttcaaggaacagctgcctggcattacaccagaagacccatatcggagagaaaccatatacttgcaaggaatgcgggaaggcattctccgtccggtcaacactgaccaatcaccaggtcattcactctgggaaaaaaccttacaaatgcaacgaatgcgggaaggtcttctcacagacctcgtcactggctacgcaccaaagaatccacaccggcgaaaaaccttataagtgtaacgaatgcggcaaggttttttcacagacatctagtctggccagacactggcgcatccacacgggcgaaaaaccctacaaatgcaacgagtgcggtaaagtgttcagttacaactcacacttggcaagtcatcggcgcgtgcatactggagagaagccctacaaatgtaatgagtgcggcaaggcttttagcgtacacagtaatctcacaacgcaccaggttatacataccggtgagaagccttataagtgtaatcagtgcggcaaaggattttccgttcacagtagtctgactacgcatcaggtgatccacaccggggaaaaaccatataagtgcaatgagtgcggcaaatctttttcagtgaggccaaatcttacccgacatcagatcatccacaccggtaaaaagccctacaaatgttcggattgcggcaagtcttttagtgtgaggcctaatctgttccggcaccaaatcatacatactaaggagaagccctataagcgcaactag

SEQ ID NO: 295144 - DNA, 1704 bp, Artificial Sequence
  derived and/or modified sequence
atgcctgaactatacacagaagacttcatccagggctgtgacgttggagagctccaggagcctggactgcccggattagaatgtaatggcgcaattagtgctcattgcaacctgagattacccgactctaacgattccccagcctctgcttcccgcgtagccggaattactgacctaagccgcaactgcgtaattaaggaattggccccacagcaggaagggaatcctggcgaggtgtttcataccgtcaccctggaacagcacgagaagcatgatatcgaggaattctgttttagggagatcaaaaagaagatacacgattttgactgccagtggcgggacgatgagagaaattgcaacaaggtgacaacggcgccaaaagagaacctaacgtgtcgcagggaccagagggaccggagagggatcggaaataaaagcataaagcatcaactgggtctgtcttttcttccacatcctcatgagcttcaacagttccaggccgaaggaaaaatctacgagtgtaatcatgtggagaaaagcgttaatcacgggagcagtgtttctcctccacaaattatcagctccactattaaaacacacgtgtcaaacaagtacggaacagacttcatttgctccagcctgctgacacaggagcaaaaatcgtgtataagggagaagccatatcgttacatcgagtgtgacaaagccctaaatcacggatctcatatgactgttcggcaggttagccattccggggagaagggatacaagtgcgatctatgtggcaaagttttttcccaaaaaagcaatctggccaggcattggagagtccataccggggagaaaccctacaagtgcaacgaatgcgatcggtcattttcccggaactcctgcttagctcttcatagacgggttcacacgggggaaaagccatataagtgctatgaatgtgacaaggtgttctccagaaattcttgtcttgctctgcatcaaaagacacacatcggcgagaagccctacacttgtaaagagtgcgggaaggccttcagcgtcagaagcactctaaccaaccatcaggttatccacagtggcaaaaagccgtataaatgtaatgagtgcggcaaggtttttagccagaccagttcactagctacccatcagaggattcacactggtgaaaagccatacaaatgtaatgagtgtgggaaggttttcagccaaacatccagcctcgctagacactggagaatccacaccggggagaaaccctataagtgcaacgaatgcgggaaagtattttcatataattcccacttggcctcacatcgcagggtccacactggagaaaagccatataagtgcaacgagtgtggcaaggctttctccgtgcattcgaacctgaccacacatcaggttattcacacgggggagaagccctacaaatgcaaccagtgcggaaagggattttcggtacactcctccttgaccacacatcaggtgatccataccggcgagaagccctacaagtgtaacgagtgtggaaaaagtttttcggtgaggccaaatcttactaggcatcagatcatccataccggcaaaaagccatataagtgctccgattgcggcaagtctttctcagtacggccaaacctgtttcggcatcaaatcatacatactaaggagaagccatataaacgtaactag

SEQ ID NO: 295145 - DNA, 1812 bp, Artificial Sequence
  derived and/or modified sequence
atgcctgagttgtataccgaggacttcattcagggatgtgacgtcggcgagctccaggagccaggactgcccggtgtgctgtcctacgtgggagctcaagaacgggctctggaccacaggaaacccagcacgtcaagcaaaaagactaagcgggtcggtatggaccagcgatgtgagaatagactcgaatgtaatggggcaatctccgcccattgtaatctgcggctgccagactctaacgactcgcctgcttccgcctcgcgagtggcaggcatcaccgacctgtctcgcaactgcgtaatcaaagagctagcgccacaacaagaaggcaaccctggagaggtattccatacagtgaccctggaacaacatgagaagcatgacatcgaagaattttgttttagggagatcaaaaaaaagatccatgattttgactgtcagtggcgcgatgacgaacggaactgcaacaaagttaccactgctccaaaagagaatctgacctgcagacgtgaccaaagggaccggagggggattgggaacaagtcgattaagcaccaactgggcctcagctttcttcctcaccctcatgagttacagcagtttcaagctgagggcaaaatatacgaatgcaatcacgtggaaaaaagcgtcaatcatggcagttccgtaagtcccccacagatcatcagttccacgataaagacccacgtgagtaataagtacggaactgactttatttgttcctccctgctcactcaggagcagaagtcgtgtattcgggagaagccctatcgctatattgaatgcgataaggctctcaatcacggatcgcacatgactgtgaggcaggtgagtcactccggtgaaaagggatacaagtgtgacctctgcggaaaagtctttagccaaaagtccaacctagcacgccattggagagttcacacaggagagaagccctacaagtgcaacgagtgcgaccgcagcttctcccggaattcttgtttagcactgcacaggagagtacatactggagaaaaaccatataagtgctatgaatgcgacaaggtcttttccaggaattcctgtctggccttgcaccagaaaactcacataggtgagaagccctatacttgtaaggaatgtgggaaggccttcagcgttaggagtaccttgactaaccatcaggtgatccactctggtaagaagccatacaagtgcaatgagtgtggcaaggtgttctctcagacgtcatccttggctactcaccagagaatccatactggtgagaaaccatataaatgcaatgagtgcggcaaggtgttcagtcagactagctcccttgccagacattggcggatccatactggcgagaaaccttacaaatgcaacgagtgcggcaaggttttcagctacaattcccatctagccagccaccgtcgggtgcacaccggcgagaaaccttacaagtgcaatgagtgtggcaaggccttctccgttcactccaatcttaccactcaccaggtgatccataccggagagaagccctacaaatgcaatcaatgtgggaaggggtttagcgttcatagttctctgaccacccaccaggtgattcacaccggtgagaagccttacaagtgtaatgaatgcggtaagagcttctccgtcaggcctaacctcaccagacaccagattattcacaccgggaaaaaaccttacaaatgtagcgattgtgggaaatcgttttcagttcgccctaatctatttcgtcaccagattatccatactaaggagaaaccttataaacggaattag

SEQ ID NO: 295146 - DNA, 1812 bp, Artificial Sequence
  derived and/or modified sequence
atgcccgaattatataccgaagacttcattcagggatgtgacgtaggcgagcttcaggagccaggcttgcctggcgtcctctcctacgtgggggctcaggaacgcgctctggatcaccggaaaccctcaacgtccagtaagaagactaaaagagtgggcatggaccagcggtgtgagaatcgattggagtgtaacggtgctatttcagctcactgcaatctcagactgcccgattccaatgattcaccagccagcgcgtcccgggtcgccggaattacagacttgagccggaactgtgtgataaaagagctggccccacagcaggagggcaatccaggtgaagtgttccatacagtcacattggagcagcacgagaagcatgacatagaggaattctgcttccgggaaattaaaaaaaaaattcatgatttcgattgccaatggcgcgatgatgagaggaactgcaataaagtgaccactgccccaaaagagaatctgacttgtagacgagatcagagggatcgccgtgggataggtaataagtccatcaagcatcaattgggcctgtcttttttgccgcacccacatgagctccaacaatttcaggccgaaggaaagatctatgagtgcaaccacgttgaaaaatcagtaaaccatggaagttcagtatctccaccacagataataagttccaccatcaagacgcacgtgtcgaataagtacggtaccgactttatctgctcttccctgctgacacaggagcaaaagagctgcatacgggaaaagccctacagatacattgagtgtgacaaggccctgaatcacggttctcatatgacggtaagacaggtttcccattccggcgaaaaaggatataaatgcgacctttgcgggaaagttttttcacagaagagcaacttagccaggcactggcgggtgcacaccggcgaaaaaccctacaaatgtaacgagtgtgacagatccttcagtcggaactcctgtctggcgcttcatcgacgtgtacacaccggcgagaagccgtacaagtgttatgaatgtgataaagtcttttcccgcaattcatgtttggctttgcaccagaagacacacatcggggagaagccctatacatgtaaagagtgtggcaaagctttcagcgtcagatctacacttacgaaccaccaggttatccacagtggcaagaagccatacaaatgtaatgagtgcgggaaggtttttagccagacctctagtctggcaacacaccaacgcattcatacaggtgagaagccatataagtgcaatgagtgtggaaaagtgtttagccagacatcgtccttggccagacattggcgtatccacacaggggagaaaccatacaaatgcaatgagtgtggcaaggtgttctcctataatagccacctcgccagtcataggcgcgtgcatactggagaaaagccatataagtgcaatgagtgcgggaaggcttttagcgtccatagcaatctgaccacccatcaggtcatccacaccggggaaaagccttacaaatgcaatcagtgcgggaaaggcttcagcgttcactcatcacttacaacccaccaggtgatccacaccggcgaaaagccatacaaatgcaacgaatgtggaaaaagcttttctgtcagaccaaatttgacaagacaccagatcatccacaccggcaagaaaccctacaaatgttccgattgcggaaagtcgttcagcgtcagacccaacctgttccggcatcagatcatccacacaaaggaaaagccatataagcgaaactag

SEQ ID NO: 295147 - DNA, 2370 bp, Artificial Sequence
  derived and/or modified sequence
cggaaacggatcgcgttgggtgaaggtgacggcgtcgagccattgacttccaaagactcctggcacatgaggaagaaacccagaagaggagagcaaaggagtcaggaatggcttttactcagttgacattcagggacgtggccatcgaattctctcaagatgagtggaaatgcctgaactctacacagaggactttatacagggatgtgatgttggagaactacaggaacctggtctccctgggctggagtgcaatggtgcaatctcggctcactgcaaccttcgcctcccggattcaaatgattctcctgcctcagcctcccgagtagctgggattacagatctgtctcgtaactgtgtaatcaaggaactagcaccacaacaggaaggtaacccaggagaagtattccacacagtgacattggaacaacatgaaaaacatgacattgaagagttttgcttcagggaaatcaagaaaaaaatacacgactttgactgtcagtggagagatgatgaaagaaattgcaacaaagtgactacggccccaaaagaaaatcttacttgtaggagagaccaacgcgatagaagaggtataggaaacaagtctattaaacatcagcttggattaagctttctaccacatccccatgaactgcagcagtttcaagctgaagggaaaatttatgaatgtaaccatgttgagaagtctgtcaaccatggttcctcagtttcaccaccccaaataatttcttctaccatcaaaacccatgtttctaataaatatgggactgatttcatctgttcttcattactcacacaagaacagaaatcatgcattagggaaaaaccttacagatatattgagtgcgacaaagccttgaatcatggctcacacatgactgtacgtcaggtaagtcattctggagagaaaggatataaatgtgatctgtgtggcaaggtctttagtcaaaaatcaaaccttgcgcgtcattggagagttcatactggagagaaaccatacaaatgtaatgaatgtgacagaagtttcagtcgcaactcatgccttgcactacatcggagagttcacactggagagaaaccttacaaatgttatgagtgtgacaaggtcttcagtcgaaattcatgccttgcactacatcagaaaactcatattggagagaaaccttacacatgtaaagagtgtggcaaagcctttagtgtgaggtcaacacttaccaaccatcaggtaattcatagtggcaagaaaccttacaaatgcaatgaatgtggcaaggtgttcagtcagacttcaagccttgcaactcatcagagaattcacactggggagaaaccatacaagtgtaatgaatgtggtaaagtcttcagtcagacttcaagccttgcaaggcattggagaattcatactggagagaaaccttacaaatgcaatgaatgtggtaaggttttcagttacaattcacaccttgcgagtcatcggagagttcatactggagagaaaccttacaagtgtaatgagtgtgggaaagcctttagtgtgcattcgaacttaactacccatcaggtcatccatactggagagaagccttacaaatgtaatcaatgtggcaaaggcttcagtgtgcattcaagcctaactacccatcaggtcatccatactggagaaaaaccttacaaatgtaatgagtgtggcaaatcctttagtgtgcgcccaaacctcactagacatcagataatccatactggaaagaaaccttacaaatgtagtgattgtgggaagtcctttagtgtgcgcccaaacctcttcagacatcaaattatccatactaaggagaaaccttataaaagaaattaatatggcaaggtcttcagtcaaagtttaaatcctgtgagtcatcaaagaatttatatcagagagaaaccatacaagtataataaatgtggcaaggttttcagtcacaattcactcctacacagcatcagagaatttcattcttgagagaatccttacgagtacagcaaacccttcatcacaagttcaagcattcattgacatcagagtccatgctaaagagaaatcatatacacctaactgtgtggcagaggcttcatttaggtctcacaactcactagacatcaaaatgtgtaaacatctttgtatattttgtgcatgttgaagctattaaccaaggatcaaaactgtaacacatccaaggatttatgtgaggaataattcagtctagttgtgctgataaacttttcatattacacattgtagaacaaatgcaagcccaaatatgttaaaactcacacaacatgatatatattaaaggttgcaggatgtttgaagtc

SEQ ID NO: 295148 - DNA, 2478 bp, Artificial Sequence
  derived and/or modified sequence
cggaaacggatcgcgttgggtgaaggtgacggcgtcgagccattgacttccaaagactcctggcacatgaggaagaaacccagaagaggagagcaaaggagtcaggaatggcttttactcagttgacattcagggacgtggccatcgaattctctcaagatgagtggaaatgcctgaactctacacagaggactttatacagggatgtgatgttggagaactacaggaacctggtctccctggagtattatcctatgtgggagcacaggaaagagccctggaccatagaaagccaagtacgagtagcaagaaaaccaaaagggtgggaatggatcaaaggtgtgaaaacaggctggagtgcaatggtgcaatctcggctcactgcaaccttcgcctcccggattcaaatgattctcctgcctcagcctcccgagtagctgggattacagatctgtctcgtaactgtgtaatcaaggaactagcaccacaacaggaaggtaacccaggagaagtattccacacagtgacattggaacaacatgaaaaacatgacattgaagagttttgcttcagggaaatcaagaaaaaaatacacgactttgactgtcagtggagagatgatgaaagaaattgcaacaaagtgactacggccccaaaagaaaatcttacttgtaggagagaccaacgcgatagaagaggtataggaaacaagtctattaaacatcagcttggattaagctttctaccacatccccatgaactgcagcagtttcaagctgaagggaaaatttatgaatgtaaccatgttgagaagtctgtcaaccatggttcctcagtttcaccaccccaaataatttcttctaccatcaaaacccatgtttctaataaatatgggactgatttcatctgttcttcattactcacacaagaacagaaatcatgcattagggaaaaaccttacagatatattgagtgcgacaaagccttgaatcatggctcacacatgactgtacgtcaggtaagtcattctggagagaaaggatataaatgtgatctgtgtggcaaggtctttagtcaaaaatcaaaccttgcgcgtcattggagagttcatactggagagaaaccatacaaatgtaatgaatgtgacagaagtttcagtcgcaactcatgccttgcactacatcggagagttcacactggagagaaaccttacaaatgttatgagtgtgacaaggtcttcagtcgaaattcatgccttgcactacatcagaaaactcatattggagagaaaccttacacatgtaaagagtgtggcaaagcctttagtgtgaggtcaacacttaccaaccatcaggtaattcatagtggcaagaaaccttacaaatgcaatgaatgtggcaaggtgttcagtcagacttcaagccttgcaactcatcagagaattcacactggggagaaaccatacaagtgtaatgaatgtggtaaagtcttcagtcagacttcaagccttgcaaggcattggagaattcatactggagagaaaccttacaaatgcaatgaatgtggtaaggttttcagttacaattcacaccttgcgagtcatcggagagttcatactggagagaaaccttacaagtgtaatgagtgtgggaaagcctttagtgtgcattcgaacttaactacccatcaggtcatccatactggagagaagccttacaaatgtaatcaatgtggcaaaggcttcagtgtgcattcaagcctaactacccatcaggtcatccatactggagaaaaaccttacaaatgtaatgagtgtggcaaatcctttagtgtgcgcccaaacctcactagacatcagataatccatactggaaagaaaccttacaaatgtagtgattgtgggaagtcctttagtgtgcgcccaaacctcttcagacatcaaattatccatactaaggagaaaccttataaaagaaattaatatggcaaggtcttcagtcaaagtttaaatcctgtgagtcatcaaagaatttatatcagagagaaaccatacaagtataataaatgtggcaaggttttcagtcacaattcactcctacacagcatcagagaatttcattcttgagagaatccttacgagtacagcaaacccttcatcacaagttcaagcattcattgacatcagagtccatgctaaagagaaatcatatacacctaactgtgtggcagaggcttcatttaggtctcacaactcactagacatcaaaatgtgtaaacatctttgtatattttgtgcatgttgaagctattaaccaaggatcaaaactgtaacacatccaaggatttatgtgaggaataattcagtctagttgtgctgataaacttttcatattacacattgtagaacaaatgcaagcccaaatatgttaaaactcacacaacatgatatatattaaaggttgcaggatgtttgaagtc

SEQ ID NO: 295149 - DNA, 2630 bp, Artificial Sequence
  derived and/or modified sequence
aaacggatcgcgttgggtgaaggtgacggcgtcgagcgacctctctgacctcatctcctgcctgtgtcctcctcgctccctctgctccagccaagcatgcgtccttcctgttcctgggccgagcttgctcctgcctcaaggccttcacgtgggctgtgcctctgctggaactcgctggcccctcagctgcagcattgacttccaaagactcctggcacatgaggaagaaacccagaagaggagagcaaaggagtcaggaatggcttttactcagttgacattcagggacgtggccatcgaattctctcaagatgagtggaaatgcctgaactctacacagaggactttatacagggatgtgatgttggagaactacaggaacctggtctccctggagtattatcctatgtgggagcacaggaaagagccctggaccatagaaagccaagtacgagtagcaagaaaaccaaaagggtgggaatggatcaaaggtgtgaaaacaggctggagtgcaatggtgcaatctcggctcactgcaaccttcgcctcccggattcaaatgattctcctgcctcagcctcccgagtagctgggattacagatctgtctcgtaactgtgtaatcaaggaactagcaccacaacaggaaggtaacccaggagaagtattccacacagtgacattggaacaacatgaaaaacatgacattgaagagttttgcttcagggaaatcaagaaaaaaatacacgactttgactgtcagtggagagatgatgaaagaaattgcaacaaagtgactacggccccaaaagaaaatcttacttgtaggagagaccaacgcgatagaagaggtataggaaacaagtctattaaacatcagcttggattaagctttctaccacatccccatgaactgcagcagtttcaagctgaagggaaaatttatgaatgtaaccatgttgagaagtctgtcaaccatggttcctcagtttcaccaccccaaataatttcttctaccatcaaaacccatgtttctaataaatatgggactgatttcatctgttcttcattactcacacaagaacagaaatcatgcattagggaaaaaccttacagatatattgagtgcgacaaagccttgaatcatggctcacacatgactgtacgtcaggtaagtcattctggagagaaaggatataaatgtgatctgtgtggcaaggtctttagtcaaaaatcaaaccttgcgcgtcattggagagttcatactggagagaaaccatacaaatgtaatgaatgtgacagaagtttcagtcgcaactcatgccttgcactacatcggagagttcacactggagagaaaccttacaaatgttatgagtgtgacaaggtcttcagtcgaaattcatgccttgcactacatcagaaaactcatattggagagaaaccttacacatgtaaagagtgtggcaaagcctttagtgtgaggtcaacacttaccaaccatcaggtaattcatagtggcaagaaaccttacaaatgcaatgaatgtggcaaggtgttcagtcagacttcaagccttgcaactcatcagagaattcacactggggagaaaccatacaagtgtaatgaatgtggtaaagtcttcagtcagacttcaagccttgcaaggcattggagaattcatactggagagaaaccttacaaatgcaatgaatgtggtaaggttttcagttacaattcacaccttgcgagtcatcggagagttcatactggagagaaaccttacaagtgtaatgagtgtgggaaagcctttagtgtgcattcgaacttaactacccatcaggtcatccatactggagagaagccttacaaatgtaatcaatgtggcaaaggcttcagtgtgcattcaagcctaactacccatcaggtcatccatactggagaaaaaccttacaaatgtaatgagtgtggcaaatcctttagtgtgcgcccaaacctcactagacatcagataatccatactggaaagaaaccttacaaatgtagtgattgtgggaagtcctttagtgtgcgcccaaacctcttcagacatcaaattatccatactaaggagaaaccttataaaagaaattaatatggcaaggtcttcagtcaaagtttaaatcctgtgagtcatcaaagaatttatatcagagagaaaccatacaagtataataaatgtggcaaggttttcagtcacaattcactcctacacagcatcagagaatttcattcttgagagaatccttacgagtacagcaaacccttcatcacaagttcaagcattcattgacatcagagtccatgctaaagagaaatcatatacacctaactgtgtggcagaggcttcatttaggtctcacaactcactagacatcaaaatgtgtaaacatctttgtatattttgtgcatgttgaagctattaaccaaggatcaaaactgtaacacatccaaggatttatgtgaggaataattcagtctagttgtgctgataaacttttcatattacacattgtagaacaaatgcaagcccaaatatgttaaaactcacacaacatgatatatattaaaggttgcaggatgtttgaagtc

SEQ ID NO: 295150 - protein, 654 aa, Artificial Sequence
  derived and/or modified sequence
MNGHLEAEEQQDQRPDQELTGSWGHGPRSTLVRAKAMAPPPPPLAASTPLLHGEFGSYPARGPRFALTLTSQALHIQRLRPKPEARPRGGLVPLAEVSGCCTLRSRSPSDSAAYFCIYTYPRGRRGARRRATRTFRADGAATYEENRAEAQRWATALTCLLRGLPLPGDGEITPDLLPRPPRLLLLVNPFGGRGLAWQWCKNHVLPMISEAGLSFNLIQTERQNHARELVQGLSLSEWDGIVTVSGDGLLHEVLNGLLDRPDWEEAVKMPVGILPCGSGNALAGAVNQHGGFEPALGLDLLLNCSLLLCRGGGHPLDLLSVTLASGSRCFSFLSVAWGFVSDVDIQSERFRALGSARFTLGTVLGLATLHTYRGRLSYLPATVEPASPTPAHSLPRAKSELTLTPDPAPPMAHSPLHRSVSDLPLPLPQPALASPGSPEPLPILSLNGGGPELAGDWGGAGDAPLSPDPLLSSPPGSPKAALHSPVSEGAPVIPPSSGLPLPTPDARVGASTCGPPDHLLPPLGTPLPPDWVTLEGDFVLMLAISPSHLGADLVAAPHARFDDGLVHLCWVRSGISRAALLRLFLAMERGSHFSLGCPQLGYAAARAFRLEPLTPRGVLTVDGEQVEYGPLQAQMHPGIGTLLTGPPGCPGREP

SEQ ID NO: 295151 - protein, 627 aa, Artificial Sequence
  derived and/or modified sequence
MNGHLEAEEQQDQRPDQELTGSWGHGPRSTLVRAKAMAPPPPPLAASTPLLHGEFGSYPARGPRFALTLTSQALHIQRLRPKHSAAYFCIYTYPRGRRGARRRATRTFRADGAATYEENRAEAQRWATALTCLLRGLPLPGDGEITPDLLPRPPRLLLLVNPFGGRGLAWQWCKNHVLPMISEAGLSFNLIQTERQNHARELVQGLSLSEWDGIVTVSGDGLLHEVLNGLLDRPDWEEAVKMPVGILPCGSGNALAGAVNQHGGFEPALGLDLLLNCSLLLCRGGGHPLDLLSVTLASGSRCFSFLSVAWGFVSDVDIQSERFRALGSARFTLGTVLGLATLHTYRGRLSYLPATVEPASPTPAHSLPRAKSELTLTPDPAPPMAHSPLHRSVSDLPLPLPQPALASPGSPEPLPILSLNGGGPELAGDWGGAGDAPLSPDPLLSSPPGSPKAALHSPVSEGAPVIPPSSGLPLPTPDARVGASTCGPPDHLLPPLGTPLPPDWVTLEGDFVLMLAISPSHLGADLVAAPHARFDDGLVHLCWVRSGISRAALLRLFLAMERGSHFSLGCPQLGYAAARAFRLEPLTPRGVLTVDGEQVEYGPLQAQMHPGIGTLLTGPPGCPGREP

SEQ ID NO: 295152 - protein, 49 aa, Artificial Sequence
  derived and/or modified sequence
MNGHLEAEEQQDQRSPLTCYLGRPGCFYWSIPLGVGAWPGSGVRTTCFP

SEQ ID NO: 295153 - protein, 761 aa, Artificial Sequence
  derived and/or modified sequence
MIGCLHARVSGPLWDAGLCPASSRSAHTCLSLSVSDAPVSPATAPHCLLLSTAPAPPCPCHGVLNSHPFSPPFPQRPDQELTGSWGHGPRSTLVRAKAMAPPPPPLAASTPLLHGEFGSYPARGPRFALTLTSQALHIQRLRPKPEARPRGGLVPLAEVSGCCTLRSRSPSDSAAYFCIYTYPRGRRGARRRATRTFRADGAATYEENRAEAQRWATALTCLLRGLPLPGDGEITPDLLPRPPRLLLLVNPFGGRGLAWQWCKNHVLPMISEAGLSFNLIQTERQNHARELVQGLSLSEWDGIVTVSGDGLLHEVLNGLLDRPDWEEAVKMPVGILPCGSGNALAGAVNQHGGFEPALGLDLLLNCSLLLCRGGGHPLDLLSVTLASGSRCFSFLSVAWGFVSDVDIQSERFRALGSARFTLGTVLGLATLHTYRGRLSYLPATVEPASPTPAHSLPRAKSELTLTPDPAPPMAHSPLHRSVSDLPLPLPQPALASPGSPEPLPILSLNGGGPELAGDWGGAGDAPLSPDPLLSSPPGSPKAALHSPVSEGAPVIPPSSGLPLPTPDARVGASTCGPPDHLLPPLGTPLPPDWVTLEGDFVLMLAISPSHLGADLVAAPHARFDDGLVHLCWVRSGISRAALLRLFLAMERGSHFSLGCPQLGYAAARAFRLEPLTPRGVLTVDGEQVEYGPLQAQMHPGIARGRTQTPALPAAPALYGRQPGAAHGLQPVCQGAALFFHNSWLWGSQDLFRIVLTEAVGG

SEQ ID NO: 295154 - protein, 618 aa, Artificial Sequence
  derived and/or modified sequence
MAPPPPPLAASTPLLHGEFGSYPARGPRFALTLTSQALHIQRLRPKPEARPRGGLVPLAEVSGCCTLRSRSPSDSAAYFCIYTYPRGRRGARRRATRTFRADGAATYEENRAEAQRWATALTCLLRGLPLPGDGEITPDLLPRPPRLLLLVNPFGGRGLAWQWCKNHVLPMISEAGLSFNLIQTERQNHARELVQGLSLSEWDGIVTVSGDGLLHEVLNGLLDRPDWEEAVKMPVGILPCGSGNALAGAVNQHGGFEPALGLDLLLNCSLLLCRGGGHPLDLLSVTLASGSRCFSFLSVAWGFVSDVDIQSERFRALGSARFTLGTVLGLATLHTYRGRLSYLPATVEPASPTPAHSLPRAKSELTLTPDPAPPMAHSPLHRSVSDLPLPLPQPALASPGSPEPLPILSLNGGGPELAGDWGGAGDAPLSPDPLLSSPPGSPKAALHSPVSEGAPVIPPSSGLPLPTPDARVGASTCGPPDHLLPPLGTPLPPDWVTLEGDFVLMLAISPSHLGADLVAAPHARFDDGLVHLCWVRSGISRAALLRLFLAMERGSHFSLGCPQLGYAAARAFRLEPLTPRGVLTVDGEQVEYGPLQAQMHPGIGTLLTGPPGCPGREP

SEQ ID NO: 295155 - DNA, 1965 bp, Artificial Sequence
  derived and/or modified sequence
atgaacggccacctggaggccgaggagcagcaggaccagagacccgaccaggagctgaccggcagctggggccacggccccagaagcaccctggtgagagccaaggccatggcccccccccccccccccctggccgccagcacccccctgctgcacggcgagttcggcagctaccccgccagaggccccagattcgccctgaccctgaccagccaggccctgcacatccagagactgagacccaagcccgaggccagacccagaggcggcctggtgcccctggccgaggtgagcggctgctgcaccctgagaagcagaagccccagcgacagcgccgcctacttctgcatctacacctaccccagaggcagaagaggcgccagaagaagagccaccagaaccttcagagccgacggcgccgccacctacgaggagaacagagccgaggcccagagatgggccaccgccctgacctgcctgctgagaggcctgcccctgcccggcgacggcgagatcacccccgacctgctgcccagaccccccagactgctgctgctggtgaaccccttcggcggcagaggcctggcctggcagtggtgcaagaaccacgtgctgcccatgatcagcgaggccggcctgagcttcaacctgatccagaccgagagacagaaccacgccagagagctggtgcagggcctgagcctgagcgagtgggacggcatcgtgaccgtgagcggcgacggcctgctgcacgaggtgctgaacggcctgctggacagacccgactgggaggaggccgtgaagatgcccgtgggcatcctgccctgcggcagcggcaacgccctggccggcgccgtgaaccagcacggcggcttcgagcccgccctgggcctggacctgctgctgaactgcagcctgctgctgtgcagaggcggcggccaccccctggacctgctgagcgtgaccctggccagcggcagcagatgcttcagcttcctgagcgtggcctggggcttcgtgagcgacgtggacatccagagcgagagattcagagccctgggcagcgccagattcaccctgggcaccgtgctgggcctggccaccctgcacacctacagaggcagactgagctacctgcccgccaccgtggagcccgccagccccacccccgcccacagcctgcccagagccaagagcgagctgaccctgacccccgaccccgccccccccatggcccacagccccctgcacagaagcgtgagcgacctgcccctgcccctgccccagcccgccctggccagccccggcagccccgagcccctgcccatcctgagcctgaacggcggcggccccgagctggccggcgactggggcggcgccggcgacgcccccctgagccccgaccccctgctgagcagcccccccggcagccccaaggccgccctgcacagccccgtgagcgagggcgcccccgtgatcccccccagcagcggcctgcccctgcccacccccgacgccagagtgggcgccagcacctgcggcccccccgaccacctgctgccccccctgggcacccccctgccccccgactgggtgaccctggagggcgacttcgtgctgatgctggccatcagccccagccacctgggcgccgacctggtggccgccccccacgccagattcgacgacggcctggtgcacctgtgctgggtgagaagcggcatcagcagagccgccctgctgagactgttcctggccatggagagaggcagccacttcagcctgggctgcccccagctgggctacgccgccgccagagccttcagactggagcccctgacccccagaggcgtgctgaccgtggacggcgagcaggtggagtacggccccctgcaggcccagatgcaccccggcatcggcaccctgctgaccggcccccccggctgccccggcagagagccctag

SEQ ID NO: 295156 - DNA, 1884 bp, Artificial Sequence
  derived and/or modified sequence
atgaacggccacctggaggccgaggagcagcaggaccagagacccgaccaggagctgaccggcagctggggccacggccccagaagcaccctggtgagagccaaggccatggcccccccccccccccccctggccgccagcacccccctgctgcacggcgagttcggcagctaccccgccagaggccccagattcgccctgaccctgaccagccaggccctgcacatccagagactgagacccaagcacagcgccgcctacttctgcatctacacctaccccagaggcagaagaggcgccagaagaagagccaccagaaccttcagagccgacggcgccgccacctacgaggagaacagagccgaggcccagagatgggccaccgccctgacctgcctgctgagaggcctgcccctgcccggcgacggcgagatcacccccgacctgctgcccagaccccccagactgctgctgctggtgaaccccttcggcggcagaggcctggcctggcagtggtgcaagaaccacgtgctgcccatgatcagcgaggccggcctgagcttcaacctgatccagaccgagagacagaaccacgccagagagctggtgcagggcctgagcctgagcgagtgggacggcatcgtgaccgtgagcggcgacggcctgctgcacgaggtgctgaacggcctgctggacagacccgactgggaggaggccgtgaagatgcccgtgggcatcctgccctgcggcagcggcaacgccctggccggcgccgtgaaccagcacggcggcttcgagcccgccctgggcctggacctgctgctgaactgcagcctgctgctgtgcagaggcggcggccaccccctggacctgctgagcgtgaccctggccagcggcagcagatgcttcagcttcctgagcgtggcctggggcttcgtgagcgacgtggacatccagagcgagagattcagagccctgggcagcgccagattcaccctgggcaccgtgctgggcctggccaccctgcacacctacagaggcagactgagctacctgcccgccaccgtggagcccgccagccccacccccgcccacagcctgcccagagccaagagcgagctgaccctgacccccgaccccgccccccccatggcccacagccccctgcacagaagcgtgagcgacctgcccctgcccctgccccagcccgccctggccagccccggcagccccgagcccctgcccatcctgagcctgaacggcggcggccccgagctggccggcgactggggcggcgccggcgacgcccccctgagccccgaccccctgctgagcagcccccccggcagccccaaggccgccctgcacagccccgtgagcgagggcgcccccgtgatcccccccagcagcggcctgcccctgcccacccccgacgccagagtgggcgccagcacctgcggcccccccgaccacctgctgccccccctgggcacccccctgccccccgactgggtgaccctggagggcgacttcgtgctgatgctggccatcagccccagccacctgggcgccgacctggtggccgccccccacgccagattcgacgacggcctggtgcacctgtgctgggtgagaagcggcatcagcagagccgccctgctgagactgttcctggccatggagagaggcagccacttcagcctgggctgcccccagctgggctacgccgccgccagagccttcagactggagcccctgacccccagaggcgtgctgaccgtggacggcgagcaggtggagtacggccccctgcaggcccagatgcaccccggcatcggcaccctgctgaccggcccccccggctgccccggcagagagccctag

SEQ ID NO: 295157 - DNA, 2286 bp, Artificial Sequence
  derived and/or modified sequence
atgatcggctgcctgcacgccagagtgagcggccccctgtgggacgccggcctgtgccccgccagcagcagaagcgcccacacctgcctgagcctgagcgtgagcgacgcccccgtgagccccgccaccgccccccactgcctgctgctgagcaccgcccccgcccccccctgcccctgccacggcgtgctgaacagccaccccttcagcccccccttcccccagagacccgaccaggagctgaccggcagctggggccacggccccagaagcaccctggtgagagccaaggccatggcccccccccccccccccctggccgccagcacccccctgctgcacggcgagttcggcagctaccccgccagaggccccagattcgccctgaccctgaccagccaggccctgcacatccagagactgagacccaagcccgaggccagacccagaggcggcctggtgcccctggccgaggtgagcggctgctgcaccctgagaagcagaagccccagcgacagcgccgcctacttctgcatctacacctaccccagaggcagaagaggcgccagaagaagagccaccagaaccttcagagccgacggcgccgccacctacgaggagaacagagccgaggcccagagatgggccaccgccctgacctgcctgctgagaggcctgcccctgcccggcgacggcgagatcacccccgacctgctgcccagaccccccagactgctgctgctggtgaaccccttcggcggcagaggcctggcctggcagtggtgcaagaaccacgtgctgcccatgatcagcgaggccggcctgagcttcaacctgatccagaccgagagacagaaccacgccagagagctggtgcagggcctgagcctgagcgagtgggacggcatcgtgaccgtgagcggcgacggcctgctgcacgaggtgctgaacggcctgctggacagacccgactgggaggaggccgtgaagatgcccgtgggcatcctgccctgcggcagcggcaacgccctggccggcgccgtgaaccagcacggcggcttcgagcccgccctgggcctggacctgctgctgaactgcagcctgctgctgtgcagaggcggcggccaccccctggacctgctgagcgtgaccctggccagcggcagcagatgcttcagcttcctgagcgtggcctggggcttcgtgagcgacgtggacatccagagcgagagattcagagccctgggcagcgccagattcaccctgggcaccgtgctgggcctggccaccctgcacacctacagaggcagactgagctacctgcccgccaccgtggagcccgccagccccacccccgcccacagcctgcccagagccaagagcgagctgaccctgacccccgaccccgccccccccatggcccacagccccctgcacagaagcgtgagcgacctgcccctgcccctgccccagcccgccctggccagccccggcagccccgagcccctgcccatcctgagcctgaacggcggcggccccgagctggccggcgactggggcggcgccggcgacgcccccctgagccccgaccccctgctgagcagcccccccggcagccccaaggccgccctgcacagccccgtgagcgagggcgcccccgtgatcccccccagcagcggcctgcccctgcccacccccgacgccagagtgggcgccagcacctgcggcccccccgaccacctgctgccccccctgggcacccccctgccccccgactgggtgaccctggagggcgacttcgtgctgatgctggccatcagccccagccacctgggcgccgacctggtggccgccccccacgccagattcgacgacggcctggtgcacctgtgctgggtgagaagcggcatcagcagagccgccctgctgagactgttcctggccatggagagaggcagccacttcagcctgggctgcccccagctgggctacgccgccgccagagccttcagactggagcccctgacccccagaggcgtgctgaccgtggacggcgagcaggtggagtacggccccctgcaggcccagatgcaccccggcatcgccagaggcagaacccagacccccgccctgcccgccgcccccgccctgtacggcagacagcccggcgccgcccacggcctgcagcccgtgtgccagggcgccgccctgttcttccacaacagctggctgtggggcagccaggacctgttcagaatcgtgctgaccgaggccgtgggcggctag

SEQ ID NO: 295158 - DNA, 1965 bp, Artificial Sequence
  derived and/or modified sequence
atgaatggccacttagaagcagaggaacagcaggaccagcgacctgaccaggaactcaccggcagctggggccacggacctcgcagcactctggtgcgggctaaggcgatggcgcctcctcctccgccgttagccgcaagtacccctctgctccacggagaatttggttcatacccagccaggggacctagatttgctctgactcttacttctcaggcgttgcacatccaacgactgagacccaagcccgaagcccgccctagaggtggcttggtgcccttggcagaagtttccggctgctgtacattaagatcccgaagtcctagcgacagcgccgcctacttctgcatatacacctatccgcggggtagacgcggcgcacgtagaagggccaccaggacgttccgcgctgatggtgccgctacttacgaggagaatagagctgaggctcagagatgggctacagccctgacctgcctgcttagaggcctgccacttcccggcgatggggagattacacctgatctgctgccccgcccaccccggctgctgcttctggtcaacccgttcgggggccggggcctagcttggcagtggtgtaaaaaccacgtgttgcccatgatttctgaggctgggctgtcgttcaatctgatacaaacagaacggcagaaccacgctcgggaactggtgcagggtctgtcgctgtctgaatgggacggaattgttactgtctctggcgacggattgcttcacgaggttctgaacggactcttggacaggcctgactgggaagaagctgttaaaatgcctgtcggcattctaccttgcggctctggcaatgccctggccggtgctgttaatcagcacgggggatttgagccggccctaggtctcgatcttctactgaattgtagcctattgctctgccgcggcggaggccacccactcgacctgctgagcgtaacgctggccagtggctccagatgcttctctttcttgtcagtggcttggggatttgtatctgatgttgatattcaatccgaacgctttcgtgcgcttggatccgcacgctttacactgggaacagtgctgggccttgctaccctacacacctacaggggcaggctgtcctacctgcccgctaccgtggagccagctagcccgacccccgcgcattcactgccgcgagcgaagtctgagctgacccttactccggacccagccccacctatggcacactcacccctacatcgttctgtaagtgacttgccacttcccctgccacagccggcgctggcctcccctggcagtccagagcctctccccattctgtcgctgaacggcggagggccagaactggctggtgattggggcggggccggcgatgccccattaagccccgacccgctattaagctcccctccagggtcccccaaagcggcactgcatagtcccgtgtccgagggcgctccagtgattcccccttcatcaggtcttccactgcccacgcccgatgcccgagttggcgcgtccacatgcgggccccccgaccaccttctgcctccccttggaactcctcttcctccagattgggtgactctggaaggagactttgtgctcatgcttgctatctctccaagtcatctcggagccgacttggtagcagcaccccacgctaggtttgacgacggcttggtccatctgtgttgggtccgcagcggaatcagcagggctgccctcctgcgcttgtttttggccatggagcgaggcagtcacttcagtctcggttgcccccagctggggtacgccgccgcccgggcgttccgcttagagccactcacacctcgaggtgttcttaccgtggatggagaacaagtagaatacgggcccctgcaagcacagatgcaccctggcatcggtactctactgaccggaccaccaggctgtccgggaagagaaccttag

SEQ ID NO: 295159 - DNA, 1884 bp, Artificial Sequence
  derived and/or modified sequence
atgaatggccatctcgaagcagaggagcaacaggatcaacgccccgaccaggagctgacagggtcttggggtcacgggcccagaagtactttggtcagggccaaagccatggctcctcctcccccgccactggctgccagcacgccccttctgcacggagagtttggcagttaccccgccaggggcccccgatttgcactgaccctcacttcacaggcccttcacattcagcgcctcaggcctaaacacagtgccgcctacttctgcatctacacttatccccgcggtcgacgaggggccaggagaagggccacacgcaccttccgtgccgatggggccgcgacctacgaggaaaaccgggcagaggcccagcggtgggctaccgcccttacatgcctgctcagaggcttgccgttgcctggcgatggtgaaattacgccagacctactccctcgcccacctcggctcctccttttggttaacccctttgggggaagggggcttgcttggcaatggtgcaagaaccatgttctgccgatgattagcgaagcgggcctgtctttcaacttgattcaaacagagaggcagaatcacgcacgtgaactggtgcagggactttcgttgagtgagtgggatggtatcgtgaccgtgtctggcgatggcctcttgcacgaggtactgaacggactgctcgacagaccagactgggaagaggcagtgaaaatgcccgttggcattttaccatgcgggtcaggcaatgcactggccggggccgtgaaccagcacggcggctttgagccagctcttggcctcgacctgctgctgaattgttctctcttgctttgtaggggcggggggcacccactagacctgctgtccgttaccttggcctcaggcagccgctgcttttctttccttagcgtggcttggggattcgtgagcgacgttgacattcagagcgagagattccgagcattgggctccgcgaggtttacactagggacagtcctcgggcttgccacgctccacacatacagagggaggcttagttatctgccagctactgtggagccagcctcaccaaccccggctcactctcttccgcgcgctaaaagtgaactcaccttgacccccgatccagcaccgccaatggcacacagcccgttgcatagaagcgtgagtgacctgccactccccctaccccagccagcattagcttcaccgggtagtccagaacccctgcctatactttcactgaatggcgggggacctgagcttgctggtgattggggaggtgcaggtgacgcgccgctctctcccgatccactgctctcatcaccgcctggttccccgaaggcagcgctccactctcctgtcagtgagggggcgcccgttattcccccatcaagcgggcttccgcttccaacacctgatgccagggtgggtgccagcacttgtgggccccctgaccaccttctgcccccgcttggaacgccccttcctcctgattgggtgaccttagagggcgactttgtgctgatgttggccatctcccctagtcacttgggtgctgatctcgtggctgccccgcacgcgcgcttcgacgacggactggtacatttgtgctgggtgcgaagtgggatatcccgagccgcactgttaaggctttttctggccatggagcgcggatctcacttttctctgggatgtccacagctgggctacgccgcagcgcgggcttttaggctagaacctttgacacccaggggggtgttgaccgtggatggagaacaggtggaatatggacccctccaggcacagatgcaccccgggataggcaccctgctgacgggtccgcctggatgccctggacgtgagccgtag

SEQ ID NO: 295160 - DNA, 2286 bp, Artificial Sequence
  derived and/or modified sequence
atgatcgggtgtctccatgccagggtgtctggcccattatgggacgccggcctttgccctgcatcttcaagatctgcccatacgtgtctctcactgtccgtgtctgatgccccagtatcccccgcaacggccccccattgtctcctgttgtctacagcccccgcccctccatgtccctgccacggcgtgctgaatagccatccattctcgccgccttttcctcagcggccagaccaggagctcaccggttcttggggccacggaccacggtcaacattggtcagagcgaaggctatggccccccctccaccccccctggccgcaagcacacccttgcttcatggcgagttcggatcataccccgctcgtgggccacggtttgcattgacccttacttcccaagcactgcacatccaacgcctgcgaccaaagccggaagctcggccacgtggcggtctcgtgcccctggctgaggtgtccggctgctgtactctgcgttcccgcagcccctccgattctgccgcgtatttttgtatctacacatacccgaggggcagacgcggggctagacgcagagccacccgcacctttagggccgacggggccgctacttacgaggagaaccgcgccgaagctcagagatgggccacagctttgacgtgccttctgaggggtctgccactccccggagacggcgagattacgccagatctgcttccgcgcccaccacgtctcctgctcctcgtcaatccattcggaggcagagggctcgcttggcagtggtgtaagaatcacgtgctccctatgatctccgaagctggattgtcatttaatctgatccagactgagagacagaaccatgcaagggagcttgtgcaagggttatctctttctgagtgggacgggatcgtcaccgtgagtggtgacggactgctgcatgaagtactgaatggactcttggaccgcccggattgggaggaggctgtcaaaatgcccgtgggtatcctgccctgtgggagcgggaatgcgttggctggagctgtgaatcagcatgggggattcgagccggctctaggccttgatctacttctcaattgttccctcttactgtgcagaggggggggccatcctctcgacttgttatcagttaccctcgcctcgggttccaggtgcttcagctttctgtcagtcgcctggggctttgtgtccgacgtggatattcagtccgagcggttccgcgctctcggctccgcaaggtttacccttggtactgtcctgggcctggccacattgcacacttaccgagggcggctctcctatctgcctgcaaccgttgaaccagcgagcccgacgcccgctcatagcttgcctagagctaagagcgagttaacactaacccccgaccccgcacctccgatggcccacagtccgcttcacagaagcgtgtccgacctgccactgccactgcctcagcccgcactagcctcaccagggtcaccggagcctctccctatcctgtccttgaatggaggaggtccagagctcgccggagattgggggggcgctggtgatgccccattgagccccgatccccttctcagcagccccccgggcagccctaaggcggctctgcattcccctgtctcagagggagccccagtaattcccccttcatcaggactgccactgcctacccccgatgccagagtcggtgcatccacctgcggccctccagatcacctgctgccgcccctgggaacgcccctccctccggactgggtgaccctggagggcgattttgtcctgatgctggcgatatcaccatcccatcttggcgccgatctggtggctgccccccacgccagattcgacgatggtctggtgcacctctgttgggtaagatcagggatctctcgagccgccttgctgcgactgtttctggccatggaacgcggatcacatttttcactcggttgtcctcaacttggatatgccgccgcacgagccttccgtttggagccgctgaccccaaggggggtattgactgtggacggagaacaggtcgaatacggccctctccaggctcagatgcacccaggaatagcgagaggccgaacacagacacccgccctccccgccgcgccggcgctatatgggaggcagccaggcgctgcccatggtctccaacctgtgtgtcagggtgcagcgctcttcttccacaactcgtggctgtgggggtcacaagatctcttccgaatcgtgctgactgaagctgtgggcggctag

SEQ ID NO: 295161 - DNA, 1965 bp, Artificial Sequence
  derived and/or modified sequence
atgaacgggcatctggaagccgaagaacagcaggaccagaggccggatcaagagttaaccggatcatggggccacggaccacggagcaccctggttagagcaaaagccatggctccccctcccccacccctggctgccagtacacctctgttgcacggtgaatttggctcataccctgcacgcgggccaaggtttgctctaacattgacctcccaagcccttcatattcagcgtcttagaccaaagccagaagcccgcccaagggggggcttggtccccctagctgaagtgagcgggtgttgcacattgagatcccggtccccgagcgactcagctgcttacttctgcatatatacatacccccggggtaggcggggagccaggaggcgagcaacacggactttccgggctgatggagccgctacatatgaggaaaaccgagctgaggctcaacggtgggcgactgcccttacctgtttgctccgcgggctgccactccctggtgacggggagattacacccgacttgctgccccgtcctcctcgccttctgctccttgttaaccccttcggaggccgcggccttgcttggcagtggtgtaagaaccacgtcctccccatgatcagcgaagcaggcctgagtttcaatctgattcagactgaaagacaaaaccatgcccgggaattagtccagggcctatccctttccgagtgggacgggatcgtcaccgtgtctggcgatggactcttgcacgaggtactgaatggcctgctggatcggccagattgggaagaagctgtgaagatgccagtggggatcctgccctgtggctctggaaatgccctggccggagcagttaatcagcacggaggatttgaaccagcattgggattggacctactcctcaactgtagtctgttgctgtgcagggggggagggcaccccttagacctgttatctgttaccctggcctctggttccagatgtttcagttttttgagtgtcgcctggggattcgtttcagacgtggacattcagtccgaacggtttcgggccttggggtccgctcgtttcacacttggcacagtcctcgggctggcaactcttcatacataccgtggccgactgagttacctgcccgccaccgtggaaccagcatcccctactcccgctcacagcttaccccgcgcaaaatcggagctaactcttactcccgaccccgcccctcccatggcccattcccccctccacaggtccgtttccgatctgcccttacccctaccccagcctgcattagcttctcctggttcaccggaaccccttcctattctgagtctgaatgggggcggtcctgaactggctggggactgggggggggctggagatgcacccctcagtccagaccccctactgagctcacccccaggcagtccaaaggcggctttgcactcacccgtgtccgaaggggcgcccgtaatccctccgagtagtggtttgccgctgcccactccagatgctcgcgtgggcgcgtccacttgcggtccacctgaccatctgcttcctcccctgggtacgccgctgccaccagactgggtgactctcgaaggcgattttgttcttatgctggccatttccccaagccatctcggcgcggatctggtggctgcgcctcacgcgcgttttgacgacggactcgtgcacctgtgttgggttagatctgggattagccgggctgcactgctgcgattattcctggctatggagcggggtagccacttcagccttggctgcccacagctgggctatgctgccgcaagggcttttaggctggagcctttgacacccagaggagtactgaccgtggacggtgagcaggtcgaatacggacccttgcaggctcaaatgcacccaggaattgggaccttgctaacggggcctcccggctgtcccggcagggaaccatag

SEQ ID NO: 295162 - DNA, 1965 bp, Artificial Sequence
  derived and/or modified sequence
atgaatggccacctggaggccgaggagcagcaggaccagaggccagaccaggagctgaccggctcctggggccacggccccaggagcaccctggtgcgggccaaggccatggcccctcctcctccacccctggccgccagcacccccctgctgcacggggagtttggcagctacccagcccggggccccaggtttgccctgaccctgaccagccaggccctgcacatccagaggctgcggcccaagccagaggcccggccccggggcggcctggtgcccctggccgaggtgtctggctgctgcaccctgcggagccgcagccccagcgacagcgctgcctacttctgcatctacacctacccccggggccggcggggggccaggagaagagccaccaggaccttccgggcagatggagctgccacctatgaagaaaatagagctgaggcccagcgctgggccacagccctgacctgcctgctgcggggcctgcccctgcctggagatggagagatcaccccagacctgctgccccggcccccccggctgctgctgctggtgaacccctttggaggccggggcctggcctggcagtggtgcaagaaccacgtgctgcccatgatcagcgaggccggcctgtccttcaacctgatccagacagagcggcagaaccacgcccgggagctggtgcagggcctgagcctgtctgagtgggatggcatcgtgacagtgtctggagatggcctgctgcacgaggtgctgaatggcctgctggacagaccagactgggaggaggccgtgaagatgcctgtgggcatcctgccctgtggcagcggaaatgccctggccggggctgtgaaccagcacggcggctttgagcccgccctgggcctggacctgctgctgaactgcagcctgctgctgtgccggggcggcggccaccccctggacctgctgtctgtgaccctggccagcggcagccgctgcttctccttcctgtctgtggcctggggctttgtgtctgatgtggacatccagagcgagcgcttccgggccctgggcagcgcccgcttcaccctgggcaccgtgctgggcctggccaccctgcacacctaccggggccgcctgagctacctgcctgccaccgtggagcccgccagccccaccccagcccacagcctgccccgggccaagtctgagctgaccctgaccccagaccctgccccacccatggcccacagccccctgcacaggtctgtgtctgacctgcccctgcccctgccccagcctgccctggccagccctggcagccctgagcccctgcccatcctgagcctgaatggaggcggccctgagctggccggggactggggcggcgctggagatgcccccctgagcccagaccccctgctgagcagccccccaggcagccccaaggccgccctgcacagccctgtgtctgagggcgcccctgtgatcccccccagcagcggcctgcccctgcccaccccagatgcccgggtgggcgccagcacctgtggccccccagaccacctgctgccccccctgggcacccccctgcccccagactgggtgaccctggagggggactttgtgctgatgctggccatcagccccagccacctgggcgctgacctggtggccgccccccacgccaggtttgatgatggcctggtgcacctgtgctgggtgcgcagcggcatcagccgggccgccctgctgcggctcttcctggccatggagcggggcagccacttcagcctgggctgcccccagctgggctatgctgctgcccgggccttccggctggagcccctgaccccccggggcgtgctgactgtggatggagagcaggtggagtatggccccctgcaggcccagatgcaccctggcatcggcaccctgctgaccggccccccaggctgccccggccgggagccctag

SEQ ID NO: 295163 - DNA, 1884 bp, Artificial Sequence
  derived and/or modified sequence
atgaatggccacctggaggccgaggagcagcaggaccagaggccagaccaggagctgaccggctcctggggccacggccccaggagcaccctggtgcgggccaaggccatggcccctcctcctccacccctggccgccagcacccccctgctgcacggggagtttggcagctacccagcccggggccccaggtttgccctgaccctgaccagccaggccctgcacatccagaggctgcggcccaagcacagcgctgcctacttctgcatctacacctacccccggggcagaagaggagcccggcggcgggccaccaggaccttccgggcagatggagctgccacctatgaggagaacagagctgaggcccagcgctgggccacagccctgacctgcctgctgcggggcctgcccctgcctggagatggagagatcaccccagacctgctgcccaggcctccccggctgctgctgctggtgaacccctttggaggccggggcctggcctggcagtggtgcaagaaccacgtgctgcccatgatcagcgaggccggcctgtccttcaacctgatccagacagagcggcagaaccacgcccgggagctggtgcagggcctgagcctgtctgagtgggatggcatcgtgacagtgtctggagatggcctgctgcacgaggtgctgaatggcctgctggacagaccagactgggaggaggccgtgaagatgcctgtgggcatcctgccctgtggcagcggaaatgccctggccggggctgtgaaccagcacggcggctttgagcccgccctgggcctggacctgctgctgaactgcagcctgctgctgtgccggggcggcggccaccccctggacctgctgtctgtgaccctggccagcggcagccgctgcttctccttcctgtctgtggcctggggctttgtgtctgatgtggacatccagagcgagcgcttccgggccctgggcagcgcccgcttcaccctgggcaccgtgctgggcctggccaccctgcacacctaccggggccgcctgagctacctgcctgccaccgtggagcccgccagccccaccccagcccacagcctgccccgggccaagtctgagctgaccctgaccccagaccctgccccacccatggcccacagccccctgcacaggtctgtgtctgacctgcccctgcccctgccccagcctgccctggccagccctggcagccctgagcccctgcccatcctgagcctgaatggaggcggccctgagctggccggggactggggcggcgctggagatgcccccctgagcccagaccccctgctgagcagccccccaggcagccccaaggccgccctgcacagccctgtgtctgagggcgcccctgtgattcctcccagcagcggcctgcccctgcccaccccagatgcccgggtgggcgccagcacctgtggccccccagaccacctgctgccccccctgggcacccccctgcccccagactgggtgaccctggagggggactttgtgctgatgctggccatcagccccagccacctgggcgctgacctggtggccgcccctcatgccaggtttgatgatggcctggtgcacctgtgctgggtgcgcagcggcatcagcagagctgccctgctgcggctcttcctggccatggagcggggcagccacttcagcctgggctgcccccagctgggctacgccgccgcccgggccttccggctggagcccctgaccccccggggcgtgctgactgtggatggagagcaggtggagtatggccccctgcaggcccagatgcaccctggcatcggcaccctgctgactggacctcctggctgccccggccgggagccctag

SEQ ID NO: 295164 - DNA, 2286 bp, Artificial Sequence
  derived and/or modified sequence
atgattggctgcctgcacgcccgggtgtctggccccctgtgggatgctggcctgtgcccagccagcagccgcagcgcccacacctgcctgagcctgtctgtgtctgatgcccctgtgtccccagccacagccccccactgcctgctgctgagcacagccccagccccaccctgcccctgccacggcgtgctgaacagccaccccttcagcccccccttcccccagaggccagaccaggagctgaccggctcctggggccacggccccaggagcaccctggtgcgggccaaggccatggcccctcctcctccacccctggccgccagcacccccctgctgcacggggagtttggcagctacccagcccggggccccaggtttgccctgaccctgaccagccaggccctgcacatccagaggctgcggcccaagccagaggcccggccccggggcggcctggtgcccctggccgaggtgtctggctgctgcaccctgcggagccgcagccccagcgacagcgctgcctacttctgcatctacacctacccccggggccggcggggggccaggagaagagccaccaggaccttccgggcagatggagctgccacctatgaagaaaatagagctgaggcccagcgctgggccacagccctgacctgcctgctgcggggcctgcccctgcctggagatggagagatcaccccagacctgctgccccggcccccccggctgctgctgctggtgaacccctttggaggccggggcctggcctggcagtggtgcaagaaccacgtgctgcccatgatcagcgaggccggcctgtccttcaacctgatccagacagagcggcagaaccacgcccgggagctggtgcagggcctgagcctgtctgagtgggatggcatcgtgacagtgtctggagatggcctgctgcacgaggtgctgaatggcctgctggacagaccagactgggaggaggccgtgaagatgcctgtgggcatcctgccctgtggcagcggaaatgccctggccggggctgtgaaccagcacggcggctttgagcccgccctgggcctggacctgctgctgaactgcagcctgctgctgtgccggggcggcggccaccccctggacctgctgtctgtgaccctggccagcggcagccgctgcttctccttcctgtctgtggcctggggctttgtgtctgatgtggacatccagagcgagcgcttccgggccctgggcagcgcccgcttcaccctgggcaccgtgctgggcctggccaccctgcacacctaccggggccgcctgagctacctgcctgccaccgtggagcccgccagccccaccccagcccacagcctgccccgggccaagtctgagctgaccctgaccccagaccctgccccacccatggcccacagccccctgcacaggtctgtgtctgacctgcccctgcccctgccccagcctgccctggccagccctggcagccctgagcccctgcccatcctgagcctgaatggaggcggccctgagctggccggggactggggcggcgctggagatgcccccctgagcccagaccccctgctgagcagccccccaggcagccccaaggccgccctgcacagccctgtgtctgagggcgcccctgtgatcccccccagcagcggcctgcccctgcccaccccagatgcccgggtgggcgccagcacctgtggccccccagaccacctgctgccccccctgggcacccccctgcccccagactgggtgaccctggagggggactttgtgctgatgctggccatcagccccagccacctgggcgctgacctggtggccgccccccacgccaggtttgatgatggcctggtgcacctgtgctgggtgcgcagcggcatcagccgggccgccctgctgcggctcttcctggccatggagcggggcagccacttcagcctgggctgcccccagctgggctatgctgctgcccgggccttccggctggagcccctgaccccccggggcgtgctgactgtggatggagagcaggtggagtatggccccctgcaggcccagatgcaccctggcatcgcccggggccgcacccagaccccagccctgcctgctgccccagccctgtatggccggcagcccggggccgcccacggcctgcagcctgtgtgccagggcgccgccctcttcttccacaacagctggctgtggggcagccaggacctcttcagaattgtgctgacagaggccgtgggcggctag

SEQ ID NO: 295165 - DNA, 1965 bp, Artificial Sequence
  derived and/or modified sequence
atgaacggccacctggaggccgaggagcagcaggaccagcggcccgaccaagaattaaccgggtcctggggccacggtcctagatctaccctggtgcgagctaaggctatggccccaccaccgcccccacttgccgctagtaccccccttctgcatggcgaattcggcagttaccccgcccggggcccgagatttgctctgaccttaacctcgcaagccttgcatatacagcggcttagaccgaaaccggaagctagacctcgggggggtctcgtcccactggcagaagtgtccgggtgctgtacactgaggagtcggtccccatcagattctgcggcatacttctgtatttatacctacccaagaggtaggaggggagcccgaagacgcgccacccgcacgtttagggctgatggggcagccacctacgaagagaaccgcgccgaagcacagagatgggccacagctctcacttgcttacttcggggactaccactgcccggggacggagaaattactcccgacctgctccctagacctcctcggctactcctgctcgttaaccctttcggagggcgtggactggcctggcagtggtgcaagaatcatgtgctgcccatgatctcagaggctggtctgtcctttaacctaatccaaactgagcggcaaaaccacgctcgggagctcgtacagggtctgagcttgtccgaatgggacgggattgttaccgtcagcggagacggtctccttcacgaggtgctcaacggactgctcgaccggcccgactgggaagaggccgtgaagatgccggtgggcattctgccatgcggtagtggtaacgccctggccggggcagttaatcaacacggtggatttgagcccgctctgggcctagacctgcttctcaattgctcattactgctgtgtcgcggcggcggccatcccttggacctgctgagcgtcacattggcgtctggtagcaggtgcttcagctttctttctgttgcctggggcttcgtgtcagatgtggacattcagtccgagcgattcagagccctgggatccgctaggttcaccttggggaccgtgctgggtctcgctactctgcacacctatcggggcaggctgtcctacctgcctgcaaccgtagaaccagcctcccctacacctgcgcattcactccccagagctaaatcagagttgactttgactcctgaccccgcccccccaatggcacattcaccacttcacagatctgttagtgatctgccccttcccctcccccagccagcacttgcttcaccagggagccccgaacctttacccatcctgagcctgaacggtggcggaccagaactagccggagactgggggggcgccggtgacgctcccctgagcccggaccccctgctgagctctcccccaggatcccctaaagcagctcttcattccccggtgagcgagggggcccccgtcatcccgccaagctctgggttaccgctgcctacgccggacgccagggtcggcgctagcacctgtggcccgccagatcatttgttgcctccactggggacacctttgccacccgactgggtgaccctggagggagactttgttctgatgctggcaatttcacctagccacctgggtgctgatctagtggccgccccgcacgctcggttcgacgacggtctggtgcacctctgctgggtgcgtagcgggatttcacgagccgcgctcctaaggctgttccttgccatggagcgcggaagtcactttagtctagggtgcccacaattaggttacgctgccgcacgcgctttccggctagagccgcttactccccgtggcgtgctgactgtggacggagaacaggtggagtacggccctttgcaggcccagatgcatcccggaatcggcacccttctcacagggcctcccggatgtcccggaagggagccctag

SEQ ID NO: 295166 - DNA, 1884 bp, Artificial Sequence
  derived and/or modified sequence
atgaacggccacctggaggccgaggagcagcaggaccagcggcccgaccaagagcttacaggttcctggggtcatgggccacgctctacgctggtgagagctaaagctatggcccctccccccccgcccctggccgccagcactcctctcctccacggcgagtttgggtcttaccctgcgagaggacccagattcgcactgactctgacatcacaggccctacatatacaacgcctccgccccaagcactcagcagcttacttctgcatctacacctatccccggggacgccgcggcgcccggaggcgcgcaacccgtactttccgggccgacggggccgctacatatgaggagaatagggccgaagcccaaaggtgggccactgccctgacttgcctgcttcggggcctgcccctcccaggggatggtgagattacacctgatctcctgcctcggccacccaggctcctgctactggtgaatccattcgggggacgggggctcgcctggcaatggtgtaaaaatcacgtcctgccgatgatctcagaagccgggttaagctttaacctcatccagaccgaacggcagaaccatgctagggagctggtgcaaggcctgagcctgtctgagtgggacggcattgtgactgtaagcggagacgggcttcttcacgaggtgctgaacggcctcctggaccggccagactgggaggaggcagtcaagatgccagtgggtatcctgccatgtggtagcggcaatgcactggccggggcggtgaaccagcacgggggatttgagccagcccttggactcgacctgctacttaactgctccttactgctgtgtagaggcggcgggcaccccctcgaccttctcagtgtaacattggcatcgggctcccggtgcttctcctttctgtctgttgcttggggtttcgtgtctgatgtggatatccagtctgaacgtttccgagcccttggatctgcccggttcacactcggaactgtgctgggccttgccacccttcatacttatcgtggtaggcttagctatcttcccgcaaccgtagaacccgcgtcccctacccctgctcactctctgccaagagccaaaagcgagcttacattaacaccggacccagccccgccgatggcacattcaccgttgcaccgatccgtttcagacctgccactcccactgccccagccagctctggcctccccaggttctcccgagccattgcctattctgtccttgaatggcggagggcccgagctcgcaggtgattggggaggagccggcgatgctcccctgagtcctgaccccctgctgagttcaccaccgggatcgcctaaggccgctctgcatagccccgtaagcgaaggggccccagttattccaccgtcatcggggctcccgcttcccaccccagatgctcgcgtgggggctagcacgtgtggcccacctgaccacttattgccacccctgggcacacccctgccacccgattgggtcacactggaaggcgattttgtgctcatgttggccatttctccatcgcacctgggtgccgatctggtcgccgccccccacgcccggttcgatgatggcttggttcatctgtgctgggtcaggagtggcatctctcgcgcagcactgctgagactgttcctcgcaatggagaggggctctcactttagcttaggatgtccccagctgggatacgcggccgctcgggcatttagactggagcctctgactcctaggggggttcttacggtggatggcgagcaagtggagtacggcccattacaggcacaaatgcaccccggcattggaacgttactgacaggacctcctggttgcccagggcgcgaaccgtag

SEQ ID NO: 295167 - DNA, 2286 bp, Artificial Sequence
  derived and/or modified sequence
atgatcggctgcctgcacgcccgggtgagcggccccctgtgggacgccggactgtgccctgcttctagcagaagcgcacacacctgcttgagcctcagtgttagcgacgcccctgtatctccagctaccgcgccccactgtctgctactgtcaaccgcaccagccccaccctgtccgtgtcacggggttcttaactcacatccctttagccctccgttcccgcagagaccggatcaggagttgacagggagttggggccatggccctaggtctacattagtacgggccaaagcgatggcccctccacccccacctctagctgcatctacgccgctgctccacggagagttcggaagttatcccgcccggggtccccggtttgccctgaccctcacatctcaagctctccatatccagcgactacggcccaagcccgaggctagacccagaggaggcctggttcctctcgccgaagtgtcggggtgctgcacactgcgatccagatcaccttctgatagcgctgcctacttttgtatatacacatatccccgtggccgccgcggcgcgcgccgtcgggcaactcggactttcagggcagatggtgcagctacctatgaggaaaacagagctgaggcccagcggtgggcaacagccctgacgtgcctcttgcgcggcctgcccctccctggggacggggaaatcacgcctgatcttctgcctcgccccccgagactgctcttgctggtcaacccctttgggggtcgcgggctcgcctggcagtggtgtaagaaccacgtgttgcccatgatttccgaggccgggctgagcttcaacctcattcagaccgaaagacagaatcacgctcgcgagctggtgcagggtctctcactctcagagtgggacggcattgtcaccgtaagcggcgacggcctgctacacgaagtgctgaatggcctgctcgaccgccctgactgggaggaggcggtgaaaatgcccgtggggatcctgccctgtggtagcggaaacgccctcgccggcgcggtgaatcagcatggaggattcgagccagcgctcggattggatctgttattgaactgcagtctgcttctttgtcggggtggtggtcaccctctggatctgttgtccgtgaccctcgccagtggaagtcggtgcttctcttttttgagcgtagcatggggcttcgtctctgacgtagatattcagagcgagagatttcgggcgctgggctcggccagatttaccctcggcactgtgctgggcttggctactctgcacacataccgtggaagactaagctatctgcctgctacagtggagcctgccagccctactcctgcacactccctgccacgggccaagagtgagttgactctgacacccgatcccgcccccccaatggctcactcccccctccatagatcggtgagcgacctgccattgcctctgcctcagcctgctctggccagcccaggcagtcctgagccgctgcctatcttaagtctcaacgggggtggaccagagctcgccggtgactggggcggggcgggtgacgcgcccctgagcccagaccccctgctctcctctccaccaggatccccaaaggcagcacttcattcccccgtatccgagggcgcgcctgtgattccaccttcttcaggattaccactacccactcccgacgcccgtgtgggcgcatctacatgcggaccccctgaccacctcttaccacccttgggcacccccctgccacctgactgggttaccttggagggagatttcgtgctgatgctcgcaatatcacctagccacctaggtgcagaccttgtggctgcccctcatgcccgtttcgatgatggcttggtacatttgtgttgggtgcgttccggcatttcacgcgcagccctcctgcgactgttcctcgcaatggaacgtggctcacacttttctcttggatgtccgcagctcggctacgcagcagcccgggccttccgcctggaaccccttacgcctaggggcgttctcacagtggacggggagcaggttgagtacggacccctgcaggcgcaaatgcatcctgggatcgccaggggacggacacaaaccccagctctacccgctgccccggcactgtatggaaggcaacccggcgctgcacatggacttcagcctgtctgtcagggtgctgcactcttctttcataatagctggctttggggatcccaggacctgtttcggattgtgctgaccgaggccgtcggaggctag

SEQ ID NO: 295168 - DNA, 1965 bp, Artificial Sequence
  derived and/or modified sequence
atgaacggccacctggaggccgaggagcagcaggaccagcggcccgaccaagaactaactggcagctggggccacggaccacggagtactctcgttcgtgccaaggctatggccccgccccctcccccactggctgccagcaccccacttctgcacggtgaatttggcagctatcctgcccgcggcccacgttttgcgctcaccctaacaagccaggctctccacattcaacgcctaaggcccaagcctgaggcaaggccaaggggcggcctggtcccactcgcagaagtgtcggggtgttgcactctgagatctcggtctccgagcgattccgctgcctacttctgcatctatacctatccaagaggcaggcgcggagcaaggcgaagggccaccaggacctttagggccgatggagccgctacttacgaggagaacagagctgaggcccagcgctgggctactgctctcacttgtctacttcgcggccttccactgcccggggacggggaaatcacgcccgacctgcttccccgaccacctagactcctgctcctcgtgaatccatttggcggcagaggcttagcctggcagtggtgcaagaaccacgtgctcccaatgatctcagaagccgggctgtcattcaaccttatccaaaccgagaggcagaatcacgcaagagaactggtccaaggactgtcactgtccgagtgggacggaattgtgaccgtaagtggtgacggactgcttcatgaggtcctgaacggacttctggacagacccgattgggaagaagccgtgaagatgcccgtcggcatcctgccatgtggctccggcaatgccctcgcaggcgccgtgaaccagcacggtggatttgagcctgctctcggcctcgacctgcttctaaattgctctttgctgctctgtagagggggtggtcaccccctcgacctgctgtccgtgaccctagcctcaggatcccgctgctttagcttcctttcagtagcctggggtttcgtatccgacgtcgacatccagagtgaaagatttcgcgctctcgggagcgcccggttcacactggggactgtgctgggcctggccaccttgcacacctaccgcggtcggctgtcctacctgcctgccacggttgaaccagcatcaccaactccagcccattccctccctagggcaaagtctgagctcacactgactcctgaccctgcaccaccaatggcccatagtcccctacacagaagcgtctcagatctccccctgccattaccacaaccagcactggcaagtcctggtagtccagaacctttacctatcctctcactgaatgggggaggtcccgaattggcgggagactggggaggcgctggtgacgccccccttagccccgatcctctgctcagctcgcctcctggatctcctaaggccgctctgcatagcccagtttccgaaggtgcccccgtgatcccaccatcaagcggcctgccattgcctacccccgatgcccgtgtgggcgccagtacatgcggtccccccgatcacctcctcccccccctcggtaccccgctcccacccgactgggtgacactagagggagacttcgtcctcatgctagcaatttcaccctcgcatttaggggccgatctggtggctgccccgcacgcccgatttgacgatggcctggtgcacttgtgctgggtcagatccggtattagtcgggcagctcttctgcgccttttcctcgcaatggagagaggctcccacttttctctcggctgcccccagctcggatatgctgccgctagggccttcagactggagccgctgacgccgagaggtgtccttacagtggacggtgaacaggttgagtacggcccactgcaagcccaaatgcatccagggattggaactttactcacaggccctccggggtgtcctggacgcgagccctag

SEQ ID NO: 295169 - DNA, 1965 bp, Artificial Sequence
  derived and/or modified sequence
atgaacggccacctggaggccgaggaacaacaggatcaacgcccagatcaggagctgactgggtcatggggccatgggcctcgatctacattagtccgagccaaagctatggccccaccacctccccctctggcagcctccacacctttactgcacggcgagttcggaagttatcccgctaggggtccacggtttgctctcactctgacgtctcaggcactccacatccagaggctaagacctaaacccgaggccaggccccgtgggggattagttcccctcgccgaagtgtccggctgctgcactctcaggtctcggagcccgtcggactctgccgcttatttctgcatctacacatacccaagagggagacgaggggctcgcaggcgggctacacgcaccttcagggctgacggggctgccacatacgaagaaaatagagctgaagctcagagatgggccactgcactcacttgcctattgcgtgggctgcccctgcccggagacggggaaatcacacctgacctgctgccacgccctccgcgtctccttctgctggttaaccctttcgggggaagggggctggcttggcagtggtgtaaaaaccatgtgttgcccatgataagcgaggctggcctctcatttaacctaatccagaccgagaggcagaatcatgcccgagagttggtgcagggactgtcactgtctgagtgggacgggatcgtgacagtatctggcgatggcctcttacatgaggtgctcaatggacttttagatcgacctgattgggaggaggccgttaaaatgcctgtgggcattctcccttgtggcagtgggaatgctctcgctggtgccgtgaaccagcatggaggtttcgaacccgcattaggtctggacctccttctgaactgcagtctgcttctatgtcggggaggcggacacccattggatctcctgtcagtcaccctggcgagcgggtccaggtgtttcagtttcttgtcagtggcttggggctttgtgtcagacgtcgatatccagtccgagcggttccgggcactggggagcgctagattcaccctaggtactgtcctcggtcttgccacacttcacacgtatcggggtcgcctttcctatctgccggctacagttgagccagcctcccctacacctgctcattccctgccccgtgccaagtctgaactgaccctgacacccgatcccgctccacctatggcacattcaccgctgcataggtctgtatcggacctgcctctccccctgcctcaacctgcattagcctctccgggaagcccagaacccctaccaatccttagcctcaacggtggcggaccagagttggcaggggactgggggggagcaggcgacgccccactgagtcctgaccccctgctgagttctccacctggatcacctaaggcggctctacacagccctgtttcggagggcgcacctgtgattcccccatccagtggtttgccgttgcccacccccgatgcgagggtcggagccagcacctgcgggcctcccgaccatttgctgcctccactcggcactccgctcccacccgactgggtgaccctggagggcgactttgttcttatgctggctatcagccctagccatctgggcgcagatcttgtggcagcccctcacgcgcgttttgatgatggtttggtgcacctgtgttgggtcaggtctgggattagtcgggcagccctgctgcggttgtttctggcaatggagagaggaagccatttctctcttggctgcccacagctgggttacgccgctgccagagccttccgattggaacctctgacccctagaggcgtgctgacagtggatggggaacaggtggaatacgggcctcttcaggcacagatgcaccctggaattgggaccctgctgaccggtcccccaggctgtcccggtcgtgagccttag

SEQ ID NO: 295170 - DNA, 1884 bp, Artificial Sequence
  derived and/or modified sequence
atgaacggccatcttgaagcggaagagcagcaggaccagcggccagaccaggaactcactggtagctgggggcatggaccaagatctaccttggtgcgcgctaaagctatggccccaccgcctccccctctagctgcctccacaccactgttgcatggtgagtttggatcttatcctgcgagaggcccaagattcgccctcactctaacttcacaggcactgcacatacaacgcctccgcccaaaacatagtgctgcctatttctgcatctacacatacccccgaggacgtcgtggggctcgacgcagggcaactcgcactttccgcgctgacggtgctgcgacttacgaggagaacagagctgaagcacagcgctgggctacagcgctgacatgcctacttaggggcctgcccttgccgggtgacggggaaataacaccggacttactccccaggccacctaggctccttttactcgtgaatccgtttggtggacggggtctcgcctggcagtggtgtaagaatcatgttcttcccatgatcagcgaggctggcctgagcttcaacttgattcagacggagcggcagaatcatgctcgggagctcgttcaggggctgtcattaagcgagtgggatggcatagtcactgtctctggcgacggtttgctgcatgaagtgctgaacggcctgctggatcggcctgactgggaagaagcagtaaaaatgcccgtgggaatattaccttgtggaagcggcaatgcactggccggtgccgtgaaccaacatgggggtttcgagcccgcactcggtctggacctccttctgaactgcagcttgttgttgtgtcggggaggagggcacccacttgatctcctgtccgtaaccctggcctcagggagtagatgcttctcctttttgtcagtggcatggggttttgtgagcgatgtggacattcagtccgagcgcttccgggctctgggaagcgctagatttaccctgggcacagtgcttggactcgccactcttcatacctaccggggaaggttatcctacctgccagccactgtcgaaccggctagccccaccccggctcactctttgccccgagctaagtctgaactgacactgactcccgacccagccccacccatggctcactcacctctccatcggtctgttagcgatttgccactccctctgcctcaaccggcattggcatcacctggctcccccgaaccgttacctatcctgagcctcaatgggggaggcccagagcttgctggcgattgggggggagcaggcgatgcacccctgtcacctgatccccttctgtctagcccacctggaagccccaaggctgccctacactcgcccgtgagtgaaggtgctccagtcatcccacctagctctggtctccctttgcccacgcccgacgcccgtgtgggagcttcgacatgcggtccaccagaccatcttctcccaccactgggcaccccacttccacctgactgggtcacactggaaggtgacttcgtcttgatgctggccatctctccctcacacttgggcgctgacctggtggcggctcctcacgccagatttgacgatggcttagtccatttgtgctgggtgcggtcaggcatctctcgcgctgctctgctgaggctctttctggccatggaacggggttctcatttttcactgggctgcccacagctggggtacgctgccgcacgcgctttcaggttagaacctctgacccccagaggggtgcttacggttgacggcgagcaagtggagtacgggccactgcaggcccaaatgcaccccggaatcggaacacttctgactggacctcccggatgccctggcagagagccctag

SEQ ID NO: 295171 - DNA, 2286 bp, Artificial Sequence
  derived and/or modified sequence
atgatagggtgcctccacgctcgcgttagtggcccactttgggacgccggtttgtgtcctgcaagcagccgatctgctcacacttgcttaagcttgtctgtttctgacgctcccgtctctcccgcaacagccccacactgtcttcttctttcgacggcacccgcacccccatgcccttgccatggtgtcctcaattcccaccccttttccccgccattcccccagcgaccggatcaggagttgactggtagctggggtcacgggcctcggtccacactggtgcgcgcaaaggcgatggcaccgcctccgcctccactcgccgcttctacacccctgctccatggggaatttggttcctaccctgccaggggccctcgctttgctcttactcttacatcccaagccctccacatacagcgcttgcgtcctaagcctgaggctaggcctcggggtggattggtgcctttagcagaagtttccggctgctgcaccctgcgttcaaggtcaccctcagatagcgcagcttatttttgtatttacacataccccagaggcaggcggggtgcacgccgaagggcaaccagaacatttagagctgacggagcagcgacatacgaagaaaatagagcagaggcgcagaggtgggccaccgcacttacttgtctgttgagaggacttcctctcccaggcgacggggaaataacccctgatctgcttccgagacctccacggctgctcctcctggtgaacccttttggaggtcgcggtctggcctggcaatggtgcaagaaccacgttctccccatgatctctgaagcaggactatcctttaacctgatccagacagagcgccagaatcatgcaagggagctagtccaggggttaagcctcagtgagtgggatggaattgtgaccgtttctggggacgggttactgcacgaggtgcttaacggcttgctggatcgcccagactgggaagaagctgtgaagatgcctgtagggatccttccttgtgggtctggtaacgccttggcgggtgccgtgaaccagcacggtggattcgaacccgcactcggactagacctactgctcaattgttccttactcttgtgcaggggaggcggacaccctcttgatcttctgtcggtcacccttgcatctggaagccggtgtttctccttcctgtcagtggcttggggctttgtatccgatgttgatatccaatctgagaggtttcgagccctgggaagcgctagattcaccctgggtaccgtgttaggcttagccaccttacacacttatcgcggtcgtctttcctacctcccagctaccgtggaacccgcttcccctacaccagctcattccctacctagagctaagtcagagctgaccttgaccccagaccctgccccaccaatggcccatagtccattgcaccggtccgtctcagaccttcctctgcctttaccccagcctgccctggcctctccgggtagccccgagcccctgcccatcctgtccctaaacggaggaggacctgagctcgcaggagactggggaggcgctggtgacgcaccgctctctccagaccccctgctgagcagtccccctggtagcccaaaggctgctctgcatagcccggtctctgaaggggctcccgttattcccccatcctctggcctgcccctgcctacccccgacgcccgtgtgggagctagcacttgcgggcctcccgaccatctattgcccccattggggacacctctgcctcccgactgggtgacactagagggcgacttcgtgctgatgctggcaatttctccttcacaccttggagccgacttggttgccgcacctcacgcacgcttcgatgacggtctggtgcacctctgctgggtgaggagcgggatttctagagccgcacttttaagactattcctggctatggaaagaggcagccatttttccctgggctgtccacagcttggctatgccgcagctagagccttcaggctcgagcctctcactcctcgcggagtgcttaccgtggacggcgaacaggtcgagtatggtcctctgcaggctcagatgcaccctggtattgctcgcggacgtacccaaacaccagcactacctgcagcccctgcgctctacgggagacagcctggtgccgctcatggtctgcagcctgtatgtcagggtgccgcactgttcttccacaattcctggctctggggatctcaggatctcttcaggatcgtgctcacagaagccgttggtggatag

SEQ ID NO: 295172 - DNA, 1965 bp, Artificial Sequence
  derived and/or modified sequence
atgaatggacatctcgaggcagaagagcaacaggaccagcggccagatcaagagctcacaggaagttggggtcatgggccaaggtccacccttgtcagagctaaggccatggctcctccaccaccccctctggcagcctccacccctctgctgcatggtgagtttggttcttatccagcaagaggccctcggttcgcattgacccttacctcccaggcgctgcacattcagaggctgagacccaaacctgaagccagaccacgaggaggcctcgttccacttgccgaggtgagtggatgttgtactcttaggtctcgatctccctccgatagtgctgcatacttttgcatttacacataccctcgagggagaaggggcgctcgaagaagagctaccagaacgtttagggccgatggcgctgctacctacgaagaaaaccgcgctgaggcacagaggtgggccacagcccttacctgccttctacggggtctacctctgccgggtgatggcgagattacacctgacttgctgcccaggccccctaggctgcttctcttggtgaaccccttcggagggagaggactggcctggcagtggtgcaaaaatcatgtgttgccaatgatctccgaggccggtctctctttcaatctaatacagaccgagcgccaaaaccacgccagagagctcgttcagggactgtccctgtccgaatgggacggaattgtgaccgtttcaggcgacggccttctgcacgaggtccttaatggcctgttggatcgccctgattgggaggaggccgttaaaatgccagtaggtattctgccctgcggaagcgggaacgctctggccggagctgtgaatcagcacggagggttcgaacctgccctggggctggacctgctgctcaactgttctctgttactgtgtagagggggtggccaccctctggacctactaagcgttacccttgctagcggcagcaggtgtttttcttttttgtcggtcgcctggggattcgtttcagatgtagacatacagtcagagcgattccgcgcactgggcagtgcaagattcacactcggtacagtactcgggttggcaacactgcacacatatcggggtcggctaagctatttgccggctaccgtagaaccagcaagcccaactccagcgcactccctacccagagctaagtcagagcttaccctgacccccgatccagctccccctatggcacatagtccattacaccgttccgtttccgacctcccactgcccctgccacagccggctcttgccagcccgggatctcctgagccccttcccatattgagtttgaatggcggtggcccagaactagctggcgattgggggggagctggagacgcccctctgtcaccagacccactgttgagcagcccccctggtagccccaaagccgctctccatagtcccgtttctgagggcgctccagtcattcctccaagctccggcctccccctgcccaccccagatgccagagtaggcgcatcgacttgcggtcctcccgatcacctgttgccaccgctcggcacacctttgcccccagattgggttactctggaaggcgatttcgttctgatgctggcaatctccccaagtcacctcggagccgacctggtagcagcacctcacgcaagattcgatgatgggctggtgcatctttgctgggtgcgcagcggcatcagcagggcagccctgctgagattattcctcgcaatggagcgtgggagtcacttcagccttggttgtcctcaattgggatacgccgcagccagggcattccggctcgagcctctgacgccgcgtggggtattaacagtggacggagaacaggtcgagtatggaccactgcaagcacagatgcacccgggtattggtacactattaactggccctcccggatgtcctggaagggagccttag

SEQ ID NO: 295173 - DNA, 2962 bp, Artificial Sequence
  derived and/or modified sequence
cgactgactagccgggcgataacggcagagagcatagagcgcaggaacaagcgcaacgtccaagagggaagggccagcacgtcgggggcctctctggccctacccaggccgtgttctcgatagctttccggaagaaagggatctgggagcgagatgcgtgtagctagcacgatgcgtcgcgcggtgacgctctggcccgacgccgacggcctctcagtggctcccggaggacccggcgggcccagtgttggagagctgaaggtcaggccaggacagtgagacctgactccttgctcctaccagcctactatggcttaagacccagggccagggtcccgttgatgtaacagagcagaggaccagcagatgaatggacaccttgaagcagaggagcagcaggaccagaggccagaccaggagctgaccgggagctggggccacgggcctaggagcaccctggtcagggctaaggccatggccccgcccccaccgccactggctgccagcaccccgctcctccatggcgagtttggctcctacccagcccgaggcccacgctttgccctcacccttacatcgcaggccctgcacatacagcggctgcgccccaaacctgaagccaggccccggggtggcctggtcccgttggccgaggtctcaggctgctgcaccctgcgaagccgcagcccctcagactcagcggcctacttctgcatctacacctaccctcggggccggcgcggggcccggcgcagagccactcgcaccttccgggcagatggggccgccacctacgaagagaaccgtgccgaggcccagcgctgggccactgccctcacctgtctgctccgaggactgccactgcccggggatggggagatcacccctgacctgctacctcggccgccccggttgcttctattggtcaatccctttgggggtcggggcctggcctggcagtggtgtaagaaccacgtgcttcccatgatctctgaagctgggctgtccttcaacctcatccagacagaacgacagaaccacgcccgggagctggtccaggggctgagcctgagtgagtgggatggcatcgtcacggtctcgggagacgggctgctccatgaggtgctgaacgggctcctagatcgccctgactgggaggaagctgtgaagatgcctgtgggcatcctcccctgcggctcgggcaacgcgctggccggagcagtgaaccagcacgggggatttgagccagccctgggcctcgacctgttgctcaactgctcactgttgctgtgccggggtggtggccacccactggacctgctctccgtgacgctggcctcgggctcccgctgtttctccttcctgtctgtggcctggggcttcgtgtcagatgtggatatccagagcgagcgcttcagggccttgggcagtgcccgcttcacactgggcacggtgctgggcctcgccacactgcacacctaccgcggacgcctctcctacctccccgccactgtggaacctgcctcgcccacccctgcccatagcctgcctcgtgccaagtcggagctgaccctaaccccagacccagccccgcccatggcccactcacccctgcatcgttctgtgtctgacctgcctcttcccctgccccagcctgccctggcctctcctggctcgccagaacccctgcccatcctgtccctcaacggtgggggcccagagctggctggggactggggtggggctggggatgctccgctgtccccggacccactgctgtcttcacctcctggctctcccaaggcagctctacactcacccgtctccgaaggggcccccgtaattcccccatcctctgggctcccacttcccacccctgatgcccgggtaggggcctccacctgcggcccgcccgaccacctgctgcctccgctgggcaccccgctgcccccagactgggtgacgctggagggggactttgtgctcatgttggccatctcgcccagccacctaggcgctgacctggtggcagctccgcatgcgcgcttcgacgacggcctggtgcacctgtgctgggtgcgtagcggcatctcgcgggctgcgctgctgcgccttttcttggccatggagcgtggtagccacttcagcctgggctgtccgcagctgggctacgccgcggcccgtgccttccgcctagagccgctcacaccacgcggcgtgctcacagtggacggggagcaggtggagtatgggccgctacaggcacagatgcaccctggcatcggtacactgctcactgggcctcctggctgcccggggcgggagccctgaaactaaacaagcttggtacccgccgggggcggggcctacattccaatggggcggagcctgagctagggggtgtggcctggctgctagagttgtggtggcaggggccctggccccgtctcaggattgcgctcgctttcatgggaccagacgtgatgctggaaggtgggcgtcgtcacggttaaagagaaatgggctcgtcccgagggtagtgcctgatcaatgagggcggggcctggcgtctgatctggggccgcccttacggggcagggctcagtcctgacgcttgccacctgctcctacccggccaggatggctgagggcggagtctattttacgcgtcgcccaatgacaggacctggaatgtactggctggggtaggcctcagtgagtcggccggtcagggcccgcagcctcgccccatccactccggtgcctccatttagctggccaatcagcccaggaggggcaggttccccggggccggcgctaggatttgcactaatgttcctctccccgcgggtgggggcggggaaattcatatcccctgttcgtctcatgcgcgtcctccgtccccaatctaaaaagcaattgaaaaggtctatgcaataaaggcagtcgcttcattcctctc

SEQ ID NO: 295174 - DNA, 2325 bp, Artificial Sequence
  derived and/or modified sequence
cgactgactagccgggcgataacggcagagagcatagagcgcaggaacaagcgcaacgtccaagagggaagggccagcacgtcgggggcctctctggccctacccaggccgtgttctcgatagctttccggaagaaagggatctgggagcgagatgcgtgtagctagcacgatgcgtcgcgcggtgacgctctggcccgacgccgacggcctctcagtggctcccggaggacccggcgggcccagtgttggagagctgaaggtcaggccaggacagtgagacctgactccttgctcctaccagcctactatggcttaagacccagggccagggtcccgttgatgtaacagagcagaggaccagcagatgaatggacaccttgaagcagaggagcagcaggaccagaggccagaccaggagctgaccgggagctggggccacgggcctaggagcaccctggtcagggctaaggccatggccccgcccccaccgccactggctgccagcaccccgctcctccatggcgagtttggctcctacccagcccgaggcccacgctttgccctcacccttacatcgcaggccctgcacatacagcggctgcgccccaaacctgaagccaggccccggggtggcctggtcccgttggccgaggtctcaggctgctgcaccctgcgaagccgcagcccctcagactcagcggcctacttctgcatctacacctaccctcggggccggcgcggggcccggcgcagagccactcgcaccttccgggcagatggggccgccacctacgaagagaaccgtgccgaggcccagcgctgggccactgccctcacctgtctgctccgaggactgccactgcccggggatggggagatcacccctgacctgctacctcggccgccccggttgcttctattggtcaatccctttgggggtcggggcctggcctggcagtggtgtaagaaccacgtgcttcccatgatctctgaagctgggctgtccttcaacctcatccagacagaacgacagaaccacgcccgggagctggtccaggggctgagcctgagtgagtgggatggcatcgtcacggtctcgggagacgggctgctccatgaggtgctgaacgggctcctagatcgccctgactgggaggaagctgtgaagatgcctgtgggcatcctcccctgcggctcgggcaacgcgctggccggagcagtgaaccagcacgggggcccctcctggggtgatagggacccctatatctcccactcagccaaacccacagtcagtcaagtaaatcagcctgcctgtgggatgctcacccccagctcctggacatttttgcctgcctgcttcccagctgtatcccgagcgcccagaactctgcctggcatgggaggcactcaggccttgggcagtgcccgcttcacactgggcacggtgctgggcctcgccacactgcacacctaccgcggacgcctctcctacctccccgccactgtggaacctgcctcgcccacccctgcccatagcctgcctcgtgccaagtcggagctgaccctaaccccagacccagccccgcccatggcccactcacccctgcatcgttctgtgtctgacctgcctcttcccctgccccagcctgccctggcctctcctggctcgccagaacccctgcccatcctgtccctcaacggtgggggcccagagctggctggggactggggtggggctggggatgctccgctgtccccggacccactgctgtcttcacctcctggctctcccaaggcagctctacactcacccgtctccgaaggggcccccgtaattcccccatcctctgggctcccacttcccacccctgatgcccgggtaggggcctccacctgcggcccgcccgaccacctgctgcctccgctgggcaccccgctgcccccagactgggtgacgctggagggggactttgtgctcatgttggccatctcgcccagccacctaggcgctgacctggtggcagctccgcatgcgcgcttcgacgacggcctggtgcacctgtgctgggtgcgtagcggcatctcgcgggctgcgctgctgcgccttttcttggccatggagcgtggtagccacttcagcctgggctgtccgcagctgggctacgccgcggcccgtgccttccgcctagagccgctcacaccacgcggcgtgctcacagtggacggggagcaggtggagtatgggccgctacaggcacagatgcaccctggcatcggtacactgctcactgggcctcctggctgcccggggcgggagccctga

SEQ ID NO: 295175 - DNA, 2881 bp, Artificial Sequence
  derived and/or modified sequence
cgactgactagccgggcgataacggcagagagcatagagcgcaggaacaagcgcaacgtccaagagggaagggccagcacgtcgggggcctctctggccctacccaggccgtgttctcgatagctttccggaagaaagggatctgggagcgagatgcgtgtagctagcacgatgcgtcgcgcggtgacgctctggcccgacgccgacggcctctcagtggctcccggaggacccggcgggcccagtgttggagagctgaaggtcaggccaggacagtgagacctgactccttgctcctaccagcctactatggcttaagacccagggccagggtcccgttgatgtaacagagcagaggaccagcagatgaatggacaccttgaagcagaggagcagcaggaccagaggccagaccaggagctgaccgggagctggggccacgggcctaggagcaccctggtcagggctaaggccatggccccgcccccaccgccactggctgccagcaccccgctcctccatggcgagtttggctcctacccagcccgaggcccacgctttgccctcacccttacatcgcaggccctgcacatacagcggctgcgccccaaacactcagcggcctacttctgcatctacacctaccctcggggccggcgcggggcccggcgcagagccactcgcaccttccgggcagatggggccgccacctacgaagagaaccgtgccgaggcccagcgctgggccactgccctcacctgtctgctccgaggactgccactgcccggggatggggagatcacccctgacctgctacctcggccgccccggttgcttctattggtcaatccctttgggggtcggggcctggcctggcagtggtgtaagaaccacgtgcttcccatgatctctgaagctgggctgtccttcaacctcatccagacagaacgacagaaccacgcccgggagctggtccaggggctgagcctgagtgagtgggatggcatcgtcacggtctcgggagacgggctgctccatgaggtgctgaacgggctcctagatcgccctgactgggaggaagctgtgaagatgcctgtgggcatcctcccctgcggctcgggcaacgcgctggccggagcagtgaaccagcacgggggatttgagccagccctgggcctcgacctgttgctcaactgctcactgttgctgtgccggggtggtggccacccactggacctgctctccgtgacgctggcctcgggctcccgctgtttctccttcctgtctgtggcctggggcttcgtgtcagatgtggatatccagagcgagcgcttcagggccttgggcagtgcccgcttcacactgggcacggtgctgggcctcgccacactgcacacctaccgcggacgcctctcctacctccccgccactgtggaacctgcctcgcccacccctgcccatagcctgcctcgtgccaagtcggagctgaccctaaccccagacccagccccgcccatggcccactcacccctgcatcgttctgtgtctgacctgcctcttcccctgccccagcctgccctggcctctcctggctcgccagaacccctgcccatcctgtccctcaacggtgggggcccagagctggctggggactggggtggggctggggatgctccgctgtccccggacccactgctgtcttcacctcctggctctcccaaggcagctctacactcacccgtctccgaaggggcccccgtaattcccccatcctctgggctcccacttcccacccctgatgcccgggtaggggcctccacctgcggcccgcccgaccacctgctgcctccgctgggcaccccgctgcccccagactgggtgacgctggagggggactttgtgctcatgttggccatctcgcccagccacctaggcgctgacctggtggcagctccgcatgcgcgcttcgacgacggcctggtgcacctgtgctgggtgcgtagcggcatctcgcgggctgcgctgctgcgccttttcttggccatggagcgtggtagccacttcagcctgggctgtccgcagctgggctacgccgcggcccgtgccttccgcctagagccgctcacaccacgcggcgtgctcacagtggacggggagcaggtggagtatgggccgctacaggcacagatgcaccctggcatcggtacactgctcactgggcctcctggctgcccggggcgggagccctgaaactaaacaagcttggtacccgccgggggcggggcctacattccaatggggcggagcctgagctagggggtgtggcctggctgctagagttgtggtggcaggggccctggccccgtctcaggattgcgctcgctttcatgggaccagacgtgatgctggaaggtgggcgtcgtcacggttaaagagaaatgggctcgtcccgagggtagtgcctgatcaatgagggcggggcctggcgtctgatctggggccgcccttacggggcagggctcagtcctgacgcttgccacctgctcctacccggccaggatggctgagggcggagtctattttacgcgtcgcccaatgacaggacctggaatgtactggctggggtaggcctcagtgagtcggccggtcagggcccgcagcctcgccccatccactccggtgcctccatttagctggccaatcagcccaggaggggcaggttccccggggccggcgctaggatttgcactaatgttcctctccccgcgggtgggggcggggaaattcatatcccctgttcgtctcatgcgcgtcctccgtccccaatctaaaaagcaattgaaaaggtctatgcaataaaggcagtcgcttcattcctctc

SEQ ID NO: 295176 - DNA, 3092 bp, Artificial Sequence
  derived and/or modified sequence
aggtgagcgaaaggaggaggcagaatccgggcagagggcagggagagggcctgtggggaagggacctcagtcctgctcccacccgctccctggagagcaggcggccagacacccaggtcagtgctcagggaccagctcttggcccctgccccttgcaggcgctcgcatgtggctcctctcggaccccgtagtccctgtcatatcccttctctccagctgtctccatgcctgcctcgtacccctcctatttgctctcccttccactctgtcttgcctttctcgttggggtgaaaaagtcttactctcttaagtatctttcatcgcctgagtttcacctcattgaccctgtttgtctcctctcagtgtttctctggctctcagaccctatctctattgcgtttgtgattgttttgctgttttacccactgcaccgtatggggggtgggggtgtcggggaggtgtgtctttcagtctttgcatgtctgtttctgcatatccaatcccactatccattccccttcctgtgccttcttttcccccaaagcccgttatcatcacccaaccacctgtatatttcaatcctttctcttgtttatctattcctatgaaggcaaggatttggggctattttgtctcctgctgtgtttgctaggcctagcaccgtgattggcacataaagggtactgaatacttactggggaataaatgattggatgtttgcatgcccgggtctccggccccctctgggatgctggcctctgtcccgcatcctcaaggtctgcccacacctgtctgagcctgtctgtctctgatgctcctgtctcacctgccactgcccctcattgtctcctcctgtccacagcccctgcccctccctgcccctgccatggggtcctgaattctcaccccttctctcctcccttcccacagaggccagaccaggagctgaccgggagctggggccacgggcctaggagcaccctggtcagggctaaggccatggccccgcccccaccgccactggctgccagcaccccgctcctccatggcgagtttggctcctacccagcccgaggcccacgctttgccctcacccttacatcgcaggccctgcacatacagcggctgcgccccaaacctgaagccaggccccggggtggcctggtcccgttggccgaggtctcaggctgctgcaccctgcgaagccgcagcccctcagactcagcggcctacttctgcatctacacctaccctcggggccggcgcggggcccggcgcagagccactcgcaccttccgggcagatggggccgccacctacgaagagaaccgtgccgaggcccagcgctgggccactgccctcacctgtctgctccgaggactgccactgcccggggatggggagatcacccctgacctgctacctcggccgccccggttgcttctattggtcaatccctttgggggtcggggcctggcctggcagtggtgtaagaaccacgtgcttcccatgatctctgaagctgggctgtccttcaacctcatccagacagaacgacagaaccacgcccgggagctggtccaggggctgagcctgagtgagtgggatggcatcgtcacggtctcgggagacgggctgctccatgaggtgctgaacgggctcctagatcgccctgactgggaggaagctgtgaagatgcctgtgggcatcctcccctgcggctcgggcaacgcgctggccggagcagtgaaccagcacgggggatttgagccagccctgggcctcgacctgttgctcaactgctcactgttgctgtgccggggtggtggccacccactggacctgctctccgtgacgctggcctcgggctcccgctgtttctccttcctgtctgtggcctggggcttcgtgtcagatgtggatatccagagcgagcgcttcagggccttgggcagtgcccgcttcacactgggcacggtgctgggcctcgccacactgcacacctaccgcggacgcctctcctacctccccgccactgtggaacctgcctcgcccacccctgcccatagcctgcctcgtgccaagtcggagctgaccctaaccccagacccagccccgcccatggcccactcacccctgcatcgttctgtgtctgacctgcctcttcccctgccccagcctgccctggcctctcctggctcgccagaacccctgcccatcctgtccctcaacggtgggggcccagagctggctggggactggggtggggctggggatgctccgctgtccccggacccactgctgtcttcacctcctggctctcccaaggcagctctacactcacccgtctccgaaggggcccccgtaattcccccatcctctgggctcccacttcccacccctgatgcccgggtaggggcctccacctgcggcccgcccgaccacctgctgcctccgctgggcaccccgctgcccccagactgggtgacgctggagggggactttgtgctcatgttggccatctcgcccagccacctaggcgctgacctggtggcagctccgcatgcgcgcttcgacgacggcctggtgcacctgtgctgggtgcgtagcggcatctcgcgggctgcgctgctgcgccttttcttggccatggagcgtggtagccacttcagcctgggctgtccgcagctgggctacgccgcggcccgtgccttccgcctagagccgctcacaccacgcggcgtgctcacagtggacggggagcaggtggagtatgggccgctacaggcacagatgcaccctggcatcgcccgcgggaggactcagactccagcacttccagcagcgcctgccctctatggacgacagcccggagctgcccacgggctgcagccagtatgccagggagctgccctcttcttccacaacagctggctctggggttctcaagatttattcaggatcgtgttaacggaggcggtgggaggatagggtccctgacgtgccggggacacacacagagaaccctccccgcccccgcaagggaggggggaggctcgctttttcttaaaaatataaatgtatttatctgc

SEQ ID NO: 295177 - DNA, 2866 bp, Artificial Sequence
  derived and/or modified sequence
agtgttggaggtgaggaggcggggctggcagggctagtcggggcatctggaaatttccgaccccacgcttcgggcgtttccttatcaggttcaccgctccctgatctcgcgctgcacttcgtaggcgcagccgctgcttgggaagtcctacttaagagctgaaggtcaggccaggacagtgagacctgactccttgctcctaccagcctactatggcttaagacccagggccagggtcccgttgatgtaacagagcagaggaccagcagatgaatggacaccttgaagcagaggagcagcaggaccagaggccagaccaggagctgaccgggagctggggccacgggcctaggagcaccctggtcagggctaaggccatggccccgcccccaccgccactggctgccagcaccccgctcctccatggcgagtttggctcctacccagcccgaggcccacgctttgccctcacccttacatcgcaggccctgcacatacagcggctgcgccccaaacctgaagccaggccccggggtggcctggtcccgttggccgaggtctcaggctgctgcaccctgcgaagccgcagcccctcagactcagcggcctacttctgcatctacacctaccctcggggccggcgcggggcccggcgcagagccactcgcaccttccgggcagatggggccgccacctacgaagagaaccgtgccgaggcccagcgctgggccactgccctcacctgtctgctccgaggactgccactgcccggggatggggagatcacccctgacctgctacctcggccgccccggttgcttctattggtcaatccctttgggggtcggggcctggcctggcagtggtgtaagaaccacgtgcttcccatgatctctgaagctgggctgtccttcaacctcatccagacagaacgacagaaccacgcccgggagctggtccaggggctgagcctgagtgagtgggatggcatcgtcacggtctcgggagacgggctgctccatgaggtgctgaacgggctcctagatcgccctgactgggaggaagctgtgaagatgcctgtgggcatcctcccctgcggctcgggcaacgcgctggccggagcagtgaaccagcacgggggatttgagccagccctgggcctcgacctgttgctcaactgctcactgttgctgtgccggggtggtggccacccactggacctgctctccgtgacgctggcctcgggctcccgctgtttctccttcctgtctgtggcctggggcttcgtgtcagatgtggatatccagagcgagcgcttcagggccttgggcagtgcccgcttcacactgggcacggtgctgggcctcgccacactgcacacctaccgcggacgcctctcctacctccccgccactgtggaacctgcctcgcccacccctgcccatagcctgcctcgtgccaagtcggagctgaccctaaccccagacccagccccgcccatggcccactcacccctgcatcgttctgtgtctgacctgcctcttcccctgccccagcctgccctggcctctcctggctcgccagaacccctgcccatcctgtccctcaacggtgggggcccagagctggctggggactggggtggggctggggatgctccgctgtccccggacccactgctgtcttcacctcctggctctcccaaggcagctctacactcacccgtctccgaaggggcccccgtaattcccccatcctctgggctcccacttcccacccctgatgcccgggtaggggcctccacctgcggcccgcccgaccacctgctgcctccgctgggcaccccgctgcccccagactgggtgacgctggagggggactttgtgctcatgttggccatctcgcccagccacctaggcgctgacctggtggcagctccgcatgcgcgcttcgacgacggcctggtgcacctgtgctgggtgcgtagcggcatctcgcgggctgcgctgctgcgccttttcttggccatggagcgtggtagccacttcagcctgggctgtccgcagctgggctacgccgcggcccgtgccttccgcctagagccgctcacaccacgcggcgtgctcacagtggacggggagcaggtggagtatgggccgctacaggcacagatgcaccctggcatcggtacactgctcactgggcctcctggctgcccggggcgggagccctgaaactaaacaagcttggtacccgccgggggcggggcctacattccaatggggcggagcctgagctagggggtgtggcctggctgctagagttgtggtggcaggggccctggccccgtctcaggattgcgctcgctttcatgggaccagacgtgatgctggaaggtgggcgtcgtcacggttaaagagaaatgggctcgtcccgagggtagtgcctgatcaatgagggcggggcctggcgtctgatctggggccgcccttacggggcagggctcagtcctgacgcttgccacctgctcctacccggccaggatggctgagggcggagtctattttacgcgtcgcccaatgacaggacctggaatgtactggctggggtaggcctcagtgagtcggccggtcagggcccgcagcctcgccccatccactccggtgcctccatttagctggccaatcagcccaggaggggcaggttccccggggccggcgctaggatttgcactaatgttcctctccccgcgggtgggggcggggaaattcatatcccctgttcgtctcatgcgcgtcctccgtccccaatctaaaaagcaattgaaaaggtctatgcaataaaggcagtcgcttcattcctctca

SEQ ID NO: 295178 - DNA, 2683 bp, Artificial Sequence
  derived and/or modified sequence
ggggaacaaaggtgagcgaaaggaggaggcagaatccgggcagagggcagggagagggcctgtggggaagggacctcagtcctgctcccacccgctccctggagagcaggcggccagacacccagaggccagaccaggagctgaccgggagctggggccacgggcctaggagcaccctggtcagggctaaggccatggccccgcccccaccgccactggctgccagcaccccgctcctccatggcgagtttggctcctacccagcccgaggcccacgctttgccctcacccttacatcgcaggccctgcacatacagcggctgcgccccaaacctgaagccaggccccggggtggcctggtcccgttggccgaggtctcaggctgctgcaccctgcgaagccgcagcccctcagactcagcggcctacttctgcatctacacctaccctcggggccggcgcggggcccggcgcagagccactcgcaccttccgggcagatggggccgccacctacgaagagaaccgtgccgaggcccagcgctgggccactgccctcacctgtctgctccgaggactgccactgcccggggatggggagatcacccctgacctgctacctcggccgccccggttgcttctattggtcaatccctttgggggtcggggcctggcctggcagtggtgtaagaaccacgtgcttcccatgatctctgaagctgggctgtccttcaacctcatccagacagaacgacagaaccacgcccgggagctggtccaggggctgagcctgagtgagtgggatggcatcgtcacggtctcgggagacgggctgctccatgaggtgctgaacgggctcctagatcgccctgactgggaggaagctgtgaagatgcctgtgggcatcctcccctgcggctcgggcaacgcgctggccggagcagtgaaccagcacgggggatttgagccagccctgggcctcgacctgttgctcaactgctcactgttgctgtgccggggtggtggccacccactggacctgctctccgtgacgctggcctcgggctcccgctgtttctccttcctgtctgtggcctggggcttcgtgtcagatgtggatatccagagcgagcgcttcagggccttgggcagtgcccgcttcacactgggcacggtgctgggcctcgccacactgcacacctaccgcggacgcctctcctacctccccgccactgtggaacctgcctcgcccacccctgcccatagcctgcctcgtgccaagtcggagctgaccctaaccccagacccagccccgcccatggcccactcacccctgcatcgttctgtgtctgacctgcctcttcccctgccccagcctgccctggcctctcctggctcgccagaacccctgcccatcctgtccctcaacggtgggggcccagagctggctggggactggggtggggctggggatgctccgctgtccccggacccactgctgtcttcacctcctggctctcccaaggcagctctacactcacccgtctccgaaggggcccccgtaattcccccatcctctgggctcccacttcccacccctgatgcccgggtaggggcctccacctgcggcccgcccgaccacctgctgcctccgctgggcaccccgctgcccccagactgggtgacgctggagggggactttgtgctcatgttggccatctcgcccagccacctaggcgctgacctggtggcagctccgcatgcgcgcttcgacgacggcctggtgcacctgtgctgggtgcgtagcggcatctcgcgggctgcgctgctgcgccttttcttggccatggagcgtggtagccacttcagcctgggctgtccgcagctgggctacgccgcggcccgtgccttccgcctagagccgctcacaccacgcggcgtgctcacagtggacggggagcaggtggagtatgggccgctacaggcacagatgcaccctggcatcggtacactgctcactgggcctcctggctgcccggggcgggagccctgaaactaaacaagcttggtacccgccgggggcggggcctacattccaatggggcggagcctgagctagggggtgtggcctggctgctagagttgtggtggcaggggccctggccccgtctcaggattgcgctcgctttcatgggaccagacgtgatgctggaaggtgggcgtcgtcacggttaaagagaaatgggctcgtcccgagggtagtgcctgatcaatgagggcggggcctggcgtctgatctggggccgcccttacggggcagggctcagtcctgacgcttgccacctgctcctacccggccaggatggctgagggcggagtctattttacgcgtcgcccaatgacaggacctggaatgtactggctggggtaggcctcagtgagtcggccggtcagggcccgcagcctcgccccatccactccggtgcctccatttagctggccaatcagcccaggaggggcaggttccccggggccggcgctaggatttgcactaatgttcctctccccgcgggtgggggcggggaaattcatatcccctgttcgtctcatgcgcgtcctccgtccccaatctaaaaagcaattgaaaaggtctatgcaataaaggcagtcgcttcattcctctca

SEQ ID NO: 295179 - protein, 79 aa, Artificial Sequence
  derived and/or modified sequence
MAALRQATAAARCRCRQPQPFLLACLHGGAGGPEPLSHFEVEVCQLPRPGLRGVLFRRVAGTALAFRTLVTRISNDLEL

SEQ ID NO: 295180 - DNA, 240 bp, Artificial Sequence
  derived and/or modified sequence
atggctgcgctgcgccaggccaccgcagccgctagatgccgttgtcgtcagccccagccctttttacttgcatgtttacacggaggtgctggagggcccgagcctctctcacattttgaggtggaggtgtgccaacttccccggccaggcctgagaggagttctttttcgcagggtcgccggcaccgcattggcattcaggaccctcgtgacgcgcatctcaaacgacctcgagctatag

SEQ ID NO: 295181 - DNA, 240 bp, Artificial Sequence
  derived and/or modified sequence
atggccgccctgcggcaggccacagctgctgcccgctgccgctgccggcagccccagcccttcctgctggcctgcctgcatggaggagctgggggccctgagcccctgagccactttgaggtggaggtgtgccagctgcccaggcctggcctgcggggcgtgctcttcagaagagtggccggcacagccctggccttccgcaccctggtgacccgcatcagcaatgacctggagctgtag

SEQ ID NO: 295182 - DNA, 1147 bp, Artificial Sequence
  derived and/or modified sequence
ctccctcctagcatgatgacccgcagggttaccctcgatccctctaaacggcagaactctaaccgctgtgtttcgggcgcctctctgccccagggatccaagatcaggtcgcagacgaacctgagagaatcgggggacctgaggtcacaagttgccatctaccttgggatcaaacggaaaccgccccccggctgctccgattcccctggagtgtgaagctgaccagctcgcgccctcctgaggccctgatggcagctctgcgccaggccacagcagccgcccgctgccgctgccgccagccacagccgttcctgctggcctgcctgcacgggggtgcgggcgggcccgagcccctgtcccacttcgaagtggaggtctgccagctgccccggccaggcttgcggggagttctcttccgccgtgtggcgggcaccgccctggccttccgcaccctcgtcacccgcatctccaacgacctcgagctctgagccaccacggtcccagggcccttactcttcctctcccttgtcgccttcacttctacaggaggggaaggggccagggaggggattctccctttatcatcacctcagtttccctgaattatatttgggggcaaagattgtcccctctgctgttctctggggccgctcagcacagaagaaggatgagggggctcagcggggggagctggcaccttcctggagcctccagccagtcctgtcctccctcgccctaccaagagggcacctgaggagactttggggacagggcaggggcagggagggaaactgaggaaatcttccattcctcccaacagctcaaaattaggccttgggcaggggcagggagagctgctgagcctaaagactggagaatctgggggactgggagtgggggtcagagaggcagattccttcccctcccgtcccctcacgctcaaacccccacttcctgccccaggctggcgcggggcactttgtacaaatccttgtaaataccccacaccctcccctctgcaaaggtctcttgaggagctgccgctgtcacctacggtttttaagttattacaccccgaccctcctcctgtcagccccctcacctgcagcctgttgcccaataaatttaagagagtccccccctcccc

SEQ ID NO: 295183 - DNA, 240 bp, Artificial Sequence
  derived and/or modified sequence
atggccgccctgcggcaggccaccgccgccgcccggtgccggtgccgccagccacagccgtttctgctggcgtgtctgcatggaggcgccggcgggcctgagccactgagtcattttgaagtcgaagtctgccagttgccaagaccaggattaagaggcgtcctcttccggcgtgtcgctggcactgcactcgcttttaggactctcgtgacaagaatctccaatgatctcgagctctag

SEQ ID NO: 295184 - DNA, 240 bp, Artificial Sequence
  derived and/or modified sequence
atggcagcacttagacaagcaaccgcagccgctaggtgcagatgtcgccagcctcagcctttcctgctcgcttgcctccatgggggtgcagggggacccgaacctctcagccactttgaggtggaagtttgccagctgcctcgacccggactgcggggagtgctgtttcggagggtggccggaactgctctagctttccgcaccctcgtgacaagaatttctaacgacctggaattatag

SEQ ID NO: 295185 - DNA, 240 bp, Artificial Sequence
  derived and/or modified sequence
atggccgccctgagacaggccaccgccgccgccagatgcagatgcagacagccccagcccttcctgctggcctgcctgcacggcggcgccggcggccccgagcccctgagccacttcgaggtggaggtgtgccagctgcccagacccggcctgagaggcgtgctgttcagaagagtggccggcaccgccctggccttcagaaccctggtgaccagaatcagcaacgacctggagctgtag
